United States Patent Application Publication US 2017/0114356 A1 - sequence listing, part 109

SEQ ID NO: 206490 - DNA, 2454 bp, Zea Mays
atgatgaatttagaggacgctgagagcgtgtgtgagaaggtgtgcgtggtcgaagcggatttgactcgattttgtttataacaacatcaggcaggcagctacctcgtgataatcaaagcttaattaatcccgagcgaaaattatgatgcgcacatggctgccccgccggacgagagatgattattacaagtaagcacgaggaaagggaagagaagaagaagagggctcgtctcgtcttgcaggccggaggctgcgtcgctgccccgccggcgccgccgtatgccagttctttgtcagtcccttcggcaggtcttcgtgggtccttctccttcgccggcgacgagcacccaccaagcgggtacagcgctagttattgcttcaccttccttatctttgctgcagcaactggaggccgaggcttttacaaggagctggggaagaatgggcagaagctgctatcgaatctgaagctttgcttggcacaccagcactggagagatgtataagaaccaactccaggagcttgctcagaggagctgcttcaatctgccgtcctattcctgcatccgggagggaccagatcatgcaccccggtttaaggctacagttaatttcaacggggagatgttcgagagcccagtgttttgttccactctgcggcaggcggagcatgcggcagctgaggtagcactcaatgagttatcaaagagggggccttcgtcgacgctggctgccaaagttctggatgaaaccgggatatacaagaatcttcttcaagaaactgctcatcgagctggtctaaaactccccatctatactactattagatctgggccaggtcatacgcctgtgttcgcatgcacagtggagttggcaggaaaggcatttactggcaatcctggcaagaccaagaagcaagctcaaaagaatgctgcaatggctgcctggtctgaattgaagaaactgcccagggtaggtgagccgtcatcctcatcttgtccacctgatcaggatgatgaagtgcaggaacaggtcgtagttactcggactcttgcaagcttgaaccaggcaaatagtggcaaggtgccacatcagaaggaaaaacagcaaagcaataaccgcccatcatcacggagatgttatcctaaaccaaatacaccattctaccgaccatttatgcaaaatcaggcttatcctagcgttccaccagatcaagctatgtaccatctgtggcatcggatgcaagtgacagccaacgcctcgctttccagtggtaccagctatgggcaatacaagtttttgcccaccagcagctatgctccccatgtaccctccttcacctcaagggcaattctccaatccggctaaccaggatgctctaggccttcttccatgttttcctgatgcttctcctgccatgctacggcacttctcaccttaccctgtctcctatgtgccaagaagtcctctgccggttactgttcacaatgttcatgagagaaggcatgaccatactgaaacagttgagcttcctgatgctgtggtgttctcccaatgcacgaccctagattcctttaggacatcagaatgtggcggtccaccactcaaggttcaagaaccaaccaaaaatcggaaagaaggctgtattgggtcccctgagaaagaacttgacactcttgccgtctcaagctctaccgcacaagcgtcgtcgcaaaagttggaagcaaatgaaggtaagcaaacagtgcaggcaggtttgaagcagacccatgaacagcagctgatgtcatcctcgtcttgtgttagttcttcagttgtggcacagagctcgcattacgctagctccatccagcatgatgagtctatacatagaaggaatcctcctcatactagttcgcctgcattgcctgatgtgtggtcttcccgctcgcaagctctgcccagatttggatcaccaagttgggtgttccagcagcgaccttggttggctgcacccgtcacagttcgaaccgctgttcctgtctgctcagccaggccaaacgtggtgaattctaccactggaataagacctgctgcccagagccatgatggagagagagatctgaacagcgccgcagcagcgagttctggattcaataaactccaaatttgagctgcggttttggttctgctgagcttttcatctcagttttgtttgcttcttggcttgaggtttattttttagttagatataccagataggctcttaggttttcattttacatttaccagatgtccagttccttctgaagataaatggacgagaactgtaatataaaaaatgcagaggcctttctcatgcgatttgaattcagtttcagtatgcaatcgatgtagttccagcagtgtatggtacaaccgcctggctgctgagctttcggcagctgtagtcacagccaatgcaatcgagcgcag

SEQ ID NO: 206491 - DNA, 803 bp, Zea Mays
ctgaagcagataagccgtacgccgtccccttgcacagcaaacatccatggcgactgcccgcttgccctctcgctccttcctgtccccggctcagcaatcctatccacggcttcccgcctccgtccgcctctgcctctctcatcacgagcaacctcccaccggccccaagcggcaccgacgcgccgccacttcgcatcctgccttttctgcagccgcgcggggtcgtgccaagaagattcccatcgcggacaccgatgagcccgccgccggagtccgcgtcaccgatcgcggcatctcttaccgcctcgatggcgcgccatttgagtttcagtatagctacactgaggccccacgcgcacgccccgtagcgctccgtgaggccccgttcatgccgttcgggcccgaggccacgccacgcccctggacgggaaggaagccgctgccaaagagccgcaaggagcttccggagtttgactcgttcgtgctgccagcaccggggaagaagggggtgaagcccgtgcagtcaccgggtccgttcctcgccggtatggagccgagataccaatcggtgtccagggaggacatactcggggagcccctaaccaaggaagaggtctccgaactcgtgaaagggagcctcaaatccaaacggcaactcaatatgggcagggatggtttgacacacaatatgttggagaacattcattcacattggaagaggaaaagagtttgcaagataaagtgcaaaggtgtctgtacaatagatatggataatatctgccatcagctagaggaaaaggtgg

SEQ ID NO: 206492 - DNA, 827 bp, Zea Mays
ctgaagcagataagccgtacgccgtccccttgcacagcaaacatccatggcgactgcccgcttgccctctcgctccttcctgtccccggctcagcaatcctatccacggcttcccgcctccgtccgcctctgcctctctcatcacgagcaacctcccaccggccccaagcggcaccgacgcgccgccacttcgcatcctgccttttctgcagccgcgcggggtcgtgccaagaagattcccatcgcggacaccgatgagcccgccgccggagtccgcgtcaccgatcgcggcatctcttaccgcctcgatggcgcgccatttgagtttcagtatagctacactgaggccccacgcgcacgccccgtagcgctccgtgaggccccgttcatgccgttcgggcccgaggccacgccacgcccctggacgggaaggaagccgctgccaaagagccgcaaggagcttccggagtttgactcgttcgtgctgccagcaccggggaagaagggggtgaagcccgtgcagtcaccgggtccgttcctcgccggtatggagccgagataccaatcggtgtccagggaggacatactcggggagcccctaaccaaggaagaggtctccgaactcgtgaaagggagcctcaaatccaaacggcaactcaatatgggcagggatggtttgacacacaatatgttggagaacattcattcacattggaagaggaaaagagtttgcaagataaagtgcaaaggtgtctgtacaatagatatggataatatctgccatcagctagaggtcctcggaagccgtgcaagggagatgacgctag

SEQ ID NO: 206493 - DNA, 2256 bp, Zea Mays
gtttgcttctctggcaaagaaaagaacaaaagaaaattcacaccttgctcagcgaagctagtcctggtgcacaaagtgaatagccaagattgcctttgaatgttttttatatcactagttacgttaccgaggaaagatcactcggtaaatcacatactattagggtcgtcgttgttcaaacgatttccattagctctataaaacattggtctcttacatttcgggcgagcggctgaggaggtgcaagtgcaagcgagaatgtagcaagtatacaacggcacgtgaagacgaagacgaaacaaaatgaaagcatgcttcatacggtcacagtggcggcttcattcaacgcaacaactcccggaagctcctttccttccaacaattccaggctagcgccacctcccgtggaaatgtggctcataacgtcagcaactcccaccttctcgacggcggcgacggagtctccgcctccgatgatagttgtgacgcccttgccgctgagttctgccagcttcttttgctttacctcggttcctacagcgaacttgtcaaattcgaagacacccatgggcccgttccagatgaccgtcttggttgtatccagggctgcgttgaatgaagcgacagaatctgggccaatatccaggcccatccaaccatcaggaattgcagatgctggaacaatctgtaggaaaaaaaaaattatatggtcaagtttctccctacgcagcagaactgagagatgcttcagctccactacaaaagatctgctgattaggaaaaagagaagatgcaacaaacctggctgttagcatcaggggcaaacttgtcagcaatgacaacatcggttggcagcataagggagacacccttttccttagcctttgcaagtagagacgttgcaagctcgagtttgtcttcctcgaccaatgaagcaccaacagggagaccttgtgccttgtaaaacgtgaagatcataccaccacccaagagaaggatatcacacttctccaacagggactcaataaccccgatcttggatgacacctttgaaccacccacgatggcagcaaaagggcgtttagggcttgaaacagctccgacaaggtaagagataaccttctgcagaaggaaccctgcaacagaaggctgcaaaaacttggtaactccctcggtcgatgcatgcgccctgtgggctgttccaaatgcatcgttaacataaagatctgctagggaggcaagcttctgtgcaaactctgggtcattcttctcctcttccttgtagaatcttacgttctcaagcagcagaaccccaccgttgggcaaggccgccaccagcttctcaacttcagggccaataacatcgtcggctttttgcacctatttgtatgtatagatacgctttagtcagaacaatcaattagcacatgtgatttcattacaagtaccaatgatgtagaataaatcaatacctgaatgccaagaagctcagacaaccgtcctacaaggggagctaagctaaacttgggtgtaaaacccttagggcgaccctgcacatccagagatgaccttggcgcccttgctgaggatgtactggatggtggggatggcggcccggatgcgggtgtcgtcggtgatgttctggttctcgtcgagcggcacgttgaggtcggcctccgtgagttcccctacgctcttcttcgccatggtggccatggcccgcgtgccacgcccggagaacgcctgccggcatcgcgacgcgacgtggaccgcgagccgcgcgtcgcccgccgcgaaagccagagaccgtgccggctggcacgccgtggcgaggcctcccctgcgcagcggggcgacggcggcggctggagcgcagggacagagagggagcgattcgggagggcgggaagaaggctttgtggacgataaagtggggaggagatttgcttatcgctggcgagaggtcaggacgacggttccggtgggtgtgtgggggaggagacggcggtgatcgattacggcgatggatggcgacgtgtgggggctcggtggcttcgttttcccctgtcctctgtgtgatctgggatcgccgtcccttctcagtcccacatttccgaaactcggtgagtttactggatttgtccaaaggcggcagccctcaaaaaataagttttactccatactcgccaagctttgcagccggccgcgttctcgcctaaggtgaattccctaccggaacagaacaggccgtcgtct

SEQ ID NO: 206494 - DNA, 893 bp, Zea Mays
aagacccttccatttattttccataaataggatgctgcaagcgaaggccaccaggattcaccaccatggccaaccacctgtgcggcgccggggagagcatgagcatggcgccttcctgcctgcatcgatcgacgagggctgcacgaacgatggggtccgcctccgcctcagtgatgacgaccagcctgctggcgctggcgctggcagcgctggctttcgtctccagggccgcggcgcagggcaacggctgttccagcgtgatgatgaccctggccccgtgcatggacttcatctccagcaaggcgtcggagccggggatctcctgctgctcggtgctggctggagtcgtgcagaccgacccccgctgcctctgcatggtcctggacggcaccgccacgtccttcggcatcgccatcaaccagaccagggcactggagctccccggcgtctgcaaggtcaaggcgccgccgctcagccagtgcacaggcgtccctgcggcacctgcaccgacgcctcccgacgaaccagcagcggcagcggaggaagaagccgacacagctgcagatgccccttcagcaaatggagcctcaagctccacaaactcaaagaatgcagcgagcttactgcttctcatctgcgcattgctgtatgccttctaataagtggtgatacaacttcgctggccatgtcaccgtgcaggaattagaattggcttcgtattaagaaaagaaaatgggaaaatctactgtatcattttgatagactcaaagcgaatattgaagttatttgatcatattgggaaaatctacttcaatagactacttcgattcatccgagcacgaagactcaaagcgaatattgaagttatttgatcatattttccttttgtaaag

SEQ ID NO: 206495 - DNA, 2418 bp, Zea Mays
ctggcagctggcattgggaaaatcaggcaactcaacttgatagatcaaaggatgaaggtgagaatgaatcttacagttcaaccatatatcctcttccggacaatgtaaatatcaactccagtagatcgatcagtcggtgtcctagccatggcatcagaatagcaatggacagctgcgacagaaactcaactagcagaatcacagggaaggatattaagcaggcgattatgttcagtgcctctttgaacaagctcacattaaaccaagatgaggccaccgaatacacaaatttgatcctagaagaacttcagacaggtcaaggagtcctccagatgaatgtcatgagcaagggcctgtcaagggatctccaaccaacctgcgggccaataccagtgccaatgaaatgcagccgacagcgacatatacttactgcaaccgtagtcttcttccaagctcactggaggcgtatatttgtggttttcttgtggctcatggcatgtgctgcactcttcacatggaagttcatgcagtacagacagcggttggctttcgaggtaatggggtactgcctgtcgacagccaagggggctgcagagacgctcaagctcaacatggccattgtgctcctacctgtttgccgcaacacggtcacttggctcaggagaagccgtgttatcaactcggtcatcccatttaatgacaatattaacttccacaagcttgttgcagcgggaattgtgatcggtgtaatccttcatggaggcatccacctggcatgcgacttcccaaggatcacaaggacagataaggccttctttggacgcacaattgccgctgactttgggtaccaccagccatcctacctggagatagtggtatcaaccgaggggacaactggtatagcaatggtggtactaatgtttgtcgcattcttgcttgctagtagtccttcgagaagaaatccaggaatgctgccacctctcgtcagacagttagctgggttcaatgccttctggtactcgcaccatgtgttcatcgctgtctatgtgctcctcattgtgcattccatgttcctattcctagcaaaggatgtagcagagaagacgacgtggatgtatgtcgcaattcctgtggtgatctacattggagaacggatgttcaggatggtcagatctatggtgttcgatgtcaagatcctcaatgccacagtttatccagggatggtacttgcactcaaggtgacaaagcctccaggttttcggtatcaaagtggaatgtatgtatttgtccaatgtccagaagtatcaaagtttgaatggcacccattttcccttacatctgctccagacgatgatcacttgagcatccatataagatctcttggtgattggagctaccaaatgtatgatgtcttccaacagatgctactttccagcaactccagcatgcctaaaatattctttgatggtccctacggtgcagcgtcacaggatcactcaaagtacgaaattatattgttaattggacttggaataggagcaacgcctttcataagtgttctcaaagacattgccaatggattagataaggggcatggcaacttaaattatcactctgaccgactgaagaaggcctacttttattgggtgacaagagagcaaggatcctttgagtggttcagggatatcatgaaagaggtttcggttctagacagcaagcagggtgtgatagaaatgtataactacctgacaagtgtctaccaagaaggtgataagcggtcgatgctaataagtgcgattcaagcacttcattttgcacgccatggcattgatatcatctcaaaaactcctgttcatacgcacttttcgaggccaaactggcctagagtgctacatggccttgcaagaaggcatatcggggagaggataggggttttctactgtggtccggacgatttgggaaggcagctggagaagctctgccacaaagtgaacacaaaaacattcacgcgatttgtgttccacaaggagcatttctaataatagagactagcatagatcaactccttaggaacaaacctgtcaagtatgatctcaaagctgccaagcacttcatttttttcgcatcactccttcctatcttttgctttagtatctctgtcttcatttaaccattataaagctgatcttacttgaggagctttgtatctaactagaaaaaaacagcgccctatcgggcgcttagacgatttcttgaatgtgatctttgtgatttttttttcttttcagctttcagtgtgcaccctaatactcagaacaagtctactattatagagatggacgatgaaactttaccaatatagccattctaccgctgtccaaacagtgtaatggacatatgttcacaaatagaccgggg

SEQ ID NO: 206496 - DNA, 3113 bp, Zea Mays
gccaaccaaaagctatcacataatacgcacgaatgatcacgagtcaattcctaactcaccatggcaccttctcccggactaccaaacccaaccgcacggcaccaccactgaaagacaaagacggccagccctgctcttgtacccttgcacaaacgactacccagaccgatatgctgcattacataggtgctcgtgctctcgtgttgcctttcttcacacaccgtatgcattccaagtttccaaccaaatcataatggcgtcctccgacgaacccgactctcgctcaaagaaccctgccatgcagccgagctcgccactatcctccgagtatgcatttcaaggcacttctccagcctggccggcccgcagcccttccatacagttcgtgtccaacgtcgttgtcggtgacggcgacgcggtggcagcgtccctgagcgcctgcccgtcgtcgacggcgagctcgtctcgtgggagctcatcggacattgagatccaggtgctgttccaggggggcgacgacgacgatggctccacgacgacgtcgccggcggcagcgtggtcgcgcagcacgtctttccgtgggtgcagcgacggcgagctggatgtggaggccgggaggtcaaggctgctgcgggcgcattcgtcggtgaggtcggtggaggagttcatccagcgcgactgcacgggggagctgaggtggagtgctctggagggagggcttcagttcgcctccaagtcgcggagtaacgcaggtgagaatgaatcttacagttcaaccatatatcctcttccggacaatgtaaatatcaactccagtagatcgatcagtcggtgtcctagccatggcatcagaatagcaatggacagctgcgacagaaactcaactagcagaatcacagggaaggatattaagcaggcgattatgttcagtgcctctttgaacaagctcacattaaaccaagatgaggccaccgaatacacaaatttgatcctagaagaacttcagacaggtcaaggagtcctccagatgaatgtcatgagcaagggcctgtcaagggatctccaaccaacctgcgggccaataccagtgccaatgaaatgcagccgacagcgacatatacttactgcaaccgtagtcttcttccaagctcactggaggcgtatatttgtggttttcttgtggctcatggcatgtgctgcactcttcacatggaagttcatgcagtacagacagcggttggctttcgaggtaatggggtactgcctgtcgacagccaagggggctgcagagacgctcaagctcaacatggccattgtgctcctacctgtttgccgcaacacggtcacttggctcaggagaagccgtgttatcaactcggtcatcccatttaatgacaatattaacttccacaagcttgttgcagcgggaattgtgatcggtgtaatccttcatggaggcatccacctggcatgcgacttcccaaggatcacaaggacagataaggccttctttggacgcacaattgccgctgactttgggtaccaccagccatcctacctggagatagtggtatcaaccgaggggacaactggtatagcaatggtggtactaatgtttgtcgcattcttgcttgctagtagtccttcgagaagaaatccaggaatgctgccacctctcgtcagacagttagctgggttcaatgccttctggtactcgcaccatgtgttcatcgctgtctatgtgctcctcattgtgcattccatgttcctattcctagcaaaggatgtagcagagaagacgacgtggatgtatgtcgcaattcctgtggtgatctacattggagaacggatgttcaggatggtcagatctatggtgttcgatgtcaagatcctcaatgccacagtttatccagggatggtacttgcactcaaggtgacaaagcctccaggttttcggtatcaaagtggaatgtatgtatttgtccaatgtccagaagtatcaaagtttgaatggcacccattttcccttacatctgctccagacgatgatcacttgagcatccatataagatctcttggtgattggagctaccaaatgtatgatgtcttccaacagatgctactttccagcaactccagcatgcctaaaatattctttgatggtccctacggtgcagcgtcacaggatcactcaaagtacgaaattatattgttaattggacttggaataggagcaacgcctttcataagtgttctcaaagacattgccaatggattagataaggggcatggcaacttaaattatcactctgaccgactgaagaaggcctacttttattgggtgacaagagagcaaggatcctttgagtggttcagggatatcatgaaagaggtttcggttctagacagcaagcagggtgtgatagaaatgtataactacctgacaagtgtctaccaagaaggtgataagcggtcgatgctaataagtgcgattcaagcacttcattttgcacgccatggcattgatatcatctcaaaaactcctgttcatacgcacttttcgaggccaaactggcctagagtgctacatggccttgcaagaaggcatatcggggagaggataggggttttctactgtggtccggacgatttgggaaggcagctggagaagctctgccacaaagtgaacacaaaaacattcacgcgatttgtgttccacaaggagcatttctaataatagagactagcatagatcaactccttaggaacaaacctgtcaagtatgatctcaaagctgccaagcacttcatttttttcgcatcactccttcctatcttttgctttagtatctctgtcttcatttaaccattataaagctgatcttacttgaggagctttgtatctaactagaaaaaaacagcgccctatcgggcgcttagacgatttcttgaatgtgatctttgtgatttttttttcttttcagctttcagtgtgcaccctaatactcagaacaagtctactattatagagatggacgatgaaactttaccaatatagccattctaccgctgtccaaacagtgtaatggacatatgttcacaaatagaccgggg

SEQ ID NO: 206497 - DNA, 1065 bp, Zea Mays
atgcaactggatttacattattatgggcaatctgcatctttcattgaatcgaccagatttggcagtgacagacttcaggggggctcaagaattgagggctgatcttcgttcttatcaaggattggtgcgtgcttatctagcactttctaaatgcaaagatgcattattcactgcacgcgaggcgatgaaggttatgcatcagtctgcaaaagctcttaagctagttggtgatgttcatgcaattagttccagtgggagggagaaggcaagaaagttctatgaatcagccattcgtcttgaacctggatttcttggagctgcactggctctggctgatctgcatgttgcggaaggacggaataaggaggctgttatgctactggaaagatatatacaacaatggtcagatgattctctacacataaaggtggctcaagtacatgcggcaacaaatatgctttcggatgcactttcccattatcaatctgcactaagaataaacccacaaaatgaagctgcaaagaatggattggagcgcttggagaaacaaatgaagatgctccagaagacgatgaagagaacgaggaggaggacgtcgatgttgatcgagatgactttatttgaagctggctcattacaggtctcttatacctgtggaagctggcgctgattgatcacgaccatctttgtatagcggtggtagcagtggttttgtgctatttgtgactgaatagcaggtgttctagcagaaccccagttgttttagcttgtaaaaatgccgcccgaaacgaattttgcacgtgttgtatgccatttcctttcagttcttctttgtgtattcttttgcaccaaatatggttgacccaactcttctctccactcagatcacagtatttcccttaccgcctgttcaaagtcagctgacatgcccgcccataatacctctctgtcatcatctgctttatcagctgagttgcatgtctttgaagagccatagaactgaccctttattctatcgaggtattctgtgacagtgtcacactctggaattgagcccgcaataga

SEQ ID NO: 206498 - DNA, 1357 bp, Zea Mays
ctcagaccctcacggtcaccctcatggcctcacccactcaccctctcggtctctccctctctcctagtttccccaaaaacgaaaccctagcgccgccgccccggtggccgtggacccctagagtagaaaaatagagcaggcgtcggtggccgtggacctgtggaggagagcaggcgccgccgcgccagtgtgctgcgtcgccggcgaaagcgtcattgagcaccgttcggagattccccttcccagcatcatcgcctgaccaagatttgacacagttcatctgtcgctcgagccataacgggcgtgatgtgatgaagaaactgaattttgtagtggaaatgaggtactcacatcgtgaatctttctaaaattgtggttatcaatgtgcactaggatcctgcaacaaacagatagacataaacctgctcataacctatactatatacatatacacactgtttcatcggaggtattgtgaggttccgccggcgtctcggcacaagtgaaccacgatctgcatctcagtcgtctccccaagcaccatcgcctatcatggatgcctacaggcaccagttgcagccagcaaaagcaaacttacaagtgaggtggttcctcccgcggattcaccagtaataaattatccaatgctttagacctagcaaagtgctacaaagaaaaggtcgtgcacatcacctacagggaggcctacaaagaagctttttgttaatgacgttgattagaaggatggaggggctgactgtgctgcagccaaagctaggcttattagctcctgcaagatcactggaatagatagttcagaacaaataagtgacattttgcgtggcattgaaggaagagtgatactgctttggtcatgtcttcttccacatgtgcattgagatctgtggtgagctatgtaattgacccaaaaggcacttcaagcgggcaggaaagtctaaggcccttactaagtacttccaaggtgttctggacaaagaaatcttgtacattaaaacaggaggatacaagaagctggagtggttgtctgaaggcttttgaactgtttgaagcgttagtgtagctttggtgcttttgtgactgatcagctctggagcagctagagtgatgtagttgtgggattttgaacaatagctagagtgatataaaacattagtgatgtagttgtgggcttttgaactgtttcaagctgaagtgatgtcgctgtggtgcttttgtgactgatcatctctggagcttttgtgaatgatctagctagctatctgtaaatgatctagttgtgaatgatattataattgtgatgcttttgtgaatatataattgtggtgcttttgtgttt

SEQ ID NO: 206499 - DNA, 1209 bp, Zea Mays
gttccttcaatttttaatcgaacaaaggcaacttgttttgcttatgggcaaactgtggaaagacatataccatgcgtccccttcctcttaaggcttcccaagatatcttgaggttaatgcaccatgcatatcgaaatcaaggatttcaattgcatgttagcttctttgagatatatggtggcaaattatttgaccttctcaatgataggagcaaactttgcatgagagaggatgcaaagcaaaaggtttgtattgttggtttgcaagagtatagagtgtccgatgtagagactatcaaggagttgattgaaaaaggcagtgctaccagaagtactggcacaaccggtgcaaatgaagagtcctcaaggtctcatgccattcttcagcttgctattaaacgccgtgtggatggcaatgactccaaaccacccagacctgttggcaagctgtcatttattgaccttgctggcagcgagcgtggtgctgatacatctgacaatgataaacaaacaagaattgagggtgctgagatcaataaaagtttgcttgctttaaaggaatgcattagagcacttgataacgatcagactcacattcctttccgaggtagcaaattaactgaagtcctgcgtgactcattcattggagactcacgcactgtcatgatatcatgcatttctcctagttctggctcttgtgagcatactctgaacacattgagatatgcagacaggtgagtacttttctccattgtttctgttgctataactgctcatattcttataatatgcacaagacattctcattttttagagtgaagagtttgtcaaagggaagcaatgccaagaaagatgtgtctttggcagtgcctttaagagagtcgagcccttccccactgccttcagttgtaccctcattctctgcatctgaggtgatgaatgatatcaccgagagaaacaattttggttggcccaagcagcagtatgttaaagaacggcctgctccgacatttgttgaacgaatgcccaaagtgaaggatgccgtggagttcgcaacatcagacggtgcttatttgaagggacaaagaagccagggctgtatggcaccaaatatagctgaaataccggatacaatgtaccagcagagaaggcaaccagcaaggaaggctaaagataccgctttgcggaataatatgagaaattccgttgc

SEQ ID NO: 206500 - DNA, 1584 bp, Zea Mays
gtcaaaccctaaaatacacttcaattctattataatttaagttctgctgtctgttttcagaaataacgaatgcccagcgtgccgcactcattgtgctagtagacgttccttgagggatgatcctaactacgatgctttgattctagctttatatccagatattgataagtatgaggaagaggaacttgcattcagtgaagaggaaaggacccgtaacaaaaggaatccattgctgagacatttcggaggcaaacagaagcacttgtgaagaagcgctccactgtaaaagcaacagatgcagcttctacaaggaagactcgacggaatatgcgaccaaggaggagaggacgaattagttctcctgatattgccccaactgattttgacgatgatgatagagaagagaacggtgatgatggaagcaaggagtcgtcttctgttgatgatcactccccagatgtaaggccaaaaagatctcggaggtggcccatgccacgccgttcccctgctaaggccattggcaataccgacaatagcattgaggataatgacgactcaggaggtgctagggactttatgactgcttctccgctgcggggagagatgcttgcatgggggaaaaatggcacccgcagccaaacccggcatggcaactccagtggctccagcggaaggatgggcaggagtggccgtgttgccaagttggtagatcagttccgtaatgctgatgacttcgataatgagttgaacctgtatcttgtcctgcttccacttgatggtcaaagtgtgcctaaactggaaaagccctacctcagttgcctgccaacactatctgttcggcatctctgccagtttgttgctctccagttgtctcggcaacccaaagaagtcgagatatatatcaggaaaagcaaggatgcatgcttgtcagccaattacacctgtaaatacgagacaaagccagaacagcctaatggtttagagagactgtgggaagagaagtctctttcggatctctacccttccctcgccacccgtcaaggagatctggaattgttatactctctgaaagcacaaggacaggggtagatcagatattcactatcaactcgaccagtcgcctcaacgccactgtctgcaaggaccttcaactggtggaagcttgtacataaggctttcaatatagaaaaagatctgaaagtagcttacttgttttaaatttgctctgatatcttgtgaggtatatggtatacccaggttcattagtaaaaatgtgtggagttgagcagtagcaaaccaaccatctgaaacaggctgagcaaagcttgtctatttctgcagccagtattaattgtgtcccatttgaactgatgcaagtactgaggacctctgttccaggatgatccgtggcttgctgtcgtcgccttgtgtgacgcgttcgcgttatccatgttgtcacgccacgtgtccgcgaattagaatgtccagttgttaaccagtaggaaatggtaaacatctgcagctttgtagggacagtattgaaatttttattgtttatacaataaagctcacgggtcgttgctg

SEQ ID NO: 206501 - DNA, 1531 bp, Zea Mays
gaaataacgaatgcccagcgtgccgcactcattgtgctagtagacgttccttgagggatgatcctaactacgatgctttgattctagctttatatccagatattgataagtatgaggaagaggaacttgcattcagtgaagaggaaaggacccgtaacaaaaggattcaagaatccattgctgagacatttcggaggcaaacagaagcacttgtgaagaagcgctccactgtaaaagcaacagatgcagcttctacaaggaagactcgacggaatatgcgaccaaggaggagaggacgaattagttctcctgatattgccccaactgattttgacgatgatgatagagaagagaacggtgatgatggaagcaaggagtcgtcttctgttgatgatcactccccagatgtaaggccaaaaagatctcggaggtggcccatgccacgccgttcccctgctaaggccattggcaataccgacaatagcattgaggataatgacgactcaggaggtgctagggactttatgactgcttctccgctgcggggagagatgcttgcatgggggaaaaatggcacccgcagccaaacccggcatggcaactccagtggctccagcggaaggatgggcaggagtggccgtgttgccaagttggtagatcagttccgtaatgctgatgacttcgataatgagttgaacctgtatcttgtcctgcttccacttgatggtcaaagtgtgcctaaactggaaaagccctacctcagttgcctgccaacactatctgttcggcatctctgccagttgttgctctccagttgtctcggcaacccaaagaagtcgagatatatatcaggaaaagcaaggatgcatgcttgtcagccaattacacctgtaaatacgagacaaagccagaacagcctaatggtttagagagactgtgggaagagaagtctctttcggatctctacccttccctcgccacccgtcaaggagatctggaattgttatactctctgaaagcacaaggacaggggtagatcagatattcactatcaactcgaccagtcgcctcaacgccactgtctgcaaggaccttcaactggtggaagcttgtacataaggctttcaatatagaaaaagatctgaaagtagcttacttgttttaaatttgctctgatatcttgtgaggtatatggtatacccaggttcattagtaaaaatgtgtggagttgagcagtagcaaaccaaccatctgaaacaggctgagcaaagcttgtctatttctgcagccagtattaattgtgtcccatttgaactgatgcaagtactgaggacctctgttccaggatgatccgtggcttgctgtcgtcgccttgtgtgacgcgttcgcgttatccatgttgtcacgccacgtgtccgcgaattagaatgtccagttgttaaccagtaggaaatggtaaacatctgcagctttgtagggacagtattgaaatttttattgtttatacaataaagctcacgggtcgttgctg

SEQ ID NO: 206502 - DNA, 1523 bp, Zea Mays
gttagagatagatttgtggtcaacatggacgcttattattctccgccgttggcgtcgtgaagcccgaagacaccgatctcacggacaaacttacaacatatggctatggcgacggcgaagctgaactccccggctaccagcttggtcgctggcggccgcacgcgccgatctgcgcccgcccgctgcacgacggtgatccgcgccgccgcaggctcctactcggacgagctcatctccaccgcgaaatctgttgcttcccctgggcgtggtattctggcaattgatgagtcaaatgcaacatgtggaaagaggttatcatctattggtttggacaacacagaagtgaaccgccaggcttacaggcagcttttgctgacaactgctggtcttggtgaatatatttctggcgctattcttttcgaggagaccctttatcaatcaactacagacggcaagaagtttgttgactgcttgaaggatcagaatatcatgcctggcatcaaggttgacaagggtttggttccattgcctggatccaacaatgaatcatggtgccaaggtcttgatggtttggcttcaaggtgtgctgagtactataagcagggggcgcgcttcgcaaagtggaggactgttgttagcatcccttgtggtccatctgcattagcagtcaaggaagcagcatggggacttgctcgatatgctgctattgctcaggataatggtttagtgccaattgtggagccagagattcttcttgatggagaccatgggatcgagggagctcttgaggtggcagagaaagtgtggtctgaggtgtttttctacttagccgagaacaatgttctgtttgagggtatcctgctgaagcctagcatggtcacccctggagctgagcacaaggagaaggcttctccagaagccattgcaaagtacacgctaacaatgctcagaaggagagtacctcccgctgttcctggaatcatgttcctttctggtggacagtccgaggtggaggcaactctgaacctgaatgcaatgaaccagtctctgaacccatggcatgtgtcgttctcctatgcccgggctctgcagaactcggtgctgaagacatggcaagggcgccctgagaacgtggaggcagcgcagaaggccctgctggtgcgcgcaaaggccaactcgctggcccagctcggtcgctacactggtgagggcgagagcgatgatgccaagaaaggcatgttccagaagggctacacctactaatgtgccagcgagatgtttccatgacataataataattgtagcgttttggtgttattattattattattttggtacgctctggtgaataataaccaaattgttggtgccaacgacatctagcagcaaattggtctttagaactcatgtagaaccttgagaacgaacatgtaatctggtgaattctattcctatatttgaggcgatggatgctaagttgccatatgcgacaagcacaacaggtgatttatgttcttttatgt

SEQ ID NO: 206503 - DNA, 4898 bp, Zea Mays
aagccgtccgtttcgtcaccaagcgacccggatccttcctcgccggcaactcaagaccaccaagcggctccaccgccaccgaaatcccccccgatccacaacccatgcagcgcaaacataagctcctcgcacatcgatcgcactgctgccggaagcagatcggagcagcctcacggcgacgggtgctgctcgcctcgctactcccatcagattcccgacggctgctgctcgcctcgctgctaccccaccagatcccggcgcctccccctcgccctctcaattccgatccgtcgcttcgcgatcgacccatccgctctcacacgacgggcgcgcggcgtggatcagcagccgccgggtctgctcaggcgtcgcgaatggccgcgctcacggcctcacgggggcaaccagcggcacgaatcgtggggctcgccggcggtatcgtcgtcggtggggacgggtggcggcctcccggatccagactgcccctggtagtccgcgtgaattacggcatctgccatctcgacctgatgggcctcgattggcggctggcgttcccgtgaatcctgcggtgggccaagggtagaagcggtaactcgctgggccagcacctgaagataaatcttgtgaaatgatgccaaatgcggtcactaactctactaaagatgtcttggaggctgatgacacaactttcaataatgaatttctgatcaagttagatcagctcggtgatgatcctgttatttcccttggaaacatgcttgttgaacttatccagcacgaggattcttgttctggggattcaaatggcccgaccagtacatataagctgctcctactgaaggaaagcatttccaaggagattgaaaagactgaactcgagattgattcattggaaggcgaacttaaatctgtgaatactgaggctgcaactactcttgaaggttctcccacaggggtgacacatacagaaaatctttcaccctctagtgggacatccaaggttcctggaagtgtggagatctgtgatacatctgatatgataaaagaaccaggggagctcattggttctcctaaggtacctgtggtgcagtatgatgatgtcaaaagtgctgatatgatggaaattgaaacagctccagttcataatgcaaaaacagttccttcagaagctggtgctatatctcctgtagtcgctgagggtaaggcctgtgcagctgctgatcttagctcattgaaagcttctgaagaagctgggtctcaaaatgatattgacaatggcaggctggaaacttcttcacgccaagctaatgctgattccatgaaaatagaaattagtgatgacctaccagtgaagaaatggacataccatgatcataagtctgatttgctcagttctgtcacatctgcaaatagtgctatagccaaagaaattaatgaagtgctatttaaatcattgcctgctgatacacctcgccttgatttgtttgcatcaagtcatcttctgagccaaaggaagagcgatttgattgtcaaagaaaggcttggagtatgtaaaaccaggctgaggttgaaagagcagatgcttacaatgaagttcaaggcatattgtcacttgtggaaagatgtccaactattttctgcaaataaacagcgttcaaagtctaataagcgcactgatcagagcaaccgaacatcacaaattggatctcagaggcaacgctcctctaaccgctcgcgattaaccatgcctgctggtaatttaagtacattctcaactccagaaatgtcagatgttgcaatgaggttgttttcagagttcaaaattaagcggtgcagaaattacttgaaaatgcctgcactgattattgatgagaaagagaaggagtggttgaagcttatgaacaagaatggtctagttgaggatcctgttttagttgagaaggaacgggtgatgataaatccgtggactcaagaagaaaagaaaatttttatggagttgcttgctaaatttggcaaggatttctccaaaatcgccagtttcattacacataaatctactgcagactgtgtggagttctactataagcatcataaatcagatagcttccgagaagtgaagaaactattggaccttcgtcaacagcaacccaccagcaattttcttggagcgaaatctggacataaatggaatcctgagtcaaatgctgcttctcttgatatgcttggggtagcatcagtagtagcagcccatggccttgaatatgcaaaacaagtggagaaaatttctgcgaaatccctcatccggactgcatatgggcccaatgtgacttccgtggctaataaatcttctgataaggagtgcattgaccatgtgcctttgcacgagagagaatctgtagcagctgatgtactagcaggcatatgtggcactctctctcctgatggaatgggctcatgcattactagttctgctgatcctggacagaagattagcatgaaaagagtggagcatgtcttgtcccaagaaaatgacaaaaccgttgaggaggaagacacactctctgatcaagagtgtgaagttgacccagttgattggaatgacgacgagaagtcaattttcattgaggctatgaataactacggaaaggattttgctcggatctcgtcatgtgtgaagagcaagtcatatgaacaatgcaaagtgttctttagtaaggctcggaaatcactcggtttggatttgatccatcaaggggcagccgatgttagtatgccagctagtgataccaatggagggaagagtgatactgatgaggcctgcgctgtggaaatggattcagctatctgtagcacacagtcatgttcaaagattgcgatggatgtttgtcctactgaaggagccattggagggcctaactctgttataatctctaagcaggcagaagcatatatatcaaatgggtgcaatgctgatgttaaaattgaggaagatgagaaggtagctgataaaaattgcagcattgttgatgctaagaggtccagtgatgctactcacgaagctggtcctattgacatcaattgcccaggaagcacagataagctgcaaggaactgatgatgtcgttgacctagtaaacatgcatagtaatagtggcatcagctcttcagctaagcatgcagtggccattcactcggaaatgagatccactttacattctgtagaggtccttcaaacagacaaaggtgaaggtactggtactgatttgtcctgggtggaagaatgttcacaccatgctctggataacacaccaatgaaaaatggaaattctggtgccccggctttcttggcttcagatagtggtatcaaggacaatgttcgcatctcaaacataactgctgcttccaccgttagtcctgcattcacttcaagttatcagcattctgtacctggagatatgcccctgccaaaaccaaagccacttgttaccccgcttaccccaaaggatttaatgcctgtgcagttcagttcagtgcttcctgaccccactgcaattcgtttcgagggcatagcctcaataactacgcccaacttcgaggacactggcaacagagtcagtggtgctctaggggctaaagagatgagcaagtacccagcttttagagacccatctgaactgcgagtggcactgtgaatacttcacaggcggatcggttgacccaaacaaaattgcagaatggcaggtccagcagcttgtgccttcaaaacaattccgatggcattcaatggcccagagaccacgaaggaggactggaaggctctttgaggccttgctctcgcaatacaagctccgagggtgatgagcaacaaaagcggcctggtgatgtcaagttgtttggacagattctcagccatcagtcaaccctgcagagttctggcttgtcttgcaatggtaacaagagcaagcctccctcaccaaagatcgacacatctgtgagatccatgaacaatccaatggaccgtgtggtttgttcttccaggcctggcaccactccacatctgggtctggaggaaagattggcaaggtgctatggtcatctggatggtagcacggcacagcccgagccactgctcgtgatggcaaagcgccagcggtccttggccggcgtacagttttactcggctaagaacggcacgcttggtgtgttaccagattaccaacaaccttcgacgcagccacagcaatcagatcccaagcgtgtggaaaggttgtctgatccgcagaagaggaacgtgctggaactcatctcgggtttccagcagcccggcagagtcgcccgtttcgggggtgctggcatcctcgtaagcggcaacgtctcggaccctgtggctgctgctctcaaggctcagtatggtcccggttctaagattatgggcagcgacgtggatccttggacggacataggaagcaggtagcgccgtagcagctctactgcttctgttgctccttgtaccatatatttagttttggtgtaacttgaatgaaatcatcagaatatgagatgtggggggtggggagtgaatggctttcctgcccatactatctgtaggcttttggccagtagcagtcgggtttcgctgtttactggcattaacatttttactctttcttctgcagctccatacccttttggtatagcttgacatgccagcagtggcacagtgccgtaggttccctagaggtgaactagatgtttgtcagcatggtttgattttgccagcctatgcagaaaacctcacttggtctttgtaatgtggtaatgccatgtatcagtatcctagtctgatggagttttggttgagacagttctcattgcccgctggttcatcttctgtttctg

SEQ ID NO: 206504 - DNA, 4820 bp, Zea Mays
gcagcgcaaacataagctcctcgcacatcgatcgcactgctgccggaagcagatcggagcagcctcacggcgacgggtgctgctcgcctcgctactcccatcagattcccgacggctgctgctcgcctcgctgctaccccaccagatcccggcgcctccccctcgccctctcaattccgatccgtcgcttcgcgatcgacccatccgctctcacacgacgggcgcgcggcgtggatcagcagccgccgggtctgctcaggcgtcgcgaatggccgcgctcacggcctcacgggggcaaccagcggcacgaatcgtggggctcgccggcggtatcgtcgtcggtggggacgggtggcggcctcccggatccagactgcccctggtagtccgcgtgaattacggcatctgccatctcgacctgatgggcctcgattggcggctggcgttcccgtgaatcctgcggtgggccaagggtagaagcggtaactcgctgggccagatgtcttggaggctgatgacacaactttcaataatgaatttctgatcaagttagatcagctcggtgatgatcctgttatttcccttggaaacatgcttgttgaacttatccagcacgaggattcttgttctggggattcaaatggcccgaccagtacatataagctgctcctactgaaggaaagcatttccaaggagattgaaaagactgaactcgagattgattcattggaaggcgaacttaaatctgtgaatactgaggctgcaactactcttgaaggttctcccacaggggtgacacatacagaaaatctttcaccctctagtgggacatccaaggttcctggaagtgtggagatctgtgatacatctgatatgataaaagaaccaggggagctcattggttctcctaaggtacctgtggtgcagtatgatgatgtcaaaagtgctgatatgatggaaattgaaacagctccagttcataatgcaaaaacagttccttcagaagctggtgctatatctcctgtagtcgctgagggtaaggcctgtgcagctgctgatcttagctcattgaaagcttctgaagaagctgggtctcaaaatgatattgacaatggcaggctggaaacttcttcacgccaagctaatgctgattccatgaaaatagaaattagtgatgacctaccagtgaagaaatggacataccatgatcataagtctgatttgctcagttctgtcacatctgcaaatagtgctatagccaaagaaattaatgaagtgctatttaaatcattgcctgctgatacacctcgccttgatttgtttgcatcaagtcatcttctgagccaaaggaagagcgatttgattgtcaaagaaaggcttggagtatgtaaaaccaggctgaggttgaaagagcagatgcttacaatgaagttcaaggcatattgtcacttgtggaaagatgtccaactattttctgcaaataaacagcgttcaaagtctaataagcgcactgatcagagcaaccgaacatcacaaattggatctcagaggcaacgctcctctaaccgctcgcgattaaccatgcctgctggtaatttaagtacattctcaactccagaaatgtcagatgttgcaatgaggttgttttcagagttcaaaattaagcggtgcagaaattacttgaaaatgcctgcactgattattgatgagaaagagaaggagtggttgaagcttatgaacaagaatggtctagttgaggatcctgttttagttgagaaggaacgggtgatgataaatccgtggactcaagaagaaaagaaaatttttatggagttgcttgctaaatttggcaaggatttctccaaaatcgccagtttcattacacataaatctactgcagactgtgtggagttctactataagcatcataaatcagatagcttccgagaagtgaagaaactattggaccttcgtcaacagcaacccaccagcaattttcttggagcgaaatctggacataaatggaatcctgagtcaaatgctgcttctcttgatatgcttggggtagcatcagtagtagcagcccatggccttgaatatgcaaaacaagtggagaaaatttctgcgaaatccctcatccggactgcatatgggcccaatgtgacttccgtggctaataaatcttctgataaggagtgcattgaccatgtgcctttgcacgagagagaatctgtagcagctgatgtactagcaggcatatgtggcactctctctcctgatggaatgggctcatgcattactagttctgctgatcctggacagaagattagcatgaaaagagtggagcatgtcttgtcccaagaaaatgacaaaaccgttgaggaggaagacacactctctgatcaagagtgtgaagttgacccagttgattggaatgacgacgagaagtcaattttcattgaggctatgaataactacggaaaggattttgctcggatctcgtcatgtgtgaagagcaagtcatatgaacaatgcaaagtgttctttagtaaggctcggaaatcactcggtttggatttgatccatcaaggggcagccgatgttagtatgccagctagtgataccaatggagggaagagtgatactgatgaggcctgcgctgtggaaatggattcagctatctgtagcacacagtcatgttcaaagattgcgatggatgtttgtcctactgaaggagccattggagggcctaactctgttataatctctaagcaggcagaagcatatatatcaaatgggtgcaatgctgatgttaaaattgaggaagatgagaaggtagctgataaaaattgcagcattgttgatgctaagaggtccagtgatgctactcacgaagctggtcctattgacatcaattgcccaggaagcacagataagctgcaaggaactgatgatgtcgttgacctagtaaacatgcatagtaatagtggcatcagctcttcagctaagcatgcagtggccattcactcggaaatgagatccactttacattctgtagaggtccttcaaacagacaaaggtgaaggtactggtactgatttgtcctgggtggaagaatgttcacaccatgctctggataacacaccaatgaaaaatggaaattctggtgccccggctttcttggcttcagatagtggtatcaaggacaatgttcgcatctcaaacataactgctgcttccaccgttagtcctgcattcacttcaagttatcagcattctgtacctggagatatgcccctgccaaaaccaaagccacttgttaccccgcttaccccaaaggatttaatgcctgtgcagttcagttcagtgcttcctgaccccactgcaattcgtttcgagggcatagcctcaataactacgcccaacttcgaggacactggcaacagagtcagtggtgctctaggggctaaagagatgagcaagtacccagcttttagagacccatctggtaatcagcaaagcaccttgttttgtaatattgatggttatatgaatcatcgtctgacaactgaattaccatttttttctgaaagaactgcgagtggcactgtgaatacttcacaggcggatcggttgacccaaacaaaattgcagaatggcaggtccagcagcttgtgccttcaaaacaattccgatggcattcaatggcccagagaccacgaaggaggactggaaggctctttgaggccttgctctcgcaatacaagctccgagggtgatgagcaacaaaagcggcctggtgatgtcaagttgtttggacagattctcagccatcagtcaaccctgcagagttctggcttgtcttgcaatggtaacaagagcaagcctccctcaccaaagatcgacacatctgtgagatccatgaacaatccaatggaccgtgtggtttgttcttccaggcctggcaccactccacatctgggtctggaggaaagattggcaaggtgctatggtcatctggatggtagcacggcacagcccgagccactgctcgtgatggcaaagcgccagcggtccttggccggcgtacagttttactcggctaagaacggcacgcttggtgtgttaccagattaccaacaaccttcgacgcagccacagcaatcagatcccaagcgtgtggaaaggttgtctgatccgcagaagaggaacgtgctggaactcatctcgggtttccagcagcccggcagagtcgcccgtttcgggggtgctggcatcctcgtaagcggcaacgtctcggaccctgtggctgctgctctcaaggctcagtatggtcccggttctaagattatgggcagcgacgtggatccttggacggacataggaagcaggtagcgccgtagcagctctactgcttctgttgctccttgtaccatatatttagttttggtgtaacttgaatgaaatcatcagaatatgagatgtggggggtggggagtgaatggctttcctgcccatactatctgtaggcttttggccagtagcagtcgggtttcgctgtttactggcattaacatttttactctttcttctgcagctccatacccttttggtatagcttgacatgccagcagtggcacagtgccgtaggttccctagaggtgaactagatgtttgtcagcatggtttgattttgccagcctatgcagaaaacctcacttggtctttgtaatgtggtaatgccatgtatcagtatcctagtctgatggagttttggttgagacagttctcattgcccgctggttcatcttctgtttctg

SEQ ID NO: 206505 - DNA, 5249 bp, Zea Mays
ccaccacctctgcgggaccatgcgcggccctcgccgcgccgggcgccgacgtcggcctcctcagaaggctactaccgacagggcggcggcgcgtacgaccgctcctaccctgacgacccgccgcctgtctacacgccgtcgcgctcggaccgatactggccggaggacgacggcgggcaatacaagggtttcggtcggtatggcggcggtggccgcagggacggccgtgacatgaggggttcgtaccggaggtccccatacaggggtggctacggaagcgacttctcccgaaaccatccagagcagccccctcccccaccacccagaaggtctccgttgaggtcagtcgctgttccgatctgctatgactcaccgggcaatagagttgacaggggggatagggacaacctcccacgggtgacaccatggcggagaagggaaagcagatctgagccagcagacgctgttggacttctctctgttggccaaaccacccggctctctgcctcagggaaggaggcttcagctcagcctctgtccgtgtctggtcctcatgggaccgaggacgaggcaccaaggaagaaggcacgccttggatgggggcaaggtttggccaagtatgagaagcagaaggtccaagggcctgtggatcctgctgaagctgttgctgatggaagtccagctgatggcgaactgaagaccacctctcctgtgcctgtgcctgtgcaccctgtgcctgtgcctgtgccttatgttgcacctgcacctcctgctgcaccagtgcttgcgcctgcgccagcaccttctgctgctcctgcacttttgtctgcccctatgcaatgctcatctccagttaccgggccaccatattgttcctcagataaatcttgtgaaatgatgccaaatgcggtcactaactctactaaagatgtcttggaggctgatgacacaactttcaataatgaatttctgatcaagttagatcagctcggtgatgatcctgttatttcccttggaaacatgcttgttgaacttatccagcacgaggattcttgttctggggattcaaatggcccgaccagtacatataagctgctcctactgaaggaaagcatttccaaggagattgaaaagactgaactcgagattgattcattggaaggcgaacttaaatctgtgaatactgaggctgcaactactcttgaaggttctcccacaggggtgacacatacagaaaatctttcaccctctagtgggacatccaaggttcctggaagtgtggagatctgtgatacatctgatatgataaaagaaccaggggagctcattggttctcctaaggtacctgtggtgcagtatgatgatgtcaaaagtgctgatatgatggaaattgaaacagctccagttcataatgcaaaaacagttccttcagaagctggtgctatatctcctgtagtcgctgagggtaaggcctgtgcagctgctgatcttagctcattgaaagcttctgaagaagctgggtctcaaaatgatattgacaatggcaggctggaaacttcttcacgccaagctaatgctgattccatgaaaatagaaattagtgatgacctaccagtgaagaaatggacataccatgatcataagtctgatttgctcagttctgtcacatctgcaaatagtgctatagccaaagaaattaatgaagtgctatttaaatcattgcctgctgatacacctcgccttgatttgtttgcatcaagtcatcttctgagccaaaggaagagcgatttgattgtcaaagaaaggcttggagtatgtaaaaccaggctgaggttgaaagagcagatgcttacaatgaagttcaaggcatattgtcacttgtggaaagatgtccaactattttctgcaaataaacagcgttcaaagtctaataagcgcactgatcagagcaaccgaacatcacaaattggatctcagaggcaacgctcctctaaccgctcgcgattaaccatgcctgctggtaatttaagtacattctcaactccagaaatgtcagatgttgcaatgaggttgttttcagagttcaaaattaagcggtgcagaaattacttgaaaatgcctgcactgattattgatgagaaagagaaggagtggttgaagcttatgaacaagaatggtctagttgaggatcctgttttagttgagaaggaacgggtgatgataaatccgtggactcaagaagaaaagaaaatttttatggagttgcttgctaaatttggcaaggatttctccaaaatcgccagtttcattacacataaatctactgcagactgtgtggagttctactataagcatcataaatcagatagcttccgagaagtgaagaaactattggaccttcgtcaacagcaacccaccagcaattttcttggagcgaaatctggacataaatggaatcctgagtcaaatgctgcttctcttgatatgcttggggtagcatcagtagtagcagcccatggccttgaatatgcaaaacaagtggagaaaatttctgcgaaatccctcatccggactgcatatgggcccaatgtgacttccgtggctaataaatcttctgataaggagtgcattgaccatgtgcctttgcacgagagagaatctgtagcagctgatgtactagcaggcatatgtggcactctctctcctgatggaatgggctcatgcattactagttctgctgatcctggacagaagattagcatgaaaagagtggagcatgtcttgtcccaagaaaatgacaaaaccgttgaggaggaagacacactctctgatcaagagtgtgaagttgacccagttgattggaatgacgacgagaagtcaattttcattgaggctatgaataactacggaaaggattttgctcggatctcgtcatgtgtgaagagcaagtcatatgaacaatgcaaagtgttctttagtaaggctcggaaatcactcggtttggatttgatccatcaaggggcagccgatgttagtatgccagctagtgataccaatggagggaagagtgatactgatgaggcctgcgctgtggaaatggattcagctatctgtagcacacagtcatgttcaaagattgcgatggatgtttgtcctactgaaggagccattggagggcctaactctgttataatctctaagcaggcagaagcatatatatcaaatgggtgcaatgctgatgttaaaattgaggaagatgagaaggtagctgataaaaattgcagcattgttgatgctaagaggtccagtgatgctactcacgaagctggtcctattgacatcaattgcccaggaagcacagataagctgcaaggaactgatgatgtcgttgacctagtaaacatgcatagtaatagtggcatcagctcttcagctaagcatgcagtggccattcactcggaaatgagatccactttacattctgtagaggtccttcaaacagacaaaggtgaaggtactggtactgatttgtcctgggtggaagaatgttcacaccatgctctggataacacaccaatgaaaaatggaaattctggtgccccggctttcttggcttcagatagtggtatcaaggacaatgttcgcatctcaaacataactgctgcttccaccgttagtcctgcattcacttcaagttatcagcattctgtacctggagatatgcccctgccaaaaccaaagccacttgttaccccgcttaccccaaaggatttaatgcctgtgcagttcagttcagtgcttcctgaccccactgcaattcgtttcgagggcatagcctcaataactacgcccaacttcgaggacactggcaacagagtcagtggtgctctaggggctaaagagatgagcaagtacccagcttttagagacccatctggtaatcagcaaagcaccttgttttgtaatattgatggttatatgaatcatcgtctgacaactgaattaccatttttttctgaaagaactgcgagtggcactgtgaatacttcacaggcggatcggttgacccaaacaaaattgcagaatggcaggtccagcagcttgtgccttcaaaacaattccgatggcattcaatggcccagagaccacgaaggaggactggaaggctctttgaggccttgctctcgcaatacaagctccgagggtgatgagcaacaaaagcggcctggtgatgtcaagttgtttggacagattctcagccatcagtcaaccctgcagagttctggcttgtcttgcaatggtaacaagagcaagcctccctcaccaaagatcgacacatctgtgagatccatgaacaatccaatggaccgtgtggtttgttcttccaggcctggcaccactccacatctgggtctggaggaaagattggcaaggtgctatggtcatctggatggtagcacggcacagcccgagccactgctcgtgatggcaaagcgccagcggtccttggccggcgtacagttttactcggctaagaacggcacgcttggtgtgttaccagattaccaacaaccttcgacgcagccacagcaatcagatcccaagcgtgtggaaaggttgtctgatccgcagaagaggaacgtgctggaactcatctcgggtttccagcagcccggcagagtcgcccgtttcgggggtgctggcatcctcgtaagcggcaacgtctcggaccctgtggctgctgctctcaaggctcagtatggtcccggttctaagattatgggcagcgacgtggatccttggacggacataggaagcaggtagcgccgtagcagctctactgcttctgttgctccttgtaccatatatttagttttggtgtaacttgaatgaaatcatcagaatatgagatgtggggggtggggagtgaatggctttcctgcccatactatctgtaggcttttggccagtagcagtcgggtttcgctgtttactggcattaacatttttactctttcttctgcagctccatacccttttggtatagcttgacatgccagcagtggcacagtgccgtaggttccctagaggtgaactagatgtttgtcagcatggtttgattttgccagcctatgcagaaaacctcacttggtctttgtaatgtggtaatgccatgtatcagtatcctagtctgatggagttttggttgagacagttctcattgcccgctggttcatcttctgtttctg

SEQ ID NO: 206506 - DNA, 5158 bp, Zea Mays
cgggaccatgcgcggccctcgccgcgccgggcgccgacgtcggcctcctcaggctactaccgacagggcggcggcgcgtacgaccgctcctaccctgacgacccgccgcctgtctacacgccgtcgcgctcggaccgatactggccggaggacgacggcgggcaatacaagggtttcggtcggtatggcggcggtggccgcagggacggccgtgacatgaggggttcgtaccggaggtccccatacaggggtggctacggaagcgacttctcccgaaaccatccagagcagccccctcccccaccacccagaaggtctccgttgaggtcagtcgctgttccgatctgctatgactcaccgggcaatagagttgacaggggggatagggacaacctcccacgggtgacaccatggcggagaagggaaagcagatctgagccagcagacgctgttggacttctctctgttggccaaaccacccggctctctgcctcagggaaggaggcttcagctcagcctctgtccgtgtctggtcctcatgggaccgaggacgaggcaccaaggaagaaggcacgccttggatgggggcaaggtttggccaagtatgagaagcagaaggtccaagggcctgtggatcctgctgaagctgttgctgatggaagtccagctgatggcgaactgaagaccacctctcctgtgcctgtgcctgtgcaccctgtgcctgtgcctgtgccttatgttgcacctgcacctcctgctgcaccagtgcttgcgcctgcgccagcaccttctgctgctcctgcacttttgtctgcccctatgcaatgctcatctccagttaccgggccaccatattgttcctcagcacctgaagataaatcttgtgaaatgatgccaaatgcggtcactaactctactaaagatgtcttggaggctgatgacacaactttcaataatgaatttctgatcaagttagatcagctcggtgatgatcctgttatttcccttggaaacatgcttgttgaacttatccagcacgaggattcttgttctggggattcaaatggcccgaccagtacatataagctgctcctactgaaggaaagcatttccaaggagattgaaaagactgaactcgagattgattcattggaaggcgaacttaaatctgtgaatactgaggctgcaactactcttgaaggttctcccacaggggtgacacatacagaaaatctttcaccctctagtgggacatccaaggttcctggaagtgtggagatctgtgatacatctgatatgataaaagaaccaggggagctcattggttctcctaaggtacctgtggtgcagtatgatgatgtcaaaagtgctgatatgatggaaattgaaacagctccagttcataatgcaaaaacagttccttcagaagctggtgctatatctcctgtagtcgctgagggtaaggcctgtgcagctgctgatcttagctcattgaaagcttctgaagaagctgggtctcaaaatgatattgacaatggcaggctggaaacttcttcacgccaagctaatgctgattccatgaaaatagaaattagtgatgacctaccagtgaagaaatggacataccatgatcataagtctgatttgctcagttctgtcacatctgcaaatagtgctatagccaaagaaattaatgaagtgctatttaaatcattgcctgctgatacacctcgccttgatttgtttgcatcaagtcatcttctgagccaaaggaagagcgatttgattgtcaaagaaaggcttggagtatgtaaaaccaggctgaggttgaaagagcagatgcttacaatgaagttcaaggcatattgtcacttgtggaaagatgtccaactattttctgcaaataaacagcgttcaaagtctaataagcgcactgatcagagcaaccgaacatcacaaattggatctcagaggcaacgctcctctaaccgctcgcgattaaccatgcctgctggtaatttaagtacattctcaactccagaaatgtcagatgttgcaatgaggttgttttcagagttcaaaattaagcggtgcagaaattacttgaaaatgcctgcactgattattgatgagaaagagaaggagtggttgaagcttatgaacaagaatggtctagttgaggatcctgttttagttgagaaggaacgggtgatgataaatccgtggactcaagaagaaaagaaaatttttatggagttgcttgctaaatttggcaaggatttctccaaaatcgccagtttcattacacataaatctactgcagactgtgtggagttctactataagcatcataaatcagatagcttccgagaagtgaagaaactattggaccttcgtcaacagcaacccaccagcaattttcttggagcgaaatctggacataaatggaatcctgagtcaaatgctgcttctcttgatatgcttggggtagcatcagtagtagcagcccatggccttgaatatgcaaaacaagtggagaaaatttctgcgaaatccctcatccggactgcatatgggcccaatgtgacttccgtggctaataaatcttctgataaggagtgcattgaccatgtgcctttgcacgagagagaatctgtagcagctgatgtactagcaggcatatgtggcactctctctcctgatggaatgggctcatgcattactagttctgctgatcctggacagaagattagcatgaaaagagtggagcatgtcttgtcccaagaaaatgacaaaaccgttgaggaggaagacacactctctgatcaagagtgtgaagttgacccagttgattggaatgacgacgagaagtcaattttcattgaggctatgaataactacggaaaggattttgctcggatctcgtcatgtgtgaagagcaagtcatatgaacaatgcaaagtgttctttagtaaggctcggaaatcactcggtttggatttgatccatcaaggggcagccgatgttagtatgccagctagtgataccaatggagggaagagtgatactgatgaggcctgcgctgtggaaatggattcagctatctgtagcacacagtcatgttcaaagattgcgatggatgtttgtcctactgaaggagccattggagggcctaactctgttataatctctaagcaggcagaagcatatatatcaaatgggtgcaatgctgatgttaaaattgaggaagatgagaaggtagctgataaaaattgcagcattgttgatgctaagaggtccagtgatgctactcacgaagctggtcctattgacatcaattgcccaggaagcacagataagctgcaaggaactgatgatgtcgttgacctagtaaacatgcatagtaatagtggcatcagctcttcagctaagcatgcagtggccattcactcggaaatgagatccactttacattctgtagaggtccttcaaacagacaaaggtgaaggtactggtactgatttgtcctgggtggaagaatgttcacaccatgctctggataacacaccaatgaaaaatggaaattctggtgccccggctttcttggcttcagatagtggtatcaaggacaatgttcgcatctcaaacataactgctgcttccaccgttagtcctgcattcacttcaagttatcagcattctgtacctggagatatgcccctgccaaaaccaaagccacttgttaccccgcttaccccaaaggatttaatgcctgtgcagttcagttcagtgcttcctgaccccactgcaattcgtttcgagggcatagcctcaataactacgcccaacttcgaggacactggcaacagagtcagtggtgctctaggggctaaagagatgagcaagtacccagcttttagagacccatctgaactgcgagtggcactgtgaatacttcacaggcggatcggttgacccaaacaaaattgcagaatggcaggtccagcagcttgtgccttcaaaacaattccgatggcattcaatggcccagagaccacgaaggaggactggaaggctctttgaggccttgctctcgcaatacaagctccgagggtgatgagcaacaaaagcggcctggtgatgtcaagttgtttggacagattctcagccatcagtcaaccctgcagagttctggcttgtcttgcaatggtaacaagagcaagcctccctcaccaaagatcgacacatctgtgagatccatgaacaatccaatggaccgtgtggtttgttcttccaggcctggcaccactccacatctgggtctggaggaaagattggcaaggtgctatggtcatctggatggtagcacggcacagcccgagccactgctcgtgatggcaaagcgccagcggtccttggccggcgtacagttttactcggctaagaacggcacgcttggtgtgttaccagattaccaacaaccttcgacgcagccacagcaatcagatcccaagcgtgtggaaaggttgtctgatccgcagaagaggaacgtgctggaactcatctcgggtttccagcagcccggcagagtcgcccgtttcgggggtgctggcatcctcgtaagcggcaacgtctcggaccctgtggctgctgctctcaaggctcagtatggtcccggttctaagattatgggcagcgacgtggatccttggacggacataggaagcaggtagcgccgtagcagctctactgcttctgttgctccttgtaccatatatttagttttggtgtaacttgaatgaaatcatcagaatatgagatgtggggggtggggagtgaatggctttcctgcccatactatctgtaggcttttggccagtagcagtcgggtttcgctgtttactggcattaacatttttactctttcttctgcagctccatacccttttggtatagcttgacatgccagcagtggcacagtgccgtaggttccctagaggtgaactagatgtttgtcagcatggtttgattttgccagcctatgcagaaaacctcacttggtctttgtaatgtggtaatgccatgtatcagtatcctagtctgatggagttttggttgagacagttctcattgcccgctggttcatcttctgtttctg

SEQ ID NO: 206507 - DNA, 4952 bp, Zea Mays
gaccatgcgcggccctcgccgcgccgggcgccgacgtcggcctcctcagaaggctactaccgacagggcggcggcgcgtacgaccgctcctaccctgacgacccgccgcctgtctacacgccgtcgcgctcggaccgatactggccggaggacgacggcgggcaatacaagggtttcggtcggtatggcggcggtggccgcagggacggccgtgacatgaggggttcgtaccggaggtccccatacaggggtggctacggaagcgacttctcccgaaaccatccagagcagccccctcccccaccacccagaaggtctccgttgaggtcagtcgctgttccgatctgctatgactcaccgggcaatagagttgacaggggggatagggacaacctcccacgggtgacaccatggcggagaagggaaagcagatctgagccagcagacgctgttggacttctctctgttggccaaaccacccggctctctgcctcagggaaggaggcttcagctcagcctctgtccgtgtctggtcctcatgggaccgaggacgaggcaccaaggaagaaggcacgccttggatgggggcaaggtttggccaagtatgagaagcagaaggtccaagggcctgtggatcctgctgaagctgttgctgatggaagtccagctgatggcgaactgaagaccacctctcctgtgcctgtgcctgtgcaccctgtgcctgtgcctgtgccttatgttgcacctgcacctcctgctgcaccagtgcttgcgcctgcgccagcaccttctgctgctcctgcacttttgtctgcccctatgcaatgctcatctccagttaccgggccaccatattgttcctcagcacctgaagataaatcttgtgaaatgatgccaaatgcggtcactaactctactaaagatgtcttggaggctgatgacacaactttcaataatgaatttctgatcaagttagatcagctcggtgatgatcctgttatttcccttggaaacatgcttgttgaacttatccagcacgaggattcttgttctggggattcaaatggcccgaccagtacatataagctgctcctactgaaggaaagcatttccaaggagattgaaaagactgaactcgagattgattcattggaaggcgaacttaaatctgtgaatactgaggctgcaactactcttgaaggttctcccacaggggtgacacatacagaaaatctttcaccctctagtgggacatccaaggttcctggaagtgtggagatctgtgatacatctgatatgataaaagaaccaggggagctcattggttctcctaaggtacctgtggtgcagtatgatgatgtcaaaagtgctgatatgatggaaattgaaacagctccagttcataatgcaaaaacagttccttcagaagctggtgctatatctcctgtagtcgctgagggtaaggcctgtgcagctgctgatcttagctcattgaaagcttctgaagaagctgggtctcaaaatgatattgacaatggcaggctggaaacttcttcacgccaagctaatgctgattccatgaaaatagaaattagtgatgacctaccagtgaagaaatggacataccatgatcataagtctgatttgctcagttctgtcacatctgcaaatagtgctatagccaaagaaattaatgaagtgctatttaaatcattgcctgctgatacacctcgccttgatttgtttgcatcaagtcatcttctgagccaaaggaagagcgatttgattgtcaaagaaaggcttggagtatgtaaaaccaggctgaggttgaaagagcagatgcttacaatgaagttcaaggcatattgtcacttgtggaaagatgtccaactattttctgcaaataaacagcgttcaaagtctaataagcgcactgatcagagcaaccgaacatcacaaattggatctcagaggcaacgctcctctaaccgctcgcgattaaccatgcctgctggtaatttaagtacattctcaactccagaaatgtcagatgttgcaatgaggttgttttcagagttcaaaattaagcggtgcagaaattacttgaaaatgcctgcactgattattgatgagaaagagaaggagtggttgaagcttatgaacaagaatggtctagttgaggatcctgttttagttgagaaggaacgggtgatgataaatccgtggactcaagaagaaaagaaaatttttatggagttgcttgctaaatttggcaaggatttctccaaaatcgccagtttcattacacataaatctactgcagactgtgtggagttctactataagcatcataaatcagatagcttccgagaagtgaagaaactattggaccttcgtcaacagcaacccaccagcaattttcttggagcgaaatctggacataaatggaatcctgagtcaaatgctgcttctcttgatatgcttggggtagcatcagtagtagcagcccatggccttgaatatgcaaaacaagtggagaaaatttctgcgaaatccctcatccggactgcatatgggcccaatgtgacttccgtggctaataaatcttctgataaggagtgcattgaccatgtgcctttgcacgagagagaatctgtagcagctgatgtactagcaggcatatgtggcactctctctcctgatggaatgggctcatgcattactagttctgctgatcctggacagaagattagcatgaaaagagtggagcatgtcttgtcccaagaaaatgacaaaaccgttgaggaggaagacacactctctgatcaagagtgtgaagttgacccagttgattggaatgacgacgagaagtcaattttcattgaggctatgaataactacggaaaggattttgctcggatctcgtcatgtgtgaagagcaagtcatatgaacaatgcaaagtgttctttagtaaggctcggaaatcactcggtttggatttgatccatcaaggggcagccgatgttagtatgccagctagtgataccaatggagggaagagtgatactgatgaggcctgcgctgtggaaatggattcagctatctgtagcacacagtcatgttcaaagattgcgatggatgtttgtcctactgaaggagccattggagggcctaactctgttataatctctaagcaggcagaagcatatatatcaaatgggtgcaatgctgatgttaaaattgaggaagatgagaaggtagctgataaaaattgcagcattgttgatgctaagaggtccagtgatgctactcacgaagctggtcctattgacatcaattgcccaggaagcacagataagctgcaaggaactgatgatgtcgttgacctagtaaacatgcatagtaatagtggcatcagctcttcagctaagcatgcagtggccattcactcggaaatgagatccactttacattctgtagaggtccttcaaacagacaaaggtgaaggtactggtactgatttgtcctgggtggaagaatgttcacaccatgctctggataacacaccaatgaaaaatggaaattctggtgccccggctttcttggcttcagatagtggtatcaaggacaatgttcgcatctcaaacataactgctgcttccaccgttagtcctgcattcacttcaagttatcagcattctgtacctggagatatgcccctgccaaaaccaaagccacttgttaccccgcttaccccaaaggatttaatgcctgtgcagttcagttcagtgcttcctgaccccactgcaattcgtttcgagggcatagcctcaataactacgcccaacttcgaggacactggcaacagagtcagtggtgctctaggggctaaagagatgagcaagtacccagcttttagagacccatctgaactgcgagtggcactgtgaatacttcacaggcggatcggttgacccaaacaaaattgcagaatggcaggtccagcagcttgtgccttcaaaacaattccgatggcattcaatggcccagagaccacgaaggaggactggaaggctctttgaggccttgctctcgcaatacaagctccgagggtgatgagcaacaaaagcggcctggtgatgtcaagttgtttggacagattctcagccatcagtcaaccctgcagagttctggcttgtcttgcaatggtaacaagagcaagcctccctcaccaaagatcgacacatctgtgagatccatgaacaatccaatggaccgtgtggtttgttcttccaggcctggcaccactccacatctgggtctggaggaaagattggcaaggtgctatggtcatctggatggtagcacggcacagcccgagccactgctcgtgatggcaaagcgccagcggtccttggccggcgtacagttttactcggctaagaacggcacgcttggtgtgttaccagattaccaacaaccttcgacgcagccacagcaatcagatcccaagcgtgtggaaaggttgtctgatccgcagaagaggaacgtgctggaactcatctcgggtttccagcagcccggcagagtcgcccgtttcgggggtgctggcatcctcgtaagcggcaacgtctcggaccctgtggctgctgctctcaaggctcagtatggtcccggttctaagattatgggcagcgacgtggatccttggacggacataggaagcagctccatacccttttggtatagcttgacatgccagcagtggcacagtgccgtaggttccctagaggtgaactagatgtttgtcagcatggtttgattttgccagcctatgcagaaaacctcacttggtctttgtaatgtggtaatgccatgtatcagtatcctagtctgatggagttttggttgagacagttctcattgcccgctggttcatcttctgtttctg

SEQ ID NO: 206508 - DNA, 2384 bp, Zea Mays
aaggcatcgtcccgagacccgattccccgtcccagagacgagagacggcacaacccttgctgccgtcctggtcgccacacggccacaccaacccaacacctcttcttcctccgctctcagcttaccccaccacaggcgagggaggcgactccttcctcgcggctgcccgctccggccccgatcgcatctcctttgcacgccacggcccgcggcccgcgcgcagtgtccatcggcacggccgtcctccgtgtgtgggggcgcatctggtgctagcttgccgggctagggtttggcttggcctcgtctaccgccccgtctcgtctgataggcacagagcattagagcaattatcttggagttgcagatctgtacctgaagattcatattgaaatctggaagcttctgctgttgagtacagagaaatatttcttgccttttgaggaagactgcagagcccctaaatgtgaaacttgtttcttttcttgtctactcctgaatgctgacgaactcagcctctcacgttacttagctgaaggtcgtactggtacagacaccgaggatggagcaagcaacaggtgtaagtggtcctgaacacataattgatattccaagggaaattggtcctcctgcttcggtttctcgtagtgctggtagagagaaccatgaagaatcgaatcctgtggacaggccttcaacaagagctctagtacctgccttgcaggcaccatcagcaataggtgctgtacctattacagggcatacttcaggcactaggagaaatgacaactatgttcgtcggcacagaagcccattgaattctggactgtggatttcaattgaagttattgttaactttagccagattgttgctgccattgttgttctttgtgtgtcaagaaaggaacacccacaagctccattacttgagtgggtcataggttacactgttggttgttttgcaacgttaccccatctctattggcgctatatacaccgtaatattgtaaatggtgagcatgagtcatcacatacacctcaagggtccgctcataacaactcaaatgaagcgactcatgctgcaagtgcatcagaacgccgcagaaatgctgcccgaaatgctgtgcttgctaatcctaggatcaatgcgctgtttgaccacttcaagatggccctggattgtttctttgccgtctggtttgttgttggaaacgtgtggatatttggtggccgttcttctgctgctgatgcaccgaacttgtacaggttgtgcattgtgttcctcacttttagttgcattgggtatgccatgccattcatcctatgtgcaatgatatgctgttgccttccctgcattatatctattatgggttttagagaagatacaaacaatacaaggggtgcttcctcagaatctatcaatgctttgcctacatataaattcaaaatcaagaaacgtcgccatggttcaggcagtgaaactgaaggtcaggaaggagggatattggctgcaggaactgacaaggagcgatcactctctgctgaagacgcagtttgctgcatctgtcttgcaaaatatgcgcacaatgatgagctccgtgaacttccatgtgcacactgtttccacaaggactgtgttgataaatggctcaagataaatgcactttgccctctgtgcaaatctgagatagtgagctcgtctggtacttctgatgcccgccaatcagaccagaacaccgttcctgtgcaggagatcgaaatgcattaggttggtctgttcccgcagcttatcacataaggatacatctgatttgtggctctcaatcttcatgtataaagttggagattgatgtatggattgtagagacgcgtaggtttttttttgtatttaacactgctatcttggagaagttacagctattctcgctgtcacccaactatggcaagccaatactacccaggttttcccccatagcgtgggttgcaccttatgttctgctctttatgacattgcatgacttctttcgagtttctagagcgaaataggcagaagatgttggagatagtctaatcaagtggttgtagtgaaacattttcgtgcatgcaacttttgaaatactccctccattctaaactatactataggacggttggttttttctatatatatattgtttttgctatgcacttagatatatattacatctagatatatcatatatagttataatgtatttagatgaaattgtcttatagtttgggacttggaatggagggtgtattttcatgctacaaattgaagttaccgatatcagtttatgaaaaccttcggctaagagcctgttctgcacttctgcttgatatgaggccgagaagctgagagcttt

SEQ ID NO: 206509 - DNA, 2117 bp, Zea Mays
aagcttcacgcttcagttagtgtggttcaattctcgactgccaatatggcagtcatttagattggggagcattagagcaattatcttggagttgcagatctgtacctgaagattcatattgaaatctggaagcttctgctgttgagtacagagaaatatttcttgccttttgaggaagactgcagagcccctaaatgtgaaacttgtttcttttcttgtctactcctgaatgctgacgaactcagcctctcacgttacttagctgaaggtcgtactggtacagacaccgaggatggagcaagcaacaggtgtaagtggtcctgaacacataattgatattccaagggaaattggtcctcctgcttcggtttctcgtagtgctggtagagagaaccatgaagaatcgaatcctgtggacaggccttcaacaagagctctagtacctgccttgcaggcaccatcagcaataggtgctgtacctattacagggcatacttcaggcactaggagaaatgacaactatgttcgtcggcacagaagcccattgaattctggactgtggatttcaattgaagttattgttaactttagccagattgttgctgccattgttgttctttgtgtgtcaagaaaggaacacccacaagctccattacttgagtgggtcataggttacactgttggttgttttgcaacgttaccccatctctattggcgctatatacaccgtaatattgtaaatggtgagcatgagtcatcacatacacctcaagggtccgctcataacaactcaaatgaagcgactcatgctgcaagtgcatcagaacgccgcagaaatgctgcccgaaatgctgtgcttgctaatcctaggatcaatgcgctgtttgaccacttcaagatggccctggattgtttctttgccgtctggtttgttgttggaaacgtgtggatatttggtggccgttcttctgctgctgatgcaccgaacttgtacaggttgtgcattgtgttcctcacttttagttgcattgggtatgccatgccattcatcctatgtgcaatgatatgctgttgccttccctgcattatatctattatgggttttagagaagatacaaacaatacaaggggtgcttcctcagaatctatcaatgctttgcctacatataaattcaaaatcaagaaacgtcgccatggttcaggcagtgaaactgaaggtcaggaaggagggatattggctgcaggaactgacaaggagcgatcactctctgctgaagacgcagtttgctgcatctgtcttgcaaaatatgcgcacaatgatgagctccgtgaacttccatgtgcacactgtttccacaaggactgtgttgataaatggctcaagataaatgcactttgccctctgtgcaaatctgagatagtgagctcgtctggtacttctgatgcccgccaatcagaccagaacaccgttcctgtgcaggagatcgaaatgcattaggttggtctgttcccgcagcttatcacataaggatacatctgatttgtggctctcaatcttcatgtataaagttggagattgatgtatggattgtagagacgcgtaggtttttttttgtatttaacactgctatcttggagaagttacagctattctcgctgtcacccaactatggcaagccaatactacccaggttttcccccatagcgtgggttgcaccttatgttctgctctttatgacattgcatgacttctttcgagtttctagagcgaaataggcagaagatgttggagatagtctaatcaagtggttgtagtgaaacattttcgtgcatgcaacttttgaaatactccctccattctaaactatactataggacggttggttttttctatatatatattgtttttgctatgcacttagatatatattacatctagatatatcatatatagttataatgtatttagatgaaattgtcttatagtttgggacttggaatggagggtgtattttcatgctacaaattgaagttaccgatatcagtttatgaaaaccttcggctaagagcctgttctgcacttctgcttgatatgaggccgagaagctgagagcttt

SEQ ID NO: 206510 - DNA, 2128 bp, Zea Mays
cttggatggaatgagaagggttatcttatgctgactagccacaataaattagaagacattgttcatgaattgatggggagcattagagcaattatcttggagttgcagatctgtacctgaagattcatattgaaatctggaagcttctgctgttgagtacagagaaatatttcttgccttttgaggaagactgcagagcccctaaatgtgaaacttgtttcttttcttgtctactcctgaatgctgacgaactcagcctctcacgttacttagctgaaggtcgtactggtacagacaccgaggatggagcaagcaacaggtgtaagtggtcctgaacacataattgatattccaagggaaattggtcctcctgcttcggtttctcgtagtgctggtagagagaaccatgaagaatcgaatcctgtggacaggccttcaacaagagctctagtacctgccttgcaggcaccatcagcaataggtgctgtacctattacagggcatacttcaggcactaggagaaatgacaactatgttcgtcggcacagaagcccattgaattctggactgtggatttcaattgaagttattgttaactttagccagattgttgctgccattgttgttctttgtgtgtcaagaaaggaacacccacaagctccattacttgagtgggtcataggttacactgttggttgttttgcaacgttaccccatctctattggcgctatatacaccgtaatattgtaaatggtgagcatgagtcatcacatacacctcaagggtccgctcataacaactcaaatgaagcgactcatgctgcaagtgcatcagaacgccgcagaaatgctgcccgaaatgctgtgcttgctaatcctaggatcaatgcgctgtttgaccacttcaagatggccctggattgtttctttgccgtctggtttgttgttggaaacgtgtggatatttggtggccgttcttctgctgctgatgcaccgaacttgtacaggttgtgcattgtgttcctcacttttagttgcattgggtatgccatgccattcatcctatgtgcaatgatatgctgttgccttccctgcattatatctattatgggttttagagaagatacaaacaatacaaggggtgcttcctcagaatctatcaatgctttgcctacatataaattcaaaatcaagaaacgtcgccatggttcaggcagtgaaactgaaggtcaggaaggagggatattggctgcaggaactgacaaggagcgatcactctctgctgaagacgcagtttgctgcatctgtcttgcaaaatatgcgcacaatgatgagctccgtgaacttccatgtgcacactgtttccacaaggactgtgttgataaatggctcaagataaatgcactttgccctctgtgcaaatctgagatagtgagctcgtctggtacttctgatgcccgccaatcagaccagaacaccgttcctgtgcaggagatcgaaatgcattaggttggtctgttcccgcagcttatcacataaggatacatctgatttgtggctctcaatcttcatgtataaagttggagattgatgtatggattgtagagacgcgtaggtttttttttgtatttaacactgctatcttggagaagttacagctattctcgctgtcacccaactatggcaagccaatactacccaggttttcccccatagcgtgggttgcaccttatgttctgctctttatgacattgcatgacttctttcgagtttctagagcgaaataggcagaagatgttggagatagtctaatcaagtggttgtagtgaaacattttcgtgcatgcaacttttgaaatactccctccattctaaactatactataggacggttggttttttctatatatatattgtttttgctatgcacttagatatatattacatctagatatatcatatatagttataatgtatttagatgaaattgtcttatagtttgggacttggaatggagggtgtattttcatgctacaaattgaagttaccgatatcagtttatgaaaaccttcggctaagagcctgttctgcacttctgcttgatatgaggccgagaagctgagagcttt

SEQ ID NO: 206511 - DNA, 2124 bp, Zea Mays
cgtcagaccccttcgatctactagggcggctgaatcagtttggctgagcaggaagataacacaaaaatggacaaagcattagagcaattatcttggagttgcagatctgtacctgaagattcatattgaaatctggaagcttctgctgttgagtacagagaaatatttcttgccttttgaggaagactgcagagcccctaaatgtgaaacttgtttcttttcttgtctactcctgaatgctgacgaactcagcctctcacgttacttagctgaaggtcgtactggtacagacaccgaggatggagcaagcaacaggtgtaagtggtcctgaacacataattgatattccaagggaaattggtcctcctgcttcggtttctcgtagtgctggtagagagaaccatgaagaatcgaatcctgtggacaggccttcaacaagagctctagtacctgccttgcaggcaccatcagcaataggtgctgtacctattacagggcatacttcaggcactaggagaaatgacaactatgttcgtcggcacagaagcccattgaattctggactgtggatttcaattgaagttattgttaactttagccagattgttgctgccattgttgttctttgtgtgtcaagaaaggaacacccacaagctccattacttgagtgggtcataggttacactgttggttgttttgcaacgttaccccatctctattggcgctatatacaccgtaatattgtaaatggtgagcatgagtcatcacatacacctcaagggtccgctcataacaactcaaatgaagcgactcatgctgcaagtgcatcagaacgccgcagaaatgctgcccgaaatgctgtgcttgctaatcctaggatcaatgcgctgtttgaccacttcaagatggccctggattgtttctttgccgtctggtttgttgttggaaacgtgtggatatttggtggccgttcttctgctgctgatgcaccgaacttgtacaggttgtgcattgtgttcctcacttttagttgcattgggtatgccatgccattcatcctatgtgcaatgatatgctgttgccttccctgcattatatctattatgggttttagagaagatacaaacaatacaaggggtgcttcctcagaatctatcaatgctttgcctacatataaattcaaaatcaagaaacgtcgccatggttcaggcagtgaaactgaaggtcaggaaggagggatattggctgcaggaactgacaaggagcgatcactctctgctgaagacgcagtttgctgcatctgtcttgcaaaatatgcgcacaatgatgagctccgtgaacttccatgtgcacactgtttccacaaggactgtgttgataaatggctcaagataaatgcactttgccctctgtgcaaatctgagatagtgagctcgtctggtacttctgatgcccgccaatcagaccagaacaccgttcctgtgcaggagatcgaaatgcattaggttggtctgttcccgcagcttatcacataaggatacatctgatttgtggctctcaatcttcatgtataaagttggagattgatgtatggattgtagagacgcgtaggtttttttttgtatttaacactgctatcttggagaagttacagctattctcgctgtcacccaactatggcaagccaatactacccaggttttcccccatagcgtgggttgcaccttatgttctgctctttatgacattgcatgacttctttcgagtttctagagcgaaataggcagaagatgttggagatagtctaatcaagtggttgtagtgaaacattttcgtgcatgcaacttttgaaatactccctccattctaaactatactataggacggttggttttttctatatatatattgtttttgctatgcacttagatatatattacatctagatatatcatatatagttataatgtatttagatgaaattgtcttatagtttgggacttggaatggagggtgtattttcatgctacaaattgaagttaccgatatcagtttatgaaaaccttcggctaagagcctgttctgcacttctgcttgatatgaggccgagaagctgagagcttt

SEQ ID NO: 206512 - DNA, 1965 bp, Zea Mays
gttcattcttatgacttatgctgagttttaaatgcagagaatctcacatacatggctttcataagcgtctgctttaatcgtttgacgtaatatcatgtggttttagatctaccattatagcatgttctttgttcataggaaggattgttgcatatttccttctcacctgttccatggccctgtatagtttgtgaaatatctggagcaccattgaacaaatatgtgttttttgttttttgtagtatacaccggcgatagatatatggagtattggctgtatatttgcagaattgttaactggaaaacctcttttcccggggaaaaatgtggtacatcaacttgatataattacagatctccttggaacaccttctcccgaagcaatatcaaggattcgtaatgaaaaggccaggcgctacttgagcagtatgaggcgaaaaaagcctataccgtttacgcaaaagttcccaaatgcagatccacttgcactatgtttgttagagcgaatgctcgcttttgagccaaaagacaggccaagtgctgaagaggctcttgctgatccttatttcaagaatatagccagtgtggatagagagccttctgcacaggctgtcacaaagcttgaatttgaattcgagaggcggagagttacaaaggaagacataagggagcttatatatagggaaattcttgagtatcatccaaagatgctgagggagtttcttgagggaactgagtcaagtggtttcatgtacccaagtagatcattttaaaaagcagtttgcataccttgaagaacattatgccaagggatctacaggaactccacctgagaggcaacataattcattgccgcggccgtctgttgtctattccgacaaccgatcacaaaccacagccaacatcaccgaggatctttccaagtgtatgctcagagaaaatacacagaagacacatccatattctgcttctgttgcaagtaaatttccaccacatgttcctcaaggtgatgttgcaaggcctggtaaagcagttggttcggtgatgcagtacagcccatgtccagcgcctgctgccgagcgatatgagcaacgaagaatcgctaggcacccagcagttgccccaaacaatatcccttctggaagctcataccccagaagaagccagacctgcaagagtgagacaggtgatgccgaaagccatatggatgcgaaccaagctcggcagccaaagccatatgcagcgaacaaactacctgctaccgttgatagtcgtggtggtcactggtaggatttctgcggtgcaccagaaagccattccaaaccgtttcttaacatgttatcagtatcgattacttctgctgagtgctacattattctgacaaatccagaaatgtagttctgtacagatttgtgttctttttccggatacctgaataccgaaagactgtacaactgtagtttctgattcctactccttgtcgctattcaatcgctaaaggatctgtccctggtggagaagaaccggcagattcaatgcaatgttcttgactgacgtcatggattttgttcttcaacctggtagctctgaagacgaattgaatagctgctagtttctgctaatcatctacagtcaggtgcagagtgttctgggagctagttctgaatatcactgtcacgctgtaatctgcacgtttctgagctcctaacttctaagcatgccactaccgtatccctttgtaatttaatcagctgtaccatccagtactctgtttacatttgtagaaacgctctgcaaagaagctattatgtgggagtttctttgctattattataaatgttctgttgttataaatgttaagtttttgtttattataaacgttatgtcgttataagtagtttctttgcaaagtgttattaacggccggaaatgatatcatctataccaaaacaaatgcgattgtct

SEQ ID NO: 206513 - DNA, 1933 bp, Zea Mays
cattcttatgacttatgctgagttttaaatgcagagaatctcacatacatggctttcataagcgtctgctttaatcgtttgacgtaatatcatgtggttttagatctaccattatagcatgttctttgttcataggaaggattgttgcatatttccttctcacctgttccatggccctgtatagtttgtgaaatatctggagcaccattgaacaaatatgtgttttttgttttttgtagtatacaccggcgatagatatatggagtattggctgtatatttgcagaattgttaactggaaaacctcttttcccggggaaaaatgtggtacatcaacttgatataattacagatctccttggaacaccttctcccgaagcaatatcaaggattcgtaatgaaaaggccaggcgctacttgagcagtatgaggcgaaaaaagcctataccgtttacgcaaaagttcccaaatgcagatccacttgcactatgtttgttagagcgaatgctcgcttttgagccaaaagacaggccaagtgctgaagaggctcttgctgatccttatttcaagaatatagccagtgtggatagagagccttctgcacaggctgtcacaaagcttgaatttgaattcgagaggcggagagttacaaaggaagacataagggagcttatatatagggaaattcttgagtatcatccaaagatgctgagggagtttcttgagggaactgagtcaagtggtttcatgtacccaagtgcagtagatcattttaaaaagcagtttgcataccttgaagaacattatgccaagggatctacaggaactccacctgagaggcaacataattcattgccgcggccgtctgttgtctattccgacaaccgatcacaaaccacagccaacatcaccgaggatctttccaagtgtatgctcagagaaaatacacagaagacacatccatattctgcttctgttgcaagtaaatttccaccacatgttcctcaaggtgatgttgcaaggcctggtaaagcagttggttcggtgatgcagtacagcccatgtccagcgcctgctgccgagcgatatgagcaacgaagaatcgctaggcacccagcagttgccccaaacaatatcccttctggaagctcataccccagaagaagccagacctgcaagagtgagacaggtgatgccgaaagccatatggatcgaacaaactacctgctaccgttgatagtcgtggtggtcactggtaggatttctgcggtgcaccagaaagccattccaaaccgtttcttaacatgttatcagtatcgattacttctgctgagtgctacattattctgacaaatccagaaatgtagttctgtacagatttgtgttctttttccggatacctgaataccgaaagactgtacaactgtagtttctgattcctactccttgtcgctattcaatcgctaaaggatctgtccctggtggagaagaaccggcagattcaatgcaatgttcttgactgacgtcatggattttgttcttcaacctggtagctctgaagacgaattgaatagctgctagtttctgctaatcatctacagtcaggtgcagagtgttctgggagctagttctgaatatcactgtcacgctgtaatctgcacgtttctgagctcctaacttctaagcatgccactaccgtatccctttgtaatttaatcagctgtaccatccagtactctgtttacatttgtagaaacgctctgcaaagaagctattatgtgggagtttctttgctattattataaatgttctgttgttataaatgttaagtttttgtttattataaacgttatgtcgttataagtagtttctttgcaaagtgttattaacggccggaaatgatatcatctataccaaaacaaatgcgattgtct

SEQ ID NO: 206514 - DNA, 985 bp, Zea Mays
ctgttcccttgtaaccattaccaccggtgatgttgcaaggcctggtaaagcagttggttcggtgatgcagtacagcccatgtccagcgcctgctgccgagcgatatgagcaacgaagaatcgctaggcacccagcagttgccccaaacaatatcccttctggaagctcataccccagaagaagccagacctgcaagagtgagacaggtgatgccgaaagccatatggatgcgaaccaagctcggcagccaaagccatatgcagcgaacaaactacctgctaccgttgatagtcgtggtggtcactggtaggatttctgcggtgcaccagaaagccattccaaaccgtttcttaacatgttatcagtatcgattacttctgctgagtgctacattattctgacaaatccagaaatgtagttctgtacagatttgtgttctttttccggatacctgaataccgaaagactgtacaactgtagtttctgattcctactccttgtcgctattcaatcgctaaaggatctgtccctggtggagaagaaccggcagattcaatgcaatgttcttgactgacgtcatggattttgttcttcaacctggtagctctgaagacgaattgaatagctgctagtttctgctaatcatctacagtcaggtgcagagtgttctgggagctagttctgaatatcactgtcacgctgtaatctgcacgtttctgagctcctaacttctaagcatgccactaccgtatccctttgtaatttaatcagctgtaccatccagtactctgtttacatttgtagaaacgctctgcaaagaagctattatgtgggagtttctttgctattattataaatgttctgttgttataaatgttaagtttttgtttattataaacgttatgtcgttataagtagtttctttgcaaagtgttattaacggccggaaatgatatcatctataccaaaacaaatgcgattgtct

SEQ ID NO: 206515 - DNA, 1120 bp, Zea Mays
ctttgatgtatgttgtacattgcacaccttacttctatagatgtttaatattctccctgcctgcctccagtagtcaatgacaactagcttaacaattaaccttacttatctgtactttacaagttttctttgtcctgagctatgatgcagcgctaagcatagcaggtcccaaaccctagtaaaggaagaggttgtgatagctttcaaaccaacgctataccttgtcatcttaatggagacgaaacctgaaagaaatccgttggagcgcaactctcctaacgacgcgccatattggaacctggatatggtcttaaataagaaaggcatggcagcagcttttggttctggggctctattctccatcgtgagtggaatggggaccccaaatccagtagctaatgcaattacaactggtgttggttttgctgtatttcaaggtggttttttcatgatctctcaaaaattttcacagccacagagtggagatacatactattctcgtggaagaagcatgctgcaaaagttaggccttcagaactatgagaagaacttcaagaagggtctcctaactgatcaaaccttgccccttcttacggacagtgctctcagagatgtgaagatcccgcctggccccaggctcctcatacttgatcacattaaaagagatccagagttgacaaaagcaaattaagtgatcggcactgcggcactgcctcacggtgccagttcttttccccctcgagttgcagaaattggaccaggagaaccgtttaatttagctattcagtgacgacctctttggagcagtatttggttgtgcttactagtatatgttttctagtcatcattcacgcttttttttgagccgaagtgtttgcaaatcactctgatcttggaatgacagaattttgtattctcaaaggtttatgctgatcaatccagattttactactagtttagggatgtcaaacgaagggaaactgcaattcgcacattttatttggcttctggatggtagtttggttctgatctgtaacgtttagccctttgctaagctgtgtcctgcataaggctttgcggcctgattaatataagcacacatgttggaatttcaaatgaa

SEQ ID NO: 206516 - DNA, 2176 bp, Zea Mays
taaagcattgtctaggagaaataatgggaatctctataaaccaattttgtttttatgttcggaaggtcaaccatataagctattttcttaataagacaagtgattatatggaacaaaagaaggacctacacatggtttttattgatttggagaaggcttacgacaaaataccacaataccaaggaatgttatgtgatgggctttggacaaacataaagttttaacaaagtatattaaactcattaaggatatgcataccaatgttgtgactagcgtttgaacaagttatggagacatggatgacttcttgactagaataggactatatctagggtctgttttgagcccttagatgatgaatgaggtcacaaaggatatacaaggagatatcttttggtgaatggtttttatggatgatgtaatgctagttgatgaaaattggacagaactaaataggatagagttatggcgggggagactctagagtccaaaggttttagactcaatagaacttaaatcgaaatatatgagatgttactttggcactactacacaaaggaagaagatgttaatttgaaaggtcaagtagtgcccccaaaaaggatacatttttggtatttaggataattgctacagaaagacgaggatattaatgaagatgttagctataggattaaagaagggtggatgaagtggcgtcaaacatctagcgtttttatgtgacaagagcgtgctacaaaagttaaagacaagttttataggacgacaattagacctacaacgttgtatggtgtagaatattggtctacaaaaagacgacatgttcaatagataattgttgcgaaatacgtatgttgcgttggatttgtggccatacaagaagggatcgagtctaggacaatgacatacatgataggctaggaggtgcaccaattgaagaaaagcttgtccaacactggttgagatggcttagacatatccaacgaagaccgttcaagacaccaatgcgtagtggaatcctaagacgtaacagaaatgtgaagagaagcaggagaagaccgaagttgacatgggaagagacagtaaaggaagacttaaaaggatgaaatatatccaaagatttagccttcaataggagttcaaggaaaataactattcatgtgctttaaccttgacttatggtttgtgttgggtttcagctatggtctaccccaacttgtttgggattggaaggctttgttgttgttgttgttgttgtgagctataatgcagcaatccattcagcttaatctttttccaagaaaaataaatcagattgcacatttaattccagttgaactcgttgtgctcaaattgcactattgcagttatcttcaacagcatggcagcagcttttggttctggggctctattctccatcgtgagtggaatggggaccccaaatccagtagctaatgcaattacaactggtgttggttttgctgtatttcaaggtggttttttcatgatctctcaaaaattttcacagccacagagtggagatacatactattctcgtggaagaagcatgctgcaaaagttaggccttcagaactatgagaagaacttcaagaagggtctcctaactgatcaaaccttgccccttcttacggacagtgctctcagagatgtgaagatcccgcctggccccaggctcctcatacttgatcacattaaaagagatccagagttgacaaaagcaaattaagtgatcggcactgcggcactgcctcacggtgccagttcttttccccctcgagttgcagaaattggaccaggagaaccgtttaatttagctattcagtgacgacctctttggagcagtatttggttgtgcttactagtatatgttttctagtcatcattcacgcttttttttgagccgaagtgtttgcaaatcactctgatcttggaatgacagaattttgtattctcaaaggtttatgctgatcaatccagattttactactagtttagggatgtcaaacgaagggaaactgcaattcgcacattttatttggcttctggatggtagtttggttctgatctgtaacgtttagccctttgctaagctgtgtcctgcataaggctttgcggcctgattaatataagcacacatgttggaatttcaaatgaa

SEQ ID NO: 206517 - DNA, 1306 bp, Zea Mays
tgtagcacctgctctgctaatcaaccaacctgaaggacatggtggtcgggggcacggagacgacgtccaacaccgtggagtgggccatggcggagctgatgcagaaaccggagctgctggccaaggtgcggcaggagctggacgcggtggtgggcagggacgccgtggtggaggagtcgcacctgccgcagcttccctacctgcacgcggtggtcaaggagacgctgcggctgcacccggcgctgccgctgatggtgccgcactgccccagcgccgacgccacggtgggcggctaccgcgtcccggcggggtgccgcgtgttcgtcaacgtgtgggcgatcatgagggaccccgccgtgtggaaggacccgcgggacttcgtcccggagcggttcctggacggcgccggcgaagggcgcaagtgggacttcacgggcagcgagatggagtacctcccgttcgggtccgggcgcaggatctgcgctggcgtcgccatggcccaacggatgacggcctactcgctggccatgctgctgcaggcgttcgactgggagctgcctgccggcgcgcggctggagctggacgagaagttcgcgatcgtcatgaagaaggccacgccgctggtggccgtgccgacgccgcggctgtccaagcctgagctctactactccgcctagtccaccaccacatccatccactgggctgggccattcggcagaggaggaaatgtaacatatttggcccacctgccctccctcgtgaatacgttacatactgaacagtgttgttttaatcgaaagctccatagattgttacctcctacataggacaaatctgccacgcatcaacaaccgctgaattgtggatgtccacgtgcgctagataatctgatcttatctatggttatctcattatctgatagcaacgtgtgtgtcattggtggatgcattgtctcacggctgcgagtgactttgaggaacaagttgcaggctgataccaaggacacctgagagatttgcatctgatggctcaatgtttgtagtccttgggcacacctttcgcattttattccataaggttgtttcacctataatataaggctggatccagcacacgtccataccgaccggtgatgtgatggcatggcccggttcagtttggccttaacgtcgatcggtttggttggttgatcggtgtggttgccgatagatcggctcgagcagtaccgaccatattggaacatgactggttgatattgacccttacgctagagaaccgatagttagttcatgtcattttgaatttc

SEQ ID NO: 206518 - DNA, 3424 bp, Zea Mays
cacgcttgagtcttgacgctcacggacacggagtcacggaccgtggctctccgccggccaccaccagccgccgccccatgtagcaaattagcaacccgccgagcaagagcaaccgccggcggcccggcgccgaccctgccgtccaggactccaggcccgtcctcctgccgcggtgctgcctgcgtccctgcccccgccaccgcccaccgccagcagtaggcatcaagccgagcgaggagcgagtagtggcgctgcgtggctgcgtccctggctcggtggctccctgcccagtgcccagtgcccctgcgtcagcgtcgccgtcactgcactccgagttgcagctccagcaagtgaccattgctctagagatccacatgtgggtttcagtgcattttcgtatcttttagaactgaactgtgaaaaacacaatggcaacaatcatatctggagcaaggagccttcactcactcgctctgcgatcgcggatgttgggcgaaatgactcagctcggtccttttaaccgcaacgtgcagcggaggtggagaaagcctgtagattcggcaagaacacgtctcgagggaagaactatggatcataggctggacaagctaatggttcagctgaggaacttgaggctggccttggctttgcatgaggtgatatctcagcagaggaacggatatgcgtctctccagctcctctcaaggtggaggcatgaggtcgggctgaacattgaggtcggtgctttcctcaagaaatacccccacgtgtttcagacctacgtgcaccctgtcaagaggaaccactgctgcaagatcacgcagaagatgtccgacttgatcgcagaggaagacgctgtggtcagggagaatgaggtcggcgtagttcagcggctgaagaaacttctcatgctctctgtggatggaactctgaacatgcacgcgttatggctcataagaagggaacttgggcttccggatgattacaggtcctctatactgccgaaccatcgacatgatttaattctcgaatccccagctactctatcacttttctctatggatgaaacattggctgtagctaaggtcgacgagtggaggaaaagggagtacacagaaaaatggctagctgaatcagagacaaaatatgctttcccgatcaacttcccaactggatttaaggttcagaaaggtttcagggagaaactcaagaactggcagaggcttccctacaccaaaccttatgagaagaatgattcgcattcgatccgcaacgtggagcggcttgagaaacgcattgttggtgttcttcatgagcttttgagcctgacgatcgaaagaatgatgccacttgagagactgtcacacttcagaagattgtacaccatggaggtaaacctgctagaattttttctcaagtatccaggcattttctacatctcgacgaaaggaagcacacagacagttatcctaagggagagttacagtaaaggatatctgattgagcctaaccctgtgtacattgtgcggaggaagatgctggacttggtattatctggatctcgtaacgttggtgaatgccaacaggatagtgcaacttggtcagctgaggagcatggtctgggaagcagtcatgggtgccaggataacatatgccaggtggattctgcaattccatactggaacatggagttagaagtgacgcatggaaagaaccaattaactcaaccgtgatcttgctgtaatctctacatataaaaatacctactgatatcgtctgcctagggtgaagcgatgcctagctgcggcattggtaatctgtcaagcagtgaccaaaacaagcagcaatccccgccgtcgtgaaacgccgccgggtgccatgtcgatttaggctatccagcttgctgccttgctcacctgctttcctgagtatctgtgttcatcaattgcgaattatccttccttcgattccgacctcctcgggtggctcctgccgtcctgcgtgcattcccattttcaaaccagcatgttcagcactgcttggcgtgggggtttgccgctagtgggggtccaagaggcgccattcctgttccaaattcttaggcggcggtgacgacgctgactgttggttgaggctgttggagcagtccttgaagagaaagtgcctctgatatattctctgctcaaaggattagccttgcagttgccagacgatgtacctggtgcactgcattttgtttgctggcttaaattttttacatgacaccaaatgcaggcagcacatcgtcccgaagctgacattccaggaccagctctgcgagctgtccccgtacgtgccaaggagcaccttagaagctcacatcccatacaccatcctgcgctcgatataccaccagctgtacggaggctctctgctggcctcggaaccggcggagcagtccccaaggcagtcgcctctcatctctctggcacacgcgtccccgtccgcaaggcagatgcagaaccgaccagagacaacacccaggtcccacaccttcgacccaggctactacagctcgtcggggtcccagcacgacgatggctacgacgcggataggagggccggacggctgctgcgcggagcatgaggcgctctggaccgctcgacttcggtgcgagcagaaaggcgaagaagttcgtcgagggctccagctccgggagcagcgatggagctggctcgttgcagaggttcgcagtgtcgagatctggccctctatcgtacaaatagggccgcatgtaatgtaaactctagagcagtagatcttcctatgcgtgctggtttacgtagctagcagcagcagctagttgtgctgtaagtaaaacccattaattgttttgttttgtttgctgctctatcgtacaaatagggcatcatgtaatgtaaactctagagctagtttttattttggttagttggtatatttagtttgagagagggatattcacacttttaggttttgtttggatactctagtattcaccataattcacatgtgtgtgaggtggattgggggtgcacactatagtatccaaataagaccttagggtgcgtttggttggagagtcaattggaatggagtgactccattccagtttttgagaatggagtcatttcattctgtgtttggcaattacaacggaaacattctattttttgtttggttgaagactagaatagaatggagccgctccgttcattgtttggttagatagccatacaagtgtggagaagagaagaggaaggtgagcgctcacatccggtcgttttggtagagcgagaacattccaaatatttgtcatatatagactccaaatccgttccagaaaccaaacatctagaaaacagaaatagagctgctccattcttcctcgctcctcaaccaaac

SEQ ID NO: 206519 - DNA, 1212 bp, Zea Mays
acaggatcaaggtcgttgtcgtctccaggtccatcaaatgcgacaaggtcgagcgcacgcaattcagctccgaagtcatctcctttcaacagaaagatgcaagtaacaccaagtcacttgcctttgatggttgatacatttcactgtatatcattgcacgacagatccatttagtacctttttctgagttaaactacttcaaacattgctgaagactacaaccagttgttgtaattgaagcgggtcaagacatagcatttgcaaagatttagttcattctcatcactctgcaatattcgggttctctactatgtgtaatctcatatcaagattaatgagtatcgtgatcgtataattttgaatcctatcaacccatatggcaaggcaaagaaaaatgacagtggacatcattctagattttacaaaatcaaaggagcaaccagacatggctgtcatgatctaagatacttcaacgtgattggatcgaacccaaacatatgactaggagaagctccaaggccactttgtcaagggtctctgcaatgcacctactggtgcatgatttactggaggttgtgcgcatgaatgtgccacacattggtatgggggttggagttgaagcaggagacatgattgttattcctatcatgtgcacactgcctcctcgctgtcatttgtcgtcactctcgtagtcctgataccggagcatggttgccaggggagagcagtccaaggcaaatttgccatgttggagcagtcacaggagccaaggggctgcagtcacaggtcctgctagccaggatggagcaatcataggacctcctagcagtccaaggaaaatttgcgaggtggagtagttgcaacttttgaaacccacgtgataacatgctcaagcgttcgtatgataaaaaagatggcacataatcaaaagaagatctcatgttctgcgtttgtgaacctgtttgtattttttgaacttgttttgtgaacctctatttgtaaacctgtaaaatctgaggttgtgaatagatttgggtaacttcatacaagtggtggaggcctggtggtaatcctggatgcatataaagcgaggcatgcaatatccatagcactcgtttgacagaaggcaacaccatcaaccttgtcctccacctttaaactagcatgagcaccatccttcttcacatttatattcatgtcccctatacgttc

SEQ ID NO: 206520 - DNA, 1325 bp, Zea Mays
gagcagttaaatttactcctattatcttctgggatagatttggagtccatgtcatgcttcccagcaggatcaaggtcgttgtcgtctccaggtccatcaaatgcgacaaggtcgagcgcacgcaattcagctccgaagtcatctcctttcaacagaaagatgcaagtaacaccaagtcacttgcctttgatggttgatacatttcactgtatatcattgcacgacagatccatttagtacctttttctgagttaaactacttcaaacattgctgaagactacaaccagcctacagttgttgtaattgaagcgggtcaagacatagcatttgcaaagatttagttcattctcatcactctgcaatattcgggttctctactatgtgtaatctcatatcaagattaatgagtatcgtgatcgtataattttgaatcctatcaacccatatggcaaggcaaagaaaaatgacagtggacatcattctagattttacaaaatcaaaggagcaaccagacatggctgtcatgatctaagatacttcaacgtgattggatcgaacccaaacatatgactaggagaagctccaaggccactttgtcaagggtctctgcaatgcacctactggtgcatgatttactggaggttgtgcgcatgaatgtgccacacattggtatgggggttggagttgaagcaggtgattttcaccaacattggtttgcgaactggagttgaagcaggagacatgattgttattcctatcatgtgcacactgcctcctcgctgtcatttgtcgtcactctcgtagtcctgataccggagcatggttgccaggggagagcagtccaaggcaaatttgccatgttggagcagtcacaggagccaaggggctgcagtcacaggtcctgctagccaggatggagcaatcataggacctcctagcagtccaaggaaaatttgcgaggtggagtagttgcaacttttgaaacccacgtgataacatgctcaagcgttcgtatgataaaaaagatggcacataatcaaaagaagatctcatgttctgcgtttgtgaacctgtttgtattttttgaacttgttttgtgaacctctatttgtaaacctgtaaaatctgaggttgtgaatagatttgggtaacttcatacaagtggtggaggcctggtggtaatcctggatgcatataaagcgaggcatgcaatatccatagcactcgtttgacagaaggcaacaccatcaaccttgtcctccacctttaaactagcatgagcaccatccttcttcacatttatattcatgtcccctatacgttc

SEQ ID NO: 206521 - DNA, 1325 bp, Zea Mays
tctgcatcggctgcgtccacttctagacttccttgcctcgcttgtcacctacaggaaggttccaaaagaactagaagtacagattggttgaacttcaaacaaatacaaagagctatgcatacaagtggtggaggcctggtggtaaattgtttatcaagatcgctagagcagttaaatttactcctattatcttctgggatagatttggcaggatcaaggtcgttgtcgtctccaggtccatcaaatgcgacaaggtcgagcgcacgcaattcagctccgaagtcatctcctttcaacagaaagatgcaagtaacaccaagtcacttgcctttgatggttgatacatttcactgtatatcattgcacgacagatccatttagtacctttttctgagttaaactacttcaaacattgctgaagactacaaccagttgttgtaattgaagcgggtcaagacatagcatttgcaaagatttagttcattctcatcactctgcaatattcgggttctctactatgtgtaatctcatatcaagattaatgagtatcgtgatcgtataattttgaatcctatcaacccatatggcaaggcaaagaaaaatgacagtggacatcattctagattttacaaaatcaaaggagcaaccagacatggctgtcatgatctaagatacttcaacgtgattggatcgaacccaaacatatgactaggagaagctccaaggccactttgtcaagggtctctgcaatgcacctactggtgcatgatttactggaggttgtgcgcatgaatgtgccacacattggtatgggggttggagttgaagcaggggagagcagtccaaggcaaatttgccatgttggagcagtcacaggagccaaggggctgcagtcacaggtcctgctagccaggatggagcaatcataggacctcctagcagtccaaggaaaatttgcgaggtggagtagttgcaacttttgaaacccacgtgataacatgctcaagcgttcgtatgataaaaaagatggcacataatcaaaagaagatctcatgttctgcgtttgtgaacctgtttgtattttttgaacttgttttgtgaacctctatttgtaaacctgtaaaatctgaggttgtgaatagatttgggtaacttcatacaagtggtggaggcctggtggtaatcctggatgcatataaagcgaggcatgcaatatccatagcactcgtttgacagaaggcaacaccatcaaccttgtcctccacctttaaactagcatgagcaccatccttcttcacatttatattcatgtcccctatacgttc

SEQ ID NO: 206522 - DNA, 1281 bp, Zea Mays
aggaggcgctccggctctgcatcggctgcgtccacttctagacttccttgcctcgcttgtcacctacaggaaggatcaaggtcgttgtcgtctccaggtccatcaaatgcgacaaggtcgagcgcacgcaattcagctccgaagtcatctcctttcaacagaaagatgcaagtaacaccaagtcacttgcctttgatggttgatacatttcactgtatatcattgcacgacagatccatttagtacctttttctgagttaaactacttcaaacattgctgaagactacaaccagttgttgtaattgaagcgggtcaagacatagcatttgcaaagatttagttcattctcatcactctgcaatattcgggttctctactatgtgtaatctcatatcaagattaatgagtatcgtgatcgtataattttgaatcctatcaacccatatggcaaggcaaagaaaaatgacagtggacatcattctagattttacaaaatcaaaggagcaaccagacatggctgtcatgatctaagatacttcaacgtgattggatcgaacccaaacatatgactaggagaagctccaaggccactttgtcaagggtctctgcaatgcacctactggtgcatgatttactggaggttgtgcgcatgaatgtgccacacattggtatgggggttggagttgaagcaggagacatgattgttattcctatcatgtgcacactgcctcctcgctgtcatttgtcgtcactctcgtagtcctgataccggagcatggttgccaggggagagcagtccaaggcaaatttgccatgttggagcagtcacaggagccaaggggctgcagtcacaggtcctgctagccaggatggagcaatcataggacctcctagcagtccaaggaaaatttgcgaggtggagtagttgcaacttttgaaacccacgtgataacatgctcaagcgttcgtatgataaaaaagatggcacataatcaaaagaagatctcatgttctgcgtttgtgaacctgtttgtattttttgaacttgttttgtgaacctctatttgtaaacctgtaaaatctgaggttgtgaatagatttgggtaacttcatacaagtggtggaggcctggtggtaatcctggatgcatataaagcgaggcatgcaatatccatagcactcgtttgacagaaggcaacaccatcaaccttgtcctccacctttaaactagcatgagcaccatccttcttcacatttatattcatgtcccctatacgttc

SEQ ID NO: 206523 - DNA, 1443 bp, Zea Mays
cgcagatctacgaggtagcatcagatggctctgtagggattggaggcaaggatggaggcgtcggcgggggtggtgaggatgaaggcgactatgatgaggcggaacccgggcgacatgatggaggcgagccggtgccggtgacgaggatcccacggccatggacgtcgtcaggacatagctgatgccggaggaggaggcgctccggctctgcatcggctgcgtccacttctagacttccttgcctcgcttgtcacctacaggaaggatcaaggtcgttgtcgtctccaggtccatcaaatgcgacaaggtcgagcgcacgcaattcagctccgaagtcatctcctttcaacagatccatttagtacctttttctgagttaaactacttcaaacattgctgaagactacaaccagttgttgtaattgaagcgggtcaagacatagcatttgcaaagatttagttcattctcatcactctgcaatattcgggttctctactatgtgtaatctcatatcaagattaatgagtatcgtgatcgtataattttgaatcctatcaacccatatggcaaggcaaagaaaaatgacagtggacatcattctagattttacaaaatcaaaggagcaaccagacatggctgtcatgatctaagatacttcaacgtgattggatcgaacccaaacatatgactaggagaagctccaaggccactttgtcaagggtctctgcaatgcacctactggtgcatgatttactggaggttgtgcgcatgaatgtgccacacattggtatgggggttggagttgaagcaggtgattttcaccaacattggtttgcgaactggagttgaagcaggagacatgattgttattcctatcatgtgcacactgcctcctcgctgtcatttgtcgtcactctcgtagtcctgataccggagcatggttgccaggggagagcagtccaaggcaaatttgccatgttggagcagtcacaggagccaaggggctgcagtcacaggtcctgctagccaggatggagcaatcataggacctcctagcagtccaaggaaaatttgcgaggtggagtagttgcaacttttgaaacccacgtgataacatgctcaagcgttcgtatgataaaaaagatggcacataatcaaaagaagatctcatgttctgcgtttgtgaacctgtttgtattttttgaacttgttttgtgaacctctatttgtaaacctgtaaaatctgaggttgtgaatagatttgggtaacttcatacaagtggtggaggcctggtggtaatcctggatgcatataaagcgaggcatgcaatatccatagcactcgtttgacagaaggcaacaccatcaaccttgtcctccacctttaaactagcatgagcaccatccttcttcacatttatattcatgtcccctatacgttc

SEQ ID NO: 206524 - DNA, 1426 bp, Zea Mays
agaatttccgggtgtgggtggacagactggtcacatcgccgatcggtacaagcaactggttggtgaggtttgataactgggagatggaaggtggcgttcggtactgctgccgcactactcttctgctgaataacaaggttccaaaagaactagaagtacagattggttgaacttcaaacaaatacaaagagctatgcatacaagtggtggaggcctggtggtaaattgtttatcaagatcgctagagcagttaaatttactcctattatcttctgggatagatttggcaggatcaaggtcgttgtcgtctccaggtccatcaaatgcgacaaggtcgagcgcacgcaattcagctccgaagtcatctcctttcaacagatccatttagtacctttttctgagttaaactacttcaaacattgctgaagactacaaccagttgttgtaattgaagcgggtcaagacatagcatttgcaaagatttagttcattctcatcactctgcaatattcgggttctctactatgtgtaatctcatatcaagattaatgagtatcgtgatcgtataattttgaatcctatcaacccatatggcaaggcaaagaaaaatgacagtggacatcattctagattttacaaaatcaaaggagcaaccagacatggctgtcatgatctaagatacttcaacgtgattggatcgaacccaaacatatgactaggagaagctccaaggccactttgtcaagggtctctgcaatgcacctactggtgcatgatttactggaggttgtgcgcatgaatgtgccacacattggtatgggggttggagttgaagcaggagacatgattgttattcctatcatgtgcacactgcctcctcgctgtcatttgtcgtcactctcgtagtcctgataccggagcatggttgccaggggagagcagtccaaggcaaatttgccatgttggagcagtcacaggagccaaggggctgcagtcacaggtcctgctagccaggatggagcaatcataggacctcctagcagtccaaggaaaatttgcgaggtggagtagttgcaacttttgaaacccacgtgataacatgctcaagcgttcgtatgataaaaaagatggcacataatcaaaagaagatctcatgttctgcgtttgtgaacctgtttgtattttttgaacttgttttgtgaacctctatttgtaaacctgtaaaatctgaggttgtgaatagatttgggtaacttcatacaagtggtggaggcctggtggtaatcctggatgcatataaagcgaggcatgcaatatccatagcactcgtttgacagaaggcaacaccatcaaccttgtcctccacctttaaactagcatgagcaccatccttcttcacatttatattcatgtcccctatacgttc

SEQ ID NO: 206525 - DNA, 1504 bp, Zea Mays
agaatttccgggtgtgggtggacagactggtcacatcgccgatcggtacaagcaactggttggtgaggtttgataactgggagatggaaggtggcgttcggtactgctgccgcactactcttctgctgaataacaaggttccaaaagaactagaagtacagattggttgaacttcaaacaaatacaaagagctatgcatacaagtggtggaggcctggtggatcaaggtcgttgtcgtctccaggtccatcaaatgcgacaaggtcgagcgcacgcaattcagctccgaagtcatctcctttcaacagaaagatgcaagtaacaccaagtcacttgcctttgatggttgatacatttcactgtatatcattgcacgacagatccatttagtacctttttctgagttaaactacttcaaacattgctgaagactacaaccagttgttgtaattgaagcgggtcaagacatagcatttgcaaagatttagttcattctcatcactctgcaatattcggttcatggcctgtcttattttttcccctacaagtcatctacgacagtttgccagtagcactaaatcttttaactgtggttctctactatgtgtaatctcatatcaagattaatgagtatcgtgatcgtataattttgaatcctatcaacccatatggcaaggcaaagaaaaatgacagtggacatcattctagattttacaaaatcaaaggagcaaccagacatggctgtcatgatctaagatacttcaacgtgattggatcgaacccaaacatatgactaggagaagctccaaggccactttgtcaagggtctctgcaatgcacctactggtgcatgatttactggaggttgtgcgcatgaatgtgccacacattggtatgggggttggagttgaagcaggagacatgattgttattcctatcatgtgcacactgcctcctcgctgtcatttgtcgtcactctcgtagtcctgataccggagcatggttgccaggggagagcagtccaaggcaaatttgccatgttggagcagtcacaggagccaaggggctgcagtcacaggtcctgctagccaggatggagcaatcataggacctcctagcagtccaaggaaaatttgcgaggtggagtagttgcaacttttgaaacccacgtgataacatgctcaagcgttcgtatgataaaaaagatggcacataatcaaaagaagatctcatgttctgcgtttgtgaacctgtttgtattttttgaacttgttttgtgaacctctatttgtaaacctgtaaaatctgaggttgtgaatagatttgggtaacttcatacaagtggtggaggcctggtggtaatcctggatgcatataaagcgaggcatgcaatatccatagcactcgtttgacagaaggcaacaccatcaaccttgtcctccacctttaaactagcatgagcaccatccttcttcacatttatattcatgtcccctatacgttc

SEQ ID NO: 206526 - DNA, 1319 bp, Zea Mays
caagaatttccgggtgtgggtggacagactggtcacatcgccgatcggtacaagcaactggttggtgaggtttgataactgggagatggaaggtggcgttcggtactgctgccgcactactcttctgctgaataacaagcaggatcaaggtcgttgtcgtctccaggtccatcaaatgcgacaaggtcgagcgcacgcaattcagctccgaagtcatctcctttcaacagaaagatgcaagtaacaccaagtcacttgcctttgatggttgatacatttcactgtatatcattgcacgacagatccatttagtacctttttctgagttaaactacttcaaacattgctgaagactacaaccagttgttgtaattgaagcgggtcaagacatagcatttgcaaagatttagttcattctcatcactctgcaatattcgggttctctactatgtgtaatctcatatcaagattaatgagtatcgtgatcgtataattttgaatcctatcaacccatatggcaaggcaaagaaaaatgacagtggacatcattctagattttacaaaatcaaaggagcaaccagacatggctgtcatgatctaagatacttcaacgtgattggatcgaacccaaacatatgactaggagaagctccaaggccactttgtcaagggtctctgcaatgcacctactggtgcatgatttactggaggttgtgcgcatgaatgtgccacacattggtatgggggttggagttgaagcaggtgattttcaccaacattggtttgcgaactggagttgaagcaggttattcatttgatgaaagtgggagagcagtccaaggcaaatttgccatgttggagcagtcacaggagccaaggggctgcagtcacaggtcctgctagccaggatggagcaatcataggacctcctagcagtccaaggaaaatttgcgaggtggagtagttgcaacttttgaaacccacgtgataacatgctcaagcgttcgtatgataaaaaagatggcacataatcaaaagaagatctcatgttctgcgtttgtgaacctgtttgtattttttgaacttgttttgtgaacctctatttgtaaacctgtaaaatctgaggttgtgaatagatttgggtaacttcatacaagtggtggaggcctggtggtaatcctggatgcatataaagcgaggcatgcaatatccatagcactcgtttgacagaaggcaacaccatcaaccttgtcctccacctttaaactagcatgagcaccatccttcttcacatttatattcatgtcccctatacgttc

SEQ ID NO: 206527 - DNA, 1459 bp, Zea Mays
caagaatttccgggtgtgggtggacagactggtcacatcgccgatcggtacaagcaactggttggtgaggtttgataactgggagatggaaggtggcgttcggtactgctgccgcactactcttctgctgaataacaaggttccaaaagaactagaagtacagattggttgaacttcaaacaaatacaaagagctatgcatacaagtggtggaggcctggtggtaaattgtttatcaagatcgctagagcagatcaaggtcgttgtcgtctccaggtccatcaaatgcgacaaggtcgagcgcacgcaattcagctccgaagtcatctcctttcaacagaaagatgcaagtaacaccaagtcacttgcctttgatggttgatacatttcactgtatatcattgcacgacagatccatttagtacctttttctgagttaaactacttcaaacattgctgaagactacaaccagttgttgtaattgaagcgggtcaagacatagcatttgcaaagatttagttcattctcatcactctgcaatattcgggttctctactatgtgtaatctcatatcaagattaatgagtatcgtgatcgtataattttgaatcctatcaacccatatggcaaggcaaagaaaaatgacagtggacatcattctagattttacaaaatcaaaggagcaaccagacatggctgtcatgatctaagatacttcaacgtgattggatcgaacccaaacatatgactaggagaagctccaaggccactttgtcaagggtctctgcaatgcacctactggtgcatgatttactggaggttgtgcgcatgaatgtgccacacattggtatgggggttggagttgaagcaggagacatgattgttattcctatcatgtgcacactgcctcctcgctgtcatttgtcgtcactctcgtagtcctgataccggagcatggttgccaggggagagcagtccaaggcaaatttgccatgttggagcagtcacaggagccaaggggctgcagtcacaggtcctgctagccaggatggagcaatcataggacctcctagcagtccaaggaaaatttgcgaggtggagtagttgcaacttttgaaacccacgtgataacatgctcaagcgttcgtatgataaaaaagatggcacataatcaaaagaagatctcatgttctgcgtttgtgaacctgtttgtattttttgaacttgttttgtgaacctctatttgtaaacctgtaaaatctgaggttgtgaatagatttgggtaacttcatacaagtggtggaggcctggtggtaatcctggatgcatataaagcgaggcatgcaatatccatagcactcgtttgacagaaggcaacaccatcaaccttgtcctccacctttaaactagcatgagcaccatccttcttcacatttatattcatgtcccctatacgttc

SEQ ID NO: 206528 - DNA, 1548 bp, Zea Mays
acaagaatttccgggtgtgggtggacagactggtcacatcgccgatcggtacaagcaactggttggtgaggtttgataactgggagatggaaggtggcgttcggtactgctgccgcactactcttctgctgaataacaaggttccaaaagaactagaagtacagattggttgaacttcaaacaaatacaaagagctatgcatacaagtggtggaggcctggtggtaaattgtttatcaagatcgctagagcagttaaatttactcctattatcttctgggatagatttgggatcaaggtcgttgtcgtctccaggtccatcaaatgcgacaaggtcgagcgcacgcaattcagctccgaagtcatctcctttcaacagaaagatgcaagtaacaccaagtcacttgcctttgatggttgatacatttcactgtatatcattgcacgacagatccatttagtacctttttctgagttaaactacttcaaacattgctgaagactacaaccagcctacagttgttgtaattgaagcgggtcaagacatagcatttgcaaagatttagttcattctcatcactctgcaatattcgggttctctactatgtgtaatctcatatcaagattaatgagtatcgtgatcgtataattttgaatcctatcaacccatatggcaaggcaaagaaaaatgacagtggacatcattctagattttacaaaatcaaaggagcaaccagacatggctgtcatgatctaagatacttcaacgtgattggatcgaacccaaacatatgactaggagaagctccaaggccactttgtcaagggtctctgcaatgcacctactggtgcatgatttactggaggttgtgcgcatgaatgtgccacacattggtatgggggttggagttgaagcaggtgattttcaccaacattggtttgcgaactggagttgaagcaggagacatgattgttattcctatcatgtgcacactgcctcctcgctgtcatttgtcgtcactctcgtagtcctgataccggagcatggttgccaggggagagcagtccaaggcaaatttgccatgttggagcagtcacaggagccaaggggctgcagtcacaggtcctgctagccaggatggagcaatcataggacctcctagcagtccaaggaaaatttgcgaggtggagtagttgcaacttttgaaacccacgtgataacatgctcaagcgttcgtatgataaaaaagatggcacataatcaaaagaagatctcatgttctgcgtttgtgaacctgtttgtattttttgaacttgttttgtgaacctctatttgtaaacctgtaaaatctgaggttgtgaatagatttgggtaacttcatacaagtggtggaggcctggtggtaatcctggatgcatataaagcgaggcatgcaatatccatagcactcgtttgacagaaggcaacaccatcaaccttgtcctccacctttaaactagcatgagcaccatccttcttcacatttatattcatgtcccctatacgttc

SEQ ID NO: 206529 - DNA, 1624 bp, Zea Mays
ggcaacaagaatttccgggtgtgggtggacagactggtcacatcgccgatcggtacaagcaactggttggtgaggtttgataactgggagatggaaggtggcgttcggtactgctgccgcactactcttctgctgaataacaaggttccaaaagaactagaagtacagattggttgaacttcaaacaaatacaaagagctatgcatacaagtggtggaggcctggtggtaaattgtttatcaagatcgctagagcagttaaatttactcctattatcttctgggatagatttggcaggatcaaggtcgttgtcgtctccaggtccatcaaatgcgacaaggtcgagcgcacgcaattcagctccgaagtcatctcctttcaacagaaagatgcaagtaacaccaagtcacttgcctttgatggttgatacatttcactgtatatcattgcacgacagatccatttagtacctttttctgagttaaactacttcaaacattgctgaagactacaaccagttgttgtaattgaagcgggtcaagacatagcatttgcaaagatttagttcattctcatcactctgcaatattcggttcatggcctgtcttattttttcccctacaagtcatctacgacagtttgccagtagcactaaatcttttaactgtggttctctactatgtgtaatctcatatcaagattaatgagtatcgtgatcgtataattttgaatcctatcaacccatatggcaaggcaaagaaaaatgacagtggacatcattctagattttacaaaatcaaaggagcaaccagacatggctgtcatgatctaagatacttcaacgtgattggatcgaacccaaacatatgactaggagaagctccaaggccactttgtcaagggtctctgcaatgcacctactggtgcatgatttactggaggttgtgcgcatgaatgtgccacacattggtatgggggttggagttgaagcaggtgattttcaccaacattggtttgcgaactggagttgaagcaggagacatgattgttattcctatcatgtgcacactgcctcctcgctgtcatttgtcgtcactctcgtagtcctgataccggagcatggttgccaggggagagcagtccaaggcaaatttgccatgttggagcagtcacaggagccaaggggctgcagtcacaggtcctgctagccaggatggagcaatcataggacctcctagcagtccaaggaaaatttgcgaggtggagtagttgcaacttttgaaacccacgtgataacatgctcaagcgttcgtatgataaaaaagatggcacataatcaaaagaagatctcatgttctgcgtttgtgaacctgtttgtattttttgaacttgttttgtgaacctctatttgtaaacctgtaaaatctgaggttgtgaatagatttgggtaacttcatacaagtggtggaggcctggtggtaatcctggatgcatataaagcgaggcatgcaatatccatagcactcgtttgacagaaggcaacaccatcaaccttgtcctccacctttaaactagcatgagcaccatccttcttcacatttatattcatgtcccctatacgttc

SEQ ID NO: 206530 - DNA, 1451 bp, Zea Mays
gggcaacaagaatttccgggtgtgggtggacagactggtcacatcgccgatcggtacaagcaactggttggtgaggtttgataactgggagatggaaggtggcgttcggtactgctgccgcactactcttctgctgaataacaagagctatgcatacaagtggtggaggcctggtggtaaattgtttatcaagatcgctagagcagttaaatttactcctattatcttctgggatagatttgggatcaaggtcgttgtcgtctccaggtccatcaaatgcgacaaggtcgagcgcacgcaattcagctccgaagtcatctcctttcaacagaaagatgcaagtaacaccaagtcacttgcctttgatggttgatacatttcactgtatatcattgcacgacagatccatttagtacctttttctgagttaaactacttcaaacattgctgaagactacaaccagttgttgtaattgaagcgggtcaagacatagcatttgcaaagatttagttcattctcatcactctgcaatattcgggttctctactatgtgtaatctcatatcaagattaatgagtatcgtgatcgtataattttgaatcctatcaacccatatggcaaggcaaagaaaaatgacagtggacatcattctagattttacaaaatcaaaggagcaaccagacatggctgtcatgatctaagatacttcaacgtgattggatcgaacccaaacatatgactaggagaagctccaaggccactttgtcaagggtctctgcaatgcacctactggtgcatgatttactggaggttgtgcgcatgaatgtgccacacattggtatgggggttggagttgaagcaggagacatgattgttattcctatcatgtgcacactgcctcctcgctgtcatttgtcgtcactctcgtagtcctgataccggagcatggttgccaggggagagcagtccaaggcaaatttgccatgttggagcagtcacaggagccaaggggctgcagtcacaggtcctgctagccaggatggagcaatcataggacctcctagcagtccaaggaaaatttgcgaggtggagtagttgcaacttttgaaacccacgtgataacatgctcaagcgttcgtatgataaaaaagatggcacataatcaaaagaagatctcatgttctgcgtttgtgaacctgtttgtattttttgaacttgttttgtgaacctctatttgtaaacctgtaaaatctgaggttgtgaatagatttgggtaacttcatacaagtggtggaggcctggtggtaatcctggatgcatataaagcgaggcatgcaatatccatagcactcgtttgacagaaggcaacaccatcaaccttgtcctccacctttaaactagcatgagcaccatccttcttcacatttatattcatgtcccctatacgttc

SEQ ID NO: 206531 - DNA, 1356 bp, Zea Mays
gggcaacaagaatttccgggtgtgggtggacagactggtcacatcgccgatcggtacaagcaactggttggtgaggtttgataactgggagatggaaggtggcgttcggtactgctgccgcactactcttctgctgaataacaagcaggatcaaggtcgttgtcgtctccaggtccatcaaatgcgacaaggtcgagcgcacgcaattcagctccgaagtcatctcctttcaacagaaagatgcaagtaacaccaagtcacttgcctttgatggttgatacatttcactgtatatcattgcacgacagatccatttagtacctttttctgagttaaactacttcaaacattgctgaagactacaaccagttgttgtaattgaagcgggtcaagacatagcatttgcaaagatttagttcattctcatcactctgcaatattcgggttctctactatgtgtaatctcatatcaagattaatgagtatcgtgatcgtataattttgaatcctatcaacccatatggcaaggcaaagaaaaatgacagtggacatcattctagattttacaaaatcaaaggagcaaccagacatggctgtcatgatctaagatacttcaacgtgattggatcgaacccaaacatatgactaggagaagctccaaggccactttgtcaagggtctctgcaatgcacctactggtgcatgatttactggaggttgtgcgcatgaatgtgccacacattggtatgggggttggagttgaagcaggagacatgattgttattcctatcatgtgcacactgcctcctcgctgtcatttgtcgtcactctcgtagtcctgataccggagcatggttgccaggggagagcagtccaaggcaaatttgccatgttggagcagtcacaggagccaaggggctgcagtcacaggtcctgctagccaggatggagcaatcataggacctcctagcagtccaaggaaaatttgcgaggtggagtagttgcaacttttgaaacccacgtgataacatgctcaagcgttcgtatgataaaaaagatggcacataatcaaaagaagatctcatgttctgcgtttgtgaacctgtttgtattttttgaacttgttttgtgaacctctatttgtaaacctgtaaaatctgaggttgtgaatagatttgggtaacttcatacaagtggtggaggcctggtggtaatcctggatgcatataaagcgaggcatgcaatatccatagcactcgtttgacagaaggcaacaccatcaaccttgtcctccacctttaaactagcatgagcaccatccttcttcacatttatattcatgtcccctatacgttc

SEQ ID NO: 206532 - DNA, 1385 bp, Zea Mays
agggcaacaagaatttccgggtgtgggtggacagactggtcacatcgccgatcggtacaagcaactggttggtgaggtttgataactgggagatggaaggtggcgttcggtactgctgccgcactactcttctgctgaataacaagagctatgcatacaagtggtggaggcctggtggatcaaggtcgttgtcgtctccaggtccatcaaatgcgacaaggtcgagcgcacgcaattcagctccgaagtcatctcctttcaacagaaagatgcaagtaacaccaagtcacttgcctttgatggttgatacatttcactgtatatcattgcacgacagatccatttagtacctttttctgagttaaactacttcaaacattgctgaagactacaaccagttgttgtaattgaagcgggtcaagacatagcatttgcaaagatttagttcattctcatcactctgcaatattcgggttctctactatgtgtaatctcatatcaagattaatgagtatcgtgatcgtataattttgaatcctatcaacccatatggcaaggcaaagaaaaatgacagtggacatcattctagattttacaaaatcaaaggagcaaccagacatggctgtcatgatctaagatacttcaacgtgattggatcgaacccaaacatatgactaggagaagctccaaggccactttgtcaagggtctctgcaatgcacctactggtgcatgatttactggaggttgtgcgcatgaatgtgccacacattggtatgggggttggagttgaagcaggagacatgattgttattcctatcatgtgcacactgcctcctcgctgtcatttgtcgtcactctcgtagtcctgataccggagcatggttgccaggggagagcagtccaaggcaaatttgccatgttggagcagtcacaggagccaaggggctgcagtcacaggtcctgctagccaggatggagcaatcataggacctcctagcagtccaaggaaaatttgcgaggtggagtagttgcaacttttgaaacccacgtgataacatgctcaagcgttcgtatgataaaaaagatggcacataatcaaaagaagatctcatgttctgcgtttgtgaacctgtttgtattttttgaacttgttttgtgaacctctatttgtaaacctgtaaaatctgaggttgtgaatagatttgggtaacttcatacaagtggtggaggcctggtggtaatcctggatgcatataaagcgaggcatgcaatatccatagcactcgtttgacagaaggcaacaccatcaaccttgtcctccacctttaaactagcatgagcaccatccttcttcacatttatattcatgtcccctatacgttc

SEQ ID NO: 206533 - DNA, 1486 bp, Zea Mays
cagggcaacaagaatttccgggtgtgggtggacagactggtcacatcgccgatcggtacaagcaactggttggtgaggtttgataactgggagatggaaggtggcgttcggtactgctgccgcactactcttctgctgaataacaaggttccaaaagaactagaagtacagattggttgaacttcaaacaaatacaaagagctatgcatacaagtggtggaggcctggtggtaaattgtttatcaagatcgctagagcagttaaatttactcctattatcttctgggatagatttggcaggatcaaggtcgttgtcgtctccaggtccatcaaatgcgacaaggtcgagcgcacgcaattcagctccgaagtcatctcctttcaacagatccatttagtacctttttctgagttaaactacttcaaacattgctgaagactacaaccagcctacagttgttgtaattgaagcgggtcaagacatagcatttgcaaagatttagttcattctcatcactctgcaatattcgggttctctactatgtgtaatctcatatcaagattaatgagtatcgtgatcgtataattttgaatcctatcaacccatatggcaaggcaaagaaaaatgacagtggacatcattctagattttacaaaatcaaaggagcaaccagacatggctgtcatgatctaagatacttcaacgtgattggatcgaacccaaacatatgactaggagaagctccaaggccactttgtcaagggtctctgcaatgcacctactggtgcatgatttactggaggttgtgcgcatgaatgtgccacacattggtatgggggttggagttgaagcaggtgattttcaccaacattggtttgcgaactggagttgaagcaggagacatgattgttattcctatcatgtgcacactgcctcctcgctgtcatttgtcgtcactctcgtagtcctgataccggagcatggttgccaggggagagcagtccaaggcaaatttgccatgttggagcagtcacaggagccaaggggctgcagtcacaggtcctgctagccaggatggagcaatcataggacctcctagcagtccaaggaaaatttgcgaggtggagtagttgcaacttttgaaacccacgtgataacatgctcaagcgttcgtatgataaaaaagatggcacataatcaaaagaagatctcatgttctgcgtttgtgaacctgtttgtattttttgaacttgttttgtgaacctctatttgtaaacctgtaaaatctgaggttgtgaatagatttgggtaacttcatacaagtggtggaggcctggtggtaatcctggatgcatataaagcgaggcatgcaatatccatagcactcgtttgacagaaggcaacaccatcaaccttgtcctccacctttaaactagcatgagcaccatccttcttcacatttatattcatgtcccctatacgttc

SEQ ID NO: 206534 - DNA, 1484 bp, Zea Mays
cagggcaacaagaatttccgggtgtgggtggacagactggtcacatcgccgatcggtacaagcaactggttggtgaggtttgataactgggagatggaaggtggcgttcggtactgctgccgcactactcttctgctgaataacaaggttccaaaagaactagaagtacagattggttgaacttcaaacaaatacaaagagctatgcatacaagtggtggaggcctggtggtaaattgtttatcaagatcgctagagcagttaaatttactcctattatcttctgggatagatttggcaggatcaaggtcgttgtcgtctccaggtccatcaaatgcgacaaggtcgagcgcacgcaattcagctccgaagtcatctcctttcaacagaaagatgcaagtaacaccaagtcacttgcctttgatggttgatacatttcactgtatatcattgcacgacagatccatttagtacctttttctgagttaaactacttcaaacattgctgaagactacaaccagcctacagttgttgtaattgaagcgggtcaagacatagcatttgcaaagatttagttcattctcatcactctgcaatattcgggttctctactatgtgtaatctcatatcaagattaatgagtatcgtgatcgtataattttgaatcctatcaacccatatggcaaggcaaagaaaaatgacagtggacatcattctagattttacaaaatcaaaggagcaaccagacatggctgtcatgatctaagatacttcaacgtgattggatcgaacccaaacatatgactaggagaagctccaaggccactttgtcaagggtctctgcaatgcacctactggtgcatgatttactggaggttgtgcgcatgaatgtgccacacattggtatgggggttggagttgaagcaggtgattttcaccaacattggtttgcgaactggagttgaagcaggttattcatttgatgaaagtgggagagcagtccaaggcaaatttgccatgttggagcagtcacaggagccaaggggctgcagtcacaggtcctgctagccaggatggagcaatcataggacctcctagcagtccaaggaaaatttgcgaggtggagtagttgcaacttttgaaacccacgtgataacatgctcaagcgttcgtatgataaaaaagatggcacataatcaaaagaagatctcatgttctgcgtttgtgaacctgtttgtattttttgaacttgttttgtgaacctctatttgtaaacctgtaaaatctgaggttgtgaatagatttgggtaacttcatacaagtggtggaggcctggtggtaatcctggatgcatataaagcgaggcatgcaatatccatagcactcgtttgacagaaggcaacaccatcaaccttgtcctccacctttaaactagcatgagcaccatccttcttcacatttatattcatgtcccctatacgttc

SEQ ID NO: 206535 - DNA, 1334 bp, Zea Mays
acagggcaacaagaatttccgggtgtgggtggacagactggtcacatcgccgatcggtacaagcaactggttggtgaggtttgataactgggagatggaaggtggcgttcggtactgctgccgcactactcttctgctgaataacaaggatcaaggtcgttgtcgtctccaggtccatcaaatgcgacaaggtcgagcgcacgcaattcagctccgaagtcatctcctttcaacagatccatttagtacctttttctgagttaaactacttcaaacattgctgaagactacaaccagcctacagttgttgtaattgaagcgggtcaagacatagcatttgcaaagatttagttcattctcatcactctgcaatattcgggttctctactatgtgtaatctcatatcaagattaatgagtatcgtgatcgtataattttgaatcctatcaacccatatggcaaggcaaagaaaaatgacagtggacatcattctagattttacaaaatcaaaggagcaaccagacatggctgtcatgatctaagatacttcaacgtgattggatcgaacccaaacatatgactaggagaagctccaaggccactttgtcaagggtctctgcaatgcacctactggtgcatgatttactggaggttgtgcgcatgaatgtgccacacattggtatgggggttggagttgaagcaggtgattttcaccaacattggtttgcgaactggagttgaagcaggagacatgattgttattcctatcatgtgcacactgcctcctcgctgtcatttgtcgtcactctcgtagtcctgataccggagcatggttgccaggggagagcagtccaaggcaaatttgccatgttggagcagtcacaggagccaaggggctgcagtcacaggtcctgctagccaggatggagcaatcataggacctcctagcagtccaaggaaaatttgcgaggtggagtagttgcaacttttgaaacccacgtgataacatgctcaagcgttcgtatgataaaaaagatggcacataatcaaaagaagatctcatgttctgcgtttgtgaacctgtttgtattttttgaacttgttttgtgaacctctatttgtaaacctgtaaaatctgaggttgtgaatagatttgggtaacttcatacaagtggtggaggcctggtggtaatcctggatgcatataaagcgaggcatgcaatatccatagcactcgtttgacagaaggcaacaccatcaaccttgtcctccacctttaaactagcatgagcaccatccttcttcacatttatattcatgtcccctatacgttc

SEQ ID NO: 206536 - DNA, 1478 bp, Zea Mays
acagggcaacaagaatttccgggtgtgggtggacagactggtcacatcgccgatcggtacaagcaactggttggtgaggtttgataactgggagatggaaggtggcgttcggtactgctgccgcactactcttctgctgaataacaaggttccaaaagaactagaagtacagattggttgaacttcaaacaaatacaaagagctatgcatacaagtggtggaggcctggtggtaaattgtttatcaagatcgctagagcagttaaatttactcctattatcttctgggatagatttggcaggatcaaggtcgttgtcgtctccaggtccatcaaatgcgacaaggtcgagcgcacgcaattcagctccgaagtcatctcctttcaacagaaagatgcaagtaacaccaagtcacttgcctttgatggttgatacatttcactgtatatcattgcacgacagatccatttagtacctttttctgagttaaactacttcaaacattgctgaagactacaaccagttgttgtaattgaagcgggtcaagacatagcatttgcaaagatttagttcattctcatcactctgcaatattcgggttctctactatgtgtaatctcatatcaagattaatgagtatcgtgatcgtataattttgaatcctatcaacccatatggcaaggcaaagaaaaatgacagtggacatcattctagattttacaaaatcaaaggagcaaccagacatggctgtcatgatctaagatacttcaacgtgattggatcgaacccaaacatatgactaggagaagctccaaggccactttgtcaagggtctctgcaatgcacctactggtgcatgatttactggaggttgtgcgcatgaatgtgccacacattggtatgggggttggagttgaagcaggtgattttcaccaacattggtttgcgaactggagttgaagcaggttattcatttgatgaaagtgggagagcagtccaaggcaaatttgccatgttggagcagtcacaggagccaaggggctgcagtcacaggtcctgctagccaggatggagcaatcataggacctcctagcagtccaaggaaaatttgcgaggtggagtagttgcaacttttgaaacccacgtgataacatgctcaagcgttcgtatgataaaaaagatggcacataatcaaaagaagatctcatgttctgcgtttgtgaacctgtttgtattttttgaacttgttttgtgaacctctatttgtaaacctgtaaaatctgaggttgtgaatagatttgggtaacttcatacaagtggtggaggcctggtggtaatcctggatgcatataaagcgaggcatgcaatatccatagcactcgtttgacagaaggcaacaccatcaaccttgtcctccacctttaaactagcatgagcaccatccttcttcacatttatattcatgtcccctatacgttc

SEQ ID NO: 206537 - DNA, 1509 bp, Zea Mays
acagggcaacaagaatttccgggtgtgggtggacagactggtcacatcgccgatcggtacaagcaactggttggtgaggtttgataactgggagatggaaggtggcgttcggtactgctgccgcactactcttctgctgaataacaaggttccaaaagaactagaagtacagattggttgaacttcaaacaaatacaaagagctatgcatacaagtggtggaggcctggtggtaaattgtttatcaagatcgctagagcagttaaatttactcctattatcttctgggatagatttggcaggatcaaggtcgttgtcgtctccaggtccatcaaatgcgacaaggtcgagcgcacgcaattcagctccgaagtcatctcctttcaacagaaagatgcaagtaacaccaagtcacttgcctttgatggttgatacatttcactgtatatcattgcacgacagatccatttagtacctttttctgagttaaactacttcaaacattgctgaagactacaaccagttgttgtaattgaagcgggtcaagacatagcatttgcaaagatttagttcattctcatcactctgcaatattcgggttctctactatgtgtaatctcatatcaagattaatgagtatcgtgatcgtataattttgaatcctatcaacccatatggcaaggcaaagaaaaatgacagtggacatcattctagattttacaaaatcaaaggagcaaccagacatggctgtcatgatctaagatacttcaacgtgattggatcgaacccaaacatatgactaggagaagctccaaggccactttgtcaagggtctctgcaatgcacctactggtgcatgatttactggaggttgtgcgcatgaatgtgccacacattggtatgggggttggagttgaagcaggagacatgattgttattcctatcatgtgcacactgcctcctcgctgtcatttgtcgtcactctcgtagtcctgataccggagcatggttgccaggggagagcagtccaaggcaaatttgccatgttggagcagtcacaggagccaaggggctgcagtcacaggtcctgctagccaggatggagcaatcataggacctcctagcagtccaaggaaaatttgcgaggtggagtagttgcaacttttgaaacccacgtgataacatgctcaagcgttcgtatgataaaaaagatggcacataatcaaaagaagatctcatgttctgcgtttgtgaacctgtttgtattttttgaacttgttttgtgaacctctatttgtaaacctgtaaaatctgaggttgtgaatagatttgggtaacttcatacaagtggtggaggcctggtggtaatcctggatgcatataaagcgaggcatgcaatatccatagcactcgtttgacagaaggcaacaccatcaaccttgtcctccacctttaaactagcatgagcaccatccttcttcacatttatattcatgtcccctatacgttc

SEQ ID NO: 206538 - DNA, 1585 bp, Zea Mays
acagggcaacaagaatttccgggtgtgggtggacagactggtcacatcgccgatcggtacaagcaactggttggtgaggtttgataactgggagatggaaggtggcgttcggtactgctgccgcactactcttctgctgaataacaaggttccaaaagaactagaagtacagattggttgaacttcaaacaaatacaaagagctatgcatacaagtggtggaggcctggtggtaaattgtttatcaagatcgctagagcagttaaatttactcctattatcttctgggatagatttggcaggatcaaggtcgttgtcgtctccaggtccatcaaatgcgacaaggtcgagcgcacgcaattcagctccgaagtcatctcctttcaacagaaagatgcaagtaacaccaagtcacttgcctttgatggttgatacatttcactgtatatcattgcacgacagatccatttagtacctttttctgagttaaactacttcaaacattgctgaagactacaaccagttgttgtaattgaagcgggtcaagacatagcatttgcaaagatttagttcattctcatcactctgcaatattcggttcatggcctgtcttattttttcccctacaagtcatctacgacagtttgccagtagcactaaatcttttaactgtggttctctactatgtgtaatctcatatcaagattaatgagtatcgtgatcgtataattttgaatcctatcaacccatatggcaaggcaaagaaaaatgacagtggacatcattctagattttacaaaatcaaaggagcaaccagacatggctgtcatgatctaagatacttcaacgtgattggatcgaacccaaacatatgactaggagaagctccaaggccactttgtcaagggtctctgcaatgcacctactggtgcatgatttactggaggttgtgcgcatgaatgtgccacacattggtatgggggttggagttgaagcaggagacatgattgttattcctatcatgtgcacactgcctcctcgctgtcatttgtcgtcactctcgtagtcctgataccggagcatggttgccaggggagagcagtccaaggcaaatttgccatgttggagcagtcacaggagccaaggggctgcagtcacaggtcctgctagccaggatggagcaatcataggacctcctagcagtccaaggaaaatttgcgaggtggagtagttgcaacttttgaaacccacgtgataacatgctcaagcgttcgtatgataaaaaagatggcacataatcaaaagaagatctcatgttctgcgtttgtgaacctgtttgtattttttgaacttgttttgtgaacctctatttgtaaacctgtaaaatctgaggttgtgaatagatttgggtaacttcatacaagtggtggaggcctggtggtaatcctggatgcatataaagcgaggcatgcaatatccatagcactcgtttgacagaaggcaacaccatcaaccttgtcctccacctttaaactagcatgagcaccatccttcttcacatttatattcatgtcccctatacgttc

SEQ ID NO: 206539 - DNA, 1377 bp, Zea Mays
acagggcaacaagaatttccgggtgtgggtggacagactggtcacatcgccgatcggtacaagcaactggttggtgaggtttgataactgggagatggaaggtggcgttcggtactgctgccgcactactcttctgctgaataacaaggttccaaaagaactagaagtacagattggttgaacttcaaacaaatacaaaggatcaaggtcgttgtcgtctccaggtccatcaaatgcgacaaggtcgagcgcacgcaattcagctccgaagtcatctcctttcaacagaaagatgcaagtaacaccaagtcacttgcctttgatggttgatacatttcactgtatatcattgcacgacagatccatttagtacctttttctgagttaaactacttcaaacattgctgaagactacaaccagttgttgtaattgaagcgggtcaagacatagcatttgcaaagatttagttcattctcatcactctgcaatattcgggttctctactatgtgtaatctcatatcaagattaatgagtatcgtgatcgtataattttgaatcctatcaacccatatggcaaggcaaagaaaaatgacagtggacatcattctagattttacaaaatcaaaggagcaaccagacatggctgtcatgatctaagatacttcaacgtgattggatcgaacccaaacatatgactaggagaagctccaaggccactttgtcaagggtctctgcaatgcacctactggtgcatgatttactggaggttgtgcgcatgaatgtgccacacattggtatgggggttggagttgaagcaggtgattttcaccaacattggtttgcgaactggagttgaagcaggttattcatttgatgaaagtgggagagcagtccaaggcaaatttgccatgttggagcagtcacaggagccaaggggctgcagtcacaggtcctgctagccaggatggagcaatcataggacctcctagcagtccaaggaaaatttgcgaggtggagtagttgcaacttttgaaacccacgtgataacatgctcaagcgttcgtatgataaaaaagatggcacataatcaaaagaagatctcatgttctgcgtttgtgaacctgtttgtattttttgaacttgttttgtgaacctctatttgtaaacctgtaaaatctgaggttgtgaatagatttgggtaacttcatacaagtggtggaggcctggtggtaatcctggatgcatataaagcgaggcatgcaatatccatagcactcgtttgacagaaggcaacaccatcaaccttgtcctccacctttaaactagcatgagcaccatccttcttcacatttatattcatgtcccctatacgttc

SEQ ID NO: 206540 - DNA, 1516 bp, Zea Mays
caaacagggcaacaagaatttccgggtgtgggtggacagactggtcacatcgccgatcggtacaagcaactggttggtgaggtttgataactgggagatggaaggtggcgttcggtactgctgccgcactactcttctgctgaataacaaggttccaaaagaactagaagtacagattggttgaacttcaaacaaatacaaagagctatgcatacaagtggtggaggcctggtggtaaattgtttatcaagatcgctagagcagttaaatttactcctattatcttctgggatagatttgggatcaaggtcgttgtcgtctccaggtccatcaaatgcgacaaggtcgagcgcacgcaattcagctccgaagtcatctcctttcaacagaaagatgcaagtaacaccaagtcacttgcctttgatggttgatacatttcactgtatatcattgcacgacagatccatttagtacctttttctgagttaaactacttcaaacattgctgaagactacaaccagcctacagttgttgtaattgaagcgggtcaagacatagcatttgcaaagatttagttcattctcatcactctgcaatattcgggttctctactatgtgtaatctcatatcaagattaatgagtatcgtgatcgtataattttgaatcctatcaacccatatggcaaggcaaagaaaaatgacagtggacatcattctagattttacaaaatcaaaggagcaaccagacatggctgtcatgatctaagatacttcaacgtgattggatcgaacccaaacatatgactaggagaagctccaaggccactttgtcaagggtctctgcaatgcacctactggtgcatgatttactggaggttgtgcgcatgaatgtgccacacattggtatgggggttggagttgaagcaggagacatgattgttattcctatcatgtgcacactgcctcctcgctgtcatttgtcgtcactctcgtagtcctgataccggagcatggttgccaggggagagcagtccaaggcaaatttgccatgttggagcagtcacaggagccaaggggctgcagtcacaggtcctgctagccaggatggagcaatcataggacctcctagcagtccaaggaaaatttgcgaggtggagtagttgcaacttttgaaacccacgtgataacatgctcaagcgttcgtatgataaaaaagatggcacataatcaaaagaagatctcatgttctgcgtttgtgaacctgtttgtattttttgaacttgttttgtgaacctctatttgtaaacctgtaaaatctgaggttgtgaatagatttgggtaacttcatacaagtggtggaggcctggtggtaatcctggatgcatataaagcgaggcatgcaatatccatagcactcgtttgacagaaggcaacaccatcaaccttgtcctccacctttaaactagcatgagcaccatccttcttcacatttatattcatgtcccctatacgttc

SEQ ID NO: 206541 - DNA, 1485 bp, Zea Mays
caaacagggcaacaagaatttccgggtgtgggtggacagactggtcacatcgccgatcggtacaagcaactggttggtgaggtttgataactgggagatggaaggtggcgttcggtactgctgccgcactactcttctgctgaataacaaggttccaaaagaactagaagtacagattggttgaacttcaaacaaatacaaagagctatgcatacaagtggtggaggcctggtggatcaaggtcgttgtcgtctccaggtccatcaaatgcgacaaggtcgagcgcacgcaattcagctccgaagtcatctcctttcaacagaaagatgcaagtaacaccaagtcacttgcctttgatggttgatacatttcactgtatatcattgcacgacagatccatttagtacctttttctgagttaaactacttcaaacattgctgaagactacaaccagttgttgtaattgaagcgggtcaagacatagcatttgcaaagatttagttcattctcatcactctgcaatattcgggttctctactatgtgtaatctcatatcaagattaatgagtatcgtgatcgtataattttgaatcctatcaacccatatggcaaggcaaagaaaaatgacagtggacatcattctagattttacaaaatcaaaggagcaaccagacatggctgtcatgatctaagatacttcaacgtgattggatcgaacccaaacatatgactaggagaagctccaaggccactttgtcaagggtctctgcaatgcacctactggtgcatgatttactggaggttgtgcgcatgaatgtgccacacattggtatgggggttggagttgaagcaggtgattttcaccaacattggtttgcgaactggagttgaagcaggagacatgattgttattcctatcatgtgcacactgcctcctcgctgtcatttgtcgtcactctcgtagtcctgataccggagcatggttgccaggggagagcagtccaaggcaaatttgccatgttggagcagtcacaggagccaaggggctgcagtcacaggtcctgctagccaggatggagcaatcataggacctcctagcagtccaaggaaaatttgcgaggtggagtagttgcaacttttgaaacccacgtgataacatgctcaagcgttcgtatgataaaaaagatggcacataatcaaaagaagatctcatgttctgcgtttgtgaacctgtttgtattttttgaacttgttttgtgaacctctatttgtaaacctgtaaaatctgaggttgtgaatagatttgggtaacttcatacaagtggtggaggcctggtggtaatcctggatgcatataaagcgaggcatgcaatatccatagcactcgtttgacagaaggcaacaccatcaaccttgtcctccacctttaaactagcatgagcaccatccttcttcacatttatattcatgtcccctatacgttc

SEQ ID NO: 206542 - DNA, 1552 bp, Zea Mays
caaacagggcaacaagaatttccgggtgtgggtggacagactggtcacatcgccgatcggtacaagcaactggttggtgaggtttgataactgggagatggaaggtggcgttcggtactgctgccgcactactcttctgctgaataacaaggttccaaaagaactagaagtacagattggttgaacttcaaacaaatacaaagagctatgcatacaagtggtggaggcctggtggtaaattgtttatcaagatcgctagagcagttaaatttactcctattatcttctgggatagatttgggatcaaggtcgttgtcgtctccaggtccatcaaatgcgacaaggtcgagcgcacgcaattcagctccgaagtcatctcctttcaacagaaagatgcaagtaacaccaagtcacttgcctttgatggttgatacatttcactgtatatcattgcacgacagatccatttagtacctttttctgagttaaactacttcaaacattgctgaagactacaaccagttgttgtaattgaagcgggtcaagacatagcatttgcaaagatttagttcattctcatcactctgcaatattcgggttctctactatgtgtaatctcatatcaagattaatgagtatcgtgatcgtataattttgaatcctatcaacccatatggcaaggcaaagaaaaatgacagtggacatcattctagattttacaaaatcaaaggagcaaccagacatggctgtcatgatctaagatacttcaacgtgattggatcgaacccaaacatatgactaggagaagctccaaggccactttgtcaagggtctctgcaatgcacctactggtgcatgatttactggaggttgtgcgcatgaatgtgccacacattggtatgggggttggagttgaagcaggtgattttcaccaacattggtttgcgaactggagttgaagcaggagacatgattgttattcctatcatgtgcacactgcctcctcgctgtcatttgtcgtcactctcgtagtcctgataccggagcatggttgccaggggagagcagtccaaggcaaatttgccatgttggagcagtcacaggagccaaggggctgcagtcacaggtcctgctagccaggatggagcaatcataggacctcctagcagtccaaggaaaatttgcgaggtggagtagttgcaacttttgaaacccacgtgataacatgctcaagcgttcgtatgataaaaaagatggcacataatcaaaagaagatctcatgttctgcgtttgtgaacctgtttgtattttttgaacttgttttgtgaacctctatttgtaaacctgtaaaatctgaggttgtgaatagatttgggtaacttcatacaagtggtggaggcctggtggtaatcctggatgcatataaagcgaggcatgcaatatccatagcactcgtttgacagaaggcaacaccatcaaccttgtcctccacctttaaactagcatgagcaccatccttcttcacatttatattcatgtcccctatacgttc

SEQ ID NO: 206543 - DNA, 1405 bp, Zea Mays
caaacagggcaacaagaatttccgggtgtgggtggacagactggtcacatcgccgatcggtacaagcaactggttggtgaggtttgataactgggagatggaaggtggcgttcggtactgctgccgcactactcttctgctgaataacaagcaggatcaaggtcgttgtcgtctccaggtccatcaaatgcgacaaggtcgagcgcacgcaattcagctccgaagtcatctcctttcaacagaaagatgcaagtaacaccaagtcacttgcctttgatggttgatacatttcactgtatatcattgcacgacagatccatttagtacctttttctgagttaaactacttcaaacattgctgaagactacaaccagttgttgtaattgaagcgggtcaagacatagcatttgcaaagatttagttcattctcatcactctgcaatattcgggttctctactatgtgtaatctcatatcaagattaatgagtatcgtgatcgtataattttgaatcctatcaacccatatggcaaggcaaagaaaaatgacagtggacatcattctagattttacaaaatcaaaggagcaaccagacatggctgtcatgatctaagatacttcaacgtgattggatcgaacccaaacatatgactaggagaagctccaaggccactttgtcaagggtctctgcaatgcacctactggtgcatgatttactggaggttgtgcgcatgaatgtgccacacattggtatgggggttggagttgaagcaggtgattttcaccaacattggtttgcgaactggagttgaagcaggagacatgattgttattcctatcatgtgcacactgcctcctcgctgtcatttgtcgtcactctcgtagtcctgataccggagcatggttgccaggggagagcagtccaaggcaaatttgccatgttggagcagtcacaggagccaaggggctgcagtcacaggtcctgctagccaggatggagcaatcataggacctcctagcagtccaaggaaaatttgcgaggtggagtagttgcaacttttgaaacccacgtgataacatgctcaagcgttcgtatgataaaaaagatggcacataatcaaaagaagatctcatgttctgcgtttgtgaacctgtttgtattttttgaacttgttttgtgaacctctatttgtaaacctgtaaaatctgaggttgtgaatagatttgggtaacttcatacaagtggtggaggcctggtggtaatcctggatgcatataaagcgaggcatgcaatatccatagcactcgtttgacagaaggcaacaccatcaaccttgtcctccacctttaaactagcatgagcaccatccttcttcacatttatattcatgtcccctatacgttc

SEQ ID NO: 206544 - DNA, 1442 bp, Zea Mays
caaacagggcaacaagaatttccgggtgtgggtggacagactggtcacatcgccgatcggtacaagcaactggttggtgaggtttgataactgggagatggaaggtggcgttcggtactgctgccgcactactcttctgctgaataacaaggttccaaaagaactagaagtacagattggttgaacttcaaacaaatacaaagagctatgcatacaagtggtggaggcctggtggatcaaggtcgttgtcgtctccaggtccatcaaatgcgacaaggtcgagcgcacgcaattcagctccgaagtcatctcctttcaacagaaagatgcaagtaacaccaagtcacttgcctttgatggttgatacatttcactgtatatcattgcacgacagatccatttagtacctttttctgagttaaactacttcaaacattgctgaagactacaaccagttgttgtaattgaagcgggtcaagacatagcatttgcaaagatttagttcattctcatcactctgcaatattcgggttctctactatgtgtaatctcatatcaagattaatgagtatcgtgatcgtataattttgaatcctatcaacccatatggcaaggcaaagaaaaatgacagtggacatcattctagattttacaaaatcaaaggagcaaccagacatggctgtcatgatctaagatacttcaacgtgattggatcgaacccaaacatatgactaggagaagctccaaggccactttgtcaagggtctctgcaatgcacctactggtgcatgatttactggaggttgtgcgcatgaatgtgccacacattggtatgggggttggagttgaagcaggagacatgattgttattcctatcatgtgcacactgcctcctcgctgtcatttgtcgtcactctcgtagtcctgataccggagcatggttgccaggggagagcagtccaaggcaaatttgccatgttggagcagtcacaggagccaaggggctgcagtcacaggtcctgctagccaggatggagcaatcataggacctcctagcagtccaaggaaaatttgcgaggtggagtagttgcaacttttgaaacccacgtgataacatgctcaagcgttcgtatgataaaaaagatggcacataatcaaaagaagatctcatgttctgcgtttgtgaacctgtttgtattttttgaacttgttttgtgaacctctatttgtaaacctgtaaaatctgaggttgtgaatagatttgggtaacttcatacaagtggtggaggcctggtggtaatcctggatgcatataaagcgaggcatgcaatatccatagcactcgtttgacagaaggcaacaccatcaaccttgtcctccacctttaaactagcatgagcaccatccttcttcacatttatattcatgtcccctatacgttc

SEQ ID NO: 206545 - DNA, 1293 bp, Zea Mays
cgtggacaaacagggcaacaagaatttccgggtgtgggtggacagactggtcacatcgccgatcggtacaagcaactggttggtgaggtttgataactgggagatggaaggtggcgttcggtactgctgccgcactactcttctgctgaataacaaggatcaaggtcgttgtcgtctccaggtccatcaaatgcgacaaggtcgagcgcacgcaattcagctccgaagtcatctcctttcaacagatccatttagtacctttttctgagttaaactacttcaaacattgctgaagactacaaccagttgttgtaattgaagcgggtcaagacatagcatttgcaaagatttagttcattctcatcactctgcaatattcgggttctctactatgtgtaatctcatatcaagattaatgagtatcgtgatcgtataattttgaatcctatcaacccatatggcaaggcaaagaaaaatgacagtggacatcattctagattttacaaaatcaaaggagcaaccagacatggctgtcatgatctaagatacttcaacgtgattggatcgaacccaaacatatgactaggagaagctccaaggccactttgtcaagggtctctgcaatgcacctactggtgcatgatttactggaggttgtgcgcatgaatgtgccacacattggtatgggggttggagttgaagcaggagacatgattgttattcctatcatgtgcacactgcctcctcgctgtcatttgtcgtcactctcgtagtcctgataccggagcatggttgccaggggagagcagtccaaggcaaatttgccatgttggagcagtcacaggagccaaggggctgcagtcacaggtcctgctagccaggatggagcaatcataggacctcctagcagtccaaggaaaatttgcgaggtggagtagttgcaacttttgaaacccacgtgataacatgctcaagcgttcgtatgataaaaaagatggcacataatcaaaagaagatctcatgttctgcgtttgtgaacctgtttgtattttttgaacttgttttgtgaacctctatttgtaaacctgtaaaatctgaggttgtgaatagatttgggtaacttcatacaagtggtggaggcctggtggtaatcctggatgcatataaagcgaggcatgcaatatccatagcactcgtttgacagaaggcaacaccatcaaccttgtcctccacctttaaactagcatgagcaccatccttcttcacatttatattcatgtcccctatacgttc

SEQ ID NO: 206546 - DNA, 3417 bp, Zea Mays
tatgtgtggaaatggatcctggcacacatatggtatgcgctcgattctaccccctggaatcgggtgtgacacccgcatactgagagatgtgattaatctttatcattggtttcacatgcattacacctgcatttattgttttatggtacaaagcacacatatttcagcacgggcatgcatcttttgttgagctagatagattgctactaaaatgatgaaaggaatgtgaaatgtttttcctctgaaaattctgaaatctggtttcaaacagactaagaccatgtaacaagatttcacttgatctataccactcagaggcaccactaatattttctcttaaagtgagaaaatgaattttgtgtttgctgaacttctctctggttgcttgtttatgtttttacttttcttgaggcagtcactaactgctcctttcttttatgattagagctaggataaaactgttgattgttacagccctgggcaaggattgatgcttgctagcttcaagattaggaccctaccacttgatgagaacagatagtgctatactgctatgtacatctacatttctccagttatacataatcagatcttgcttctagccaactgttgcaaatacattgatcccttaggggttgagatggaaactgccacaagggagggaggacgtgagtcagctgcacgtgccgacatacacatcacttcctgcctcgctgtccttgatcgagacaaaatcagaagagctgtatctatatgtactccataccttgacgtatgcaggggctagatccataccccggcctatctgccctgtgaggaatgtatacttctgcaagtttgaatactttgacaccttgtgaggagcactctttgaaggtggagaaggtgttgttccaagggaagccagactaccaaaatgttatggttttttagcttctcaatagccggcgacagtgcatacgacctgccccgcgctggggctgtgtctgccttctcctccttcgatgccatgacactgtaaagtgaagccttcgagctaggcgcggaggccagggagatgctatgcgcccacatctaccacgccgccttcatattgctcaagctcgcgctccgcaactcctgccccatctgccgccatgagatgcccaccgatgctgccctgcgggctgccgccagcgtcggcgttgccgaacgcgccgccggggaggaacaagcgtgggatgcgccccacgcgcgcgactttcacctgcctcccaatttgatccgtgagttcaccaggaccagaacttcttcgatgatttgttggaccatccctgctgatacaaacacaatcattttgtggcaggaaatcaccatattagagcttacaaccttcgcatcaactgaagagtttgacactcatgatccaaaggagaacactttgctactcccttacttgaggaaaaggtcaaaaatcattgagatagttgcagcgcgtgatatagtctttgctctatcacagttaggagtatgtgctgcttttagtagcggtacgttcgccgaggacaagacaaaaccggatgctggtttccctctttttgactcaccatgtcaacatggcaatttcaggacccaacgtctctgcgagagaccttgggttcccttatccgaaggcaggcaccgctaagcctacagacgtggtggtgaagttctacgtcctctacgagaagtggcggaggggcgagctcctgggttcttcgtcagttgcgcggtacttgaaaagcatcactcattcgaacggtacgattattcatccttctggatcggagcgttctcttcatgcgtctgttgacgctctaagttcttgctacgtggacaaacagggcaacaagaatttccgggtgtgggtggacagactggtcacatcgccgatcggtacaagcaactggttggtgaggtttgataactgggagatggaaggtggcgttcggtactgctgccgcactactcttctgctgaataacaaggttccaaaagaactagaagtacagattggttgaacttcaaacaaatacaaagagctatgcatacaagtggtggaggcctggtggtaaattgtttatcaagatcgctagagcagttaaatttactcctattatcttctgggatagatttggcaggatcaaggtcgttgtcgtctccaggtccatcaaatgcgacaaggtcgagcgcacgcaattcagctccgaagtcatctcctttcaacagaaagatgcaagtaacaccaagtcacttgcctttgatggttgatacatttcactgtatatcattgcacgacagatccatttagtacctttttctgagttaaactacttcaaacattgctgaagactacaaccagcctacagttgttgtaattgaagcgggtcaagacatagcatttgcaaagatttagttcattctcatcactctgcaatattcgggttctctactatgtgtaatctcatatcaagattaatgagtatcgtgatcgtataattttgaatcctatcaacccatatggcaaggcaaagaaaaatgacagtggacatcattctagattttacaaaatcaaaggagcaaccagacatggctgtcatgatctaagatacttcaacgtgattggatcgaacccaaacatatgactaggagaagctccaaggccactttgtcaagggtctctgcaatgcacctactggtgcatgatttactggaggttgtgcgcatgaatgtgccacacattggtatgggggttggagttgaagcaggtgattttcaccaacattggtttgcgaactggagttgaagcaggagacatgattgttattcctatcatgtgcacactgcctcctcgctgtcatttgtcgtcactctcgtagtcctgataccggagcatggttgccaggggagagcagtccaaggcaaatttgccatgttggagcagtcacaggagccaaggggctgcagtcacaggtcctgctagccaggatggagcaatcataggacctcctagcagtccaaggaaaatttgcgaggtggagtagttgcaacttttgaaacccacgtgataacatgctcaagcgttcgtatgataaaaaagatggcacataatcaaaagaagatctcatgttctgcgtttgtgaacctgtttgtattttttgaacttgttttgtgaacctctatttgtaaacctgtaaaatctgaggttgtgaatagatttgggtaacttcatacaagtggtggaggcctggtggtaatcctggatgcatataaagcgaggcatgcaatatccatagcactcgtttgacagaaggcaacaccatcaaccttgtcctccacctttaaactagcatgagcaccatccttcttcacatttatattcatgtcccctatacgttc

SEQ ID NO: 206547 - DNA, 3705 bp, Zea Mays
taatgatcaagtggtcgtgttgtacctatcctagccgtgtttgcaggcctctcaaattgaaccgattgcttcaagggtgccatacatgattgtgttaaccatgagagggattggcctggcactggttcattctacgggaacctcgacttcggtggagaatgtggtgtccctgtccaaactgtgttctacactccaactgaaaaccgtgcaaagttctggtacgcaacagattacgacatgtttagccttctgcattgctcacatggaagaggacttgagacccgggaccgagcagtacagattcatcgagcaatgccacattggcctcatgaagtttcacaatcacagtggtttttacaaggatttcagttcatggttgtacatagtttttttagttttttttttgaaaaatgaggcattttctttttaccggcggcggaggcgatggcaacaagcccttccctattcgaatctctgtgaccacagagcctacctcgctgagctcatcaccgagatcactggtgggatcaatgagctcgccgacgtagcacagttcttttgatgagggttgggcagaggctttaccttttgcgtcagacagtgctctctcacagcaattgtccttttgcctacctgtatcattctgtcatactatctgcaattcagctatgcacagaactatcaaaagcaagcaaagatgctctagagtacctgaggaaggctactttgtgctctataaggattgccaggaaagtgccagatttggcagagaacttcatgggcctggatgcatcattgttaaaggagaaacaccatgggtccttatatctgcaattcagctatgcacagaactatgcaaagcaagcaaagatgctctagagtacctgaggaagagctaggataaaactgttgattgttacagccctgggcaaggattgatgcttgctagcttcaagattaggaccctaccacttgatgagaacagatagtgctatactgctatgtacatctacatttctccagttatacataatcagatcttgcttctagccaactgttgcaaatacattgatcccttaggggttgagatggaaactgccacaagggagggaggacgtgagtcagctgcacgtgccgacatacacatcacttcctgcctcgctgtccttgatcgagacaaaatcagaagagctgtatctatatgtactccataccttgacgtatgcaggggctagatccataccccggcctatctgccctgtgaggaatgtatacttctgcaagtttgaatactttgacaccttgtgaggagcactctttgaaggtggagaaggtgttgttccaagggaagccagactaccaaaatgttatggttttttagcttctcaatagccggcgacagtgcatacgacctgccccgcgctggggctgtgtctgccttctcctccttcgatgccatgacactgtaaagtgaagccttcgagctaggcgcggaggccagggagatgctatgcgcccacatctaccacgccgccttcatattgctcaagctcgcgctccgcaactcctgccccatctgccgccatgagatgcccaccgatgctgccctgcgggctgccgccagcgtcggcgttgccgaacgcgccgccggggaggaacaagcgtgggatgcgccccacgcgcgcgactttcacctgcctcccaatttgatccgtgagttcaccaggaccagaacttcttcgatgatttgttggaccatccctgctgatacaaacacaatcattttgtggcaggaaatcaccatattagagcttacaaccttcgcatcaactgaagagtttgacactcatgatccaaaggagaacactttgctactcccttacttgaggaaaaggtcaaaaatcattgagatagttgcagcgcgtgatatagtctttgctctatcacagttaggagtatgtgctgcttttagtagcggtacgttcgccgaggacaagacaaaaccggatgctggtttccctctttttgactcaccatgtcaacatggcaatttcaggacccaacgtctctgcgagagaccttgggttcccttatccgaaggcaggcaccgctaagcctacagacgtggtggtgaagttctacgtcctctacgagaagtggcggaggggcgagctcctgggttcttcgtcagttgcgcggtacttgaaaagcatcactcattcgaacggtacgattattcatccttctggatcggagcgttctcttcatgcgtctgttgacgctctaagttcttgctacgtggacaaacagggcaacaagaatttccgggtgtgggtggacagactggtcacatcgccgatcggtacaagcaactggttggtgaggtttgataactgggagatggaaggtggcgttcggtactgctgccgcactactcttctgctgaataacaaggatcaaggtcgttgtcgtctccaggtccatcaaatgcgacaaggtcgagcgcacgcaattcagctccgaagtcatctcctttcaacagaaagatgcaagtaacaccaagtcacttgcctttgatggttgatacatttcactgtatatcattgcacgacagatccatttagtacctttttctgagttaaactacttcaaacattgctgaagactacaaccagttgttgtaattgaagcgggtcaagacatagcatttgcaaagatttagttcattctcatcactctgcaatattcgggttctctactatgtgtaatctcatatcaagattaatgagtatcgtgatcgtataattttgaatcctatcaacccatatggcaaggcaaagaaaaatgacagtggacatcattctagattttacaaaatcaaaggagcaaccagacatggctgtcatgatctaagatacttcaacgtgattggatcgaacccaaacatatgactaggagaagctccaaggccactttgtcaagggtctctgcaatgcacctactggtgcatgatttactggaggttgtgcgcatgaatgtgccacacattggtatgggggttggagttgaagcaggtgattttcaccaacattggtttgcgaactggagttgaagcaggagacatgattgttattcctatcatgtgcacactgcctcctcgctgtcatttgtcgtcactctcgtagtcctgataccggagcatggttgccaggggagagcagtccaaggcaaatttgccatgttggagcagtcacaggagccaaggggctgcagtcacaggtcctgctagccaggatggagcaatcataggacctcctagcagtccaaggaaaatttgcgaggtggagtagttgcaacttttgaaacccacgtgataacatgctcaagcgttcgtatgataaaaaagatggcacataatcaaaagaagatctcatgttctgcgtttgtgaacctgtttgtattttttgaacttgttttgtgaacctctatttgtaaacctgtaaaatctgaggttgtgaatagatttgggtaacttcatacaagtggtggaggcctggtggtaatcctggatgcatataaagcgaggcatgcaatatccatagcactcgtttgacagaaggcaacaccatcaaccttgtcctccacctttaaactagcatgagcaccatccttcttcacatttatattcatgtcccctatacgttc

SEQ ID NO: 206548 - DNA, 3527 bp, Zea Mays
aaaagagtgggcccaactgcgtttgtgagcagttctggtgctctgaattggcctaattaatgatcaagtggtcgtgttgtacctatcctagccgtgtttgcaggcctctcaaattgaaccgattgcttcaagggtgccatacatgattgtgttaaccatgagagggattggcctggcactggttcattctacgggaacctcgacttcggtggagaatgtggtgtccctgtccaaactgtgttctacactccaactgaaaaccgtgcaaagttctggtacgcaacagattacgacatgtttagccttctgcattgctcacatggaagaggacttgagacccgggaccgagcagtacagattcatcgagcaatgccacattggcctcatgaagtttcacaatcacagtggtttttacaaggatttcagttcatgggttgggcagaggctttaccttttgcgtcagacagtgctctcctatgcacagaactatcaaaagcaagcaaagatgctctagagtacctgaggaaggctactttgtgctctataaggattgccaggaaagtgccagatttggcagagaacttcatgggcctggatgcatcattgttaaaggagaaacaccatgggtccttatatctgcaattcagctatgcacagaactatgcaaagcaagcaaagatgctctagagtacctgaggaaggtaagggcatctatttcttaccacaaggccccaacaaatataagtatagaactacagagctaggataaaactgttgattgttacagccctgggcaaggattgatgcttgctagcttcaagattaggaccctaccacttgatgagaacagatagtgctatactgctatgtacatctacatttctccagttatacataatcagatcttgcttctagccaactgttgcaaatacattgatcccttaggggttgagatggaaactgccacaagggagggaggacgtgagtcagctgcacgtgccgacatacacatcacttcctgcctcgctgtccttgatcgagacaaaatcagaagagctgtatctatatgtactccataccttgacgtatgcaggggctagatccataccccggcctatctgccctgtgaggaatgtatacttctgcaagtttgaatactttgacaccttgtgaggagcactctttgaaggtggagaaggtgttgttccaagggaagccagactaccaaaatgttatggttttttagcttctcaatagccggcgacagtgcatacgacctgccccgcgctggggctgtgtctgccttctcctccttcgatgccatgacactgtaaagtgaagccttcgagctaggcgcggaggccagggagatgctatgcgcccacatctaccacgccgccttcatattgctcaagctcgcgctccgcaactcctgccccatctgccgccatgagatgcccaccgatgctgccctgcgggctgccgccagcgtcggcgttgccgaacgcgccgccggggaggaacaagcgtgggatgcgccccacgcgcgcgactttcacctgcctcccaatttgatccgtgagttcaccaggaccagaacttcttcgatgatttgttggaccatccctgctgatacaaacacaatcattttgtggcaggaaatcaccatattagagcttacaaccttcgcatcaactgaagagtttgacactcatgatccaaaggagaacactttgctactcccttacttgaggaaaaggtcaaaaatcattgagatagttgcagcgcgtgatatagtctttgctctatcacagttaggagtatgtgctgcttttagtagcggtacgttcgccgaggacaagacaaaaccggatgctggtttccctctttttgactcaccatgtcaacatggcaatttcaggacccaacgtctctgcgagagaccttgggttcccttatccgaaggcaggcaccgctaagcctacagacgtggtggtgaagttctacgtcctctacgagaagtggcggaggggcgagctcctgggttcttcgtcagttgcgcggtacttgaaaagcatcactcattcgaacggtacgattattcatccttctggatcggagcgttctcttcatgcgtctgttgacgctctaagttcttgctacgtggacaaacagggcaacaagaatttccgggtgtgggtggacagactggtcacatcgccgatcggtacaagcaactggttggtgaggtttgataactgggagatggaaggtggcgttcggtactgctgccgcactactcttctgctgaataacaaggatcaaggtcgttgtcgtctccaggtccatcaaatgcgacaaggtcgagcgcacgcaattcagctccgaagtcatctcctttcaacagaaagatgcaagtaacaccaagtcacttgcctttgatggttgatacatttcactgtatatcattgcacgacagatccatttagtacctttttctgagttaaactacttcaaacattgctgaagactacaaccagttgttgtaattgaagcgggtcaagacatagcatttgcaaagatttagttcattctcatcactctgcaatattcgggttctctactatgtgtaatctcatatcaagattaatgagtatcgtgatcgtataattttgaatcctatcaacccatatggcaaggcaaagaaaaatgacagtggacatcattctagattttacaaaatcaaaggagcaaccagacatggctgtcatgatctaagatacttcaacgtgattggatcgaacccaaacatatgactaggagaagctccaaggccactttgtcaagggtctctgcaatgcacctactggtgcatgatttactggaggttgtgcgcatgaatgtgccacacattggtatgggggttggagttgaagcaggagacatgattgttattcctatcatgtgcacactgcctcctcgctgtcatttgtcgtcactctcgtagtcctgataccggagcatggttgccaggggagagcagtccaaggcaaatttgccatgttggagcagtcacaggagccaaggggctgcagtcacaggtcctgctagccaggatggagcaatcataggacctcctagcagtccaaggaaaatttgcgaggtggagtagttgcaacttttgaaacccacgtgataacatgctcaagcgttcgtatgataaaaaagatggcacataatcaaaagaagatctcatgttctgcgtttgtgaacctgtttgtattttttgaacttgttttgtgaacctctatttgtaaacctgtaaaatctgaggttgtgaatagatttgggtaacttcatacaagtggtggaggcctggtggtaatcctggatgcatataaagcgaggcatgcaatatccatagcactcgtttgacagaaggcaacaccatcaaccttgtcctccacctttaaactagcatgagcaccatccttcttcacatttatattcatgtcccctatacgttc

SEQ ID NO: 206549 - DNA, 3617 bp, Zea Mays
aaaagagtgggcccaactgcgtttgtgagcagttctggtgctctgaattggcctaattaatgatcaagtggtcgtgttgtacctatcctagccgtgtttgcaggcctctcaaattgaaccgattgcttcaagggtgccatacatgattgtgttaaccatgagagggattggcctggcactggttcattctacgggaacctcgacttcggtggagaatgtggtgtccctgtccaaactgtgttctacactccaactgaaaaccgtgcaaagttctggtacgcaacagattacgacatgtttagccttctgcattgctcacatggaagaggacttgagacccgggaccgagcagtacagattcatcgagcaatgccacattggcctcatgaagtttcacaatcacagtggtttttacaaggatttcagttcatgggttgggcagaggctttaccttttgcgtcagacagtgctctcctatgcacagaactatcaaaagcaagcaaagatgctctagagtacctgaggaaggctactttgtgctctataaggattgccaggaaagtgccagatttggcagagaacttcatgggcctggatgcatcattgttaaaggagaaacaccatgggtccttatatctgcaattcagctatgcacagaactatgcaaagcaagcaaagatgctctagagtacctgaggaaggtaagggcatctatttcttaccacaaggccccaacaaatataagtatagaactacagagctaggataaaactgttgattgttacagccctgggcaaggattgatgcttgctagcttcaagattaggaccctaccacttgatgagaacagatagtgctatactgctatgtacatctacatttctccagttatacataatcagatcttgcttctagccaactgttgcaaatacattgatcccttaggggttgagatggaaactgccacaagggagggaggacgtgagtcagctgcacgtgccgacatacacatcacttcctgcctcgctgtccttgatcgagacaaaatcagaagagctgtatctatatgtactccataccttgacgtatgcaggggctagatccataccccggcctatctgccctgtgaggaatgtatacttctgcaagtttgaatactttgacaccttgtgaggagcactctttgaaggtggagaaggtgttgttccaagggaagccagactaccaaaatgttatggttttttagcttctcaatagccggcgacagtgcatacgacctgccccgcgctggggctgtgtctgccttctcctccttcgatgccatgacactgtaaagtgaagccttcgagctaggcgcggaggccagggagatgctatgcgcccacatctaccacgccgccttcatattgctcaagctcgcgctccgcaactcctgccccatctgccgccatgagatgcccaccgatgctgccctgcgggctgccgccagcgtcggcgttgccgaacgcgccgccggggaggaacaagcgtgggatgcgccccacgcgcgcgactttcacctgcctcccaatttgatccgtgagttcaccaggaccagaacttcttcgatgatttgttggaccatccctgctgatacaaacacaatcattttgtggcaggaaatcaccatattagagcttacaaccttcgcatcaactgaagagtttgacactcatgatccaaaggagaacactttgctactcccttacttgaggaaaaggtcaaaaatcattgagatagttgcagcgcgtgatatagtctttgctctatcacagttaggagtatgtgctgcttttagtagcggtacgttcgccgaggacaagacaaaaccggatgctggtttccctctttttgactcaccatgtcaacatggcaatttcaggacccaacgtctctgcgagagaccttgggttcccttatccgaaggcaggcaccgctaagcctacagacgtggtggtgaagttctacgtcctctacgagaagtggcggaggggcgagctcctgggttcttcgtcagttgcgcggtacttgaaaagcatcactcattcgaacggtacgattattcatccttctggatcggagcgttctcttcatgcgtctgttgacgctctaagttcttgctacgtggacaaacagggcaacaagaatttccgggtgtgggtggacagactggtcacatcgccgatcggtacaagcaactggttggtgaggtttgataactgggagatggaaggtggcgttcggtactgctgccgcactactcttctgctgaataacaaggttccaaaagaactagaagtacagattggttgaacttcaaacaaatacaaagagctatgcatacaagtggtggaggcctggtggatcaaggtcgttgtcgtctccaggtccatcaaatgcgacaaggtcgagcgcacgcaattcagctccgaagtcatctcctttcaacagaaagatgcaagtaacaccaagtcacttgcctttgatggttgatacatttcactgtatatcattgcacgacagatccatttagtacctttttctgagttaaactacttcaaacattgctgaagactacaaccagcctacagttgttgtaattgaagcgggtcaagacatagcatttgcaaagatttagttcattctcatcactctgcaatattcgggttctctactatgtgtaatctcatatcaagattaatgagtatcgtgatcgtataattttgaatcctatcaacccatatggcaaggcaaagaaaaatgacagtggacatcattctagattttacaaaatcaaaggagcaaccagacatggctgtcatgatctaagatacttcaacgtgattggatcgaacccaaacatatgactaggagaagctccaaggccactttgtcaagggtctctgcaatgcacctactggtgcatgatttactggaggttgtgcgcatgaatgtgccacacattggtatgggggttggagttgaagcaggagacatgattgttattcctatcatgtgcacactgcctcctcgctgtcatttgtcgtcactctcgtagtcctgataccggagcatggttgccaggggagagcagtccaaggcaaatttgccatgttggagcagtcacaggagccaaggggctgcagtcacaggtcctgctagccaggatggagcaatcataggacctcctagcagtccaaggaaaatttgcgaggtggagtagttgcaacttttgaaacccacgtgataacatgctcaagcgttcgtatgataaaaaagatggcacataatcaaaagaagatctcatgttctgcgtttgtgaacctgtttgtattttttgaacttgttttgtgaacctctatttgtaaacctgtaaaatctgaggttgtgaatagatttgggtaacttcatacaagtggtggaggcctggtggtaatcctggatgcatataaagcgaggcatgcaatatccatagcactcgtttgacagaaggcaacaccatcaaccttgtcctccacctttaaactagcatgagcaccatccttcttcacatttatattcatgtcccctatacgttc

SEQ ID NO: 206550 - DNA, 4665 bp, Zea Mays
cgcagacatcacgctccctccccatgaaacccccttcccccaatctacccctctctgtgcccccgacatccacgctgcctcagcccgccgtccagcgccctctctgcgcctccctccccacaccgcctcagcccgccgttcgccacgctccccacgctgcctccccccgtcgcccctccctcccgcgcggaactccgccatgctccccacgtcgcctccccccatcgcccaccagccgtcgcccaccagcccacactatctcacgccatggatggtggcaacagtccccgcccccgtacctcacacgcatcaggctgggctggccgatcccgccgccgcaaacgccgcgcccagccccgatgtcagcgcggcccgcccgccaacgcactttcggcctccccccgcccctcccttcgcccgcccacccgcaacctccgcgccatccgcaacctccgcccgcttctcacgccaccgacccgacctccgcgccatccgcaaccgtcgtgcgtcttatcccttctctaccgcgcactccgtgtggaacaacctccgcgtaggaagcctcctcccttccccatccccattccccaccacgcgcttcggggacggcgagctccgggcgggagcgaccgccgggcgcttctgctgctggtgcggaggaggaggagcggcgagggtggttcggcgcaggctccacggcggcggtgcccgagccgagttcgactggctggcgctctactgcaacctcacacgcggcgatgggccggacggtaacaatggcaagctggtcctggaggagctgctgtcgtgcgccgccacccaattttgttttccccaaatcctgagctgtgaagagaagaagaagacaaggacgcggcgagtacgatgacgagcgccgcacagcaagtcagcgaggagcacgatgacgcgatgaggaccacgagctgccgaggaagtcaaggacgacgacggcgcagagacccgcgagttgagacatcttcttcgccggcgtgaaccgcaaggctgagacatcttcttcgccgggttcggccacgccgacaccaccgacccgatgtacctatcctagccgtgtttgcaggcctctcaaattgaaccgattgcttcaagggtgccatacatgattgtgttaaccatgagagggattggcctggcactggttcattctacgggaacctcgacttcggtggagaatgtggtgtccctgtccaaactgtgttctacactccaactgaaaaccgtgcaaagttctggtacgcaacagattacgacatgtttagccttctgcattgctcacatggaagaggacttgagacccgggaccgagcagtacagattcatcgagcaatgccacattggcctcatgaagtttcacaatcacagtggtttttacaaggatttcagttcatgggttgggcagaggctttaccttttgcgtcagacagtgctctctcacagcaattgtccttttgcctacctgtatcattctgtcatactatctgcaattcagctatgcacagaactatcaaaagcaagcaaagatgctctagagtacctgaggaaggctactttgtgctctataaggattgccaggaaagtgccagatttggcagagaacttcatgggcctggatgcatcattgttaaaggagaaacaccatgggtccttatatctgcaattcagctatgcacagaactatgcaaagcaagcaaagatgctctagagtacctgaggaaggtaagggcatctatttcttaccacaaggccccaacaaatataagtatagaactacagttgcaaatacattgatcccttaggggttgagatggaaactgccacaagggagggaggacgtgagtcagctgcacgtgccgacatacacatcacttcctgcctcgctgtccttgatcgagacaaaatcagaagagctgtatctatatgtactccataccttgacgtatgcaggggctagatccataccccggcctatctgccctgtgaggaatgtatacttctgcaagtttgaatactttgacaccttgtgaggagcactctttgaaggtggagaaggtgttgttccaagggaagccagactaccaaaatgttatggttttttagcttctcaatagccggcgacagtgcatacgacctgccccgcgctggggctgtgtctgccttctcctccttcgatgccatgacactgtaaagtgaagccttcgagctaggcgcggaggccagggagatgctatgcgcccacatctaccacgccgccttcatattgctcaagctcgcgctccgcaactcctgccccatctgccgccatgagatgcccaccgatgctgccctgcgggctgccgccagcgtcggcgttgccgaacgcgccgccggggaggaacaagcgtgggatgcgccccacgcgcgcgactttcacctgcctcccaatttgatccgtgagttcaccaggaccagaacttcttcgatgatttgttggaccatccctgctgatacaaacacaatcattttgtggcaggaaatcaccatattagagcttacaaccttcgcatcaactgtttgtgcagcaatgagtttatcttaagttatgtttttttggtaatatcggttgactgcacttaagttctaataaagcatctttgatgtcacttgtaggaagagtttgacactcatgatccaaaggagaacactttgctactcccttacttgaggaaaaggtcaaaaatcattgagatagttgcagcgcgtgatatagtctttgctctatcacagttaggagtatgtgctgcttttagtagcggtacgttcgccgaggacaagacaaaaccggatgctggtttccctctttttgactcaccatgtcaacatggcaatttcaggacccaacgtctctgcgagagaccttgggttcccttatccgaaggcaggcaccgctaagcctacagacgtggtggtgaagttctacgtcctctacgagaagtggcggaggggcgagctcctgggttcttcgtcagttgcgcggtacttgaaaagcatcactcattcgaacggtacgattattcatccttctggatcggagcgttctcttcatgcgtctgttgacgctctaagttcttgctacgtggacaaacagggcaacaagaatttccgggtgtgggtggacagactggtcacatcgccgatcggtacaagcaactggttggtgaggtttgataactgggagatggaaggtggcgttcggtactgctgccgcactactcttctgctgaataacaaggttccaaaagaactagaagtacagattggttgaacttcaaacaaatacaaagagctatgcatacaagtggtggaggcctggtggtaaattgtttatcaagatcgctagagcagttaaatttactcctattatcttctgggatagatttgggatcaaggtcgttgtcgtctccaggtccatcaaatgcgacaaggtcgagcgcacgcaattcagctccgaagtcatctcctttcaacagaaagatgcaagtaacaccaagtcacttgcctttgatggttgatacatttcactgtatatcattgcacgacagatccatttagtacctttttctgagttaaactacttcaaacattgctgaagactacaaccagttgttgtaattgaagcgggtcaagacatagcatttgcaaagatttagttcattctcatcactctgcaatattcgggttctctactatgtgtaatctcatatcaagattaatgagtatcgtgatcgtataattttgaatcctatcaacccatatggcaaggcaaagaaaaatgacagtggacatcattctagattttacaaaatcaaaggagcaaccagacatggctgtcatgatctaagatacttcaacgtgattggatcgaacccaaacatatgactaggagaagctccaaggccactttgtcaagggtctctgcaatgcacctactggtgcatgatttactggaggttgtgcgcatgaatgtgccacacattggtatgggggttggagttgaagcaggagacatgattgttattcctatcatgtgcacactgcctcctcgctgtcatttgtcgtcactctcgtagtcctgataccggagcatggttgccaggggagagcagtccaaggcaaatttgccatgttggagcagtcacaggagccaaggggctgcagtcacaggtcctgctagccaggatggagcaatcataggacctcctagcagtccaaggaaaatttgcgaggtggagtagttgcaacttttgaaacccacgtgataacatgctcaagcgttcgtatgataaaaaagatggcacataatcaaaagaagatctcatgttctgcgtttgtgaacctgtttgtattttttgaacttgttttgtgaacctctatttgtaaacctgtaaaatctgaggttgtgaatagatttgggtaacttcatacaagtggtggaggcctggtggtaatcctggatgcatataaagcgaggcatgcaatatccatagcactcgtttgacagaaggcaacaccatcaaccttgtcctccacctttaaactagcatgagcaccatccttcttcacatttatattcatgtcccctatacgttc

SEQ ID NO: 206551 - DNA, 4805 bp, Zea Mays
cgcagacatcacgctccctccccatgaaacccccttcccccaatctacccctctctgtgcccccgacatccacgctgcctcagcccgccgtccagcgccctctctgcgcctccctccccacaccgcctcagcccgccgttcgccacgctccccacgctgcctccccccgtcgcccctccctcccgcgcggaactccgccatgctccccacgtcgcctccccccatcgcccaccagccgtcgcccaccagcccacactatctcacgccatggatggtggcaacagtccccgcccccgtacctcacacgcatcaggctgggctggccgatcccgccgccgcaaacgccgcgcccagccccgatgtcagcgcggcccgcccgccaacgcactttcggcctccccccgcccctcccttcgcccgcccacccgcaacctccgcgccatccgcaacctccgcccgcttctcacgccaccgacccgacctccgcgccatccgcaaccgtcgtgcgtcttatcccttctctaccgcgcactccgtgtggaacaacctccgcgtaggaagcctcctcccttccccatccccattccccaccacgcgcttcggggacggcgagctccgggcgggagcgaccgccgggcgcttctgctgctggtgcggaggaggaggagcggcgagggtggttcggcgcaggctccacggcggcggtgcccgagccgagttcgactggctggcgctctactgcaacctcacacgcggcgatgggccggacggtaacaatggcaagctggtcctggaggagctgctgtcgtgcgccgccacccaattttgttttccccaaatcctgagctgtgaagagaagaagaagacaaggacgcggcgagtacgatgacgagcgccgcacagcaagtcagcgaggagcacgatgacgcgatgaggaccacgagctgccgaggaagtcaaggacgacgacggcgcagagacccgcgagttgagacatcttcttcgccggcgtgaaccgcaaggctgagacatcttcttcgccgggttcggccacgccgacaccaccgacccgatgtacctatcctagccgtgtttgcaggcctctcaaattgaaccgattgcttcaagggtgccatacatgattgtgttaaccatgagagggattggcctggcactggttcattctacgggaacctcgacttcggtggagaatgtggtgtccctgtccaaactgtgttctacactccaactgaaaaccgtgcaaagttctggtacgcaacagattacgacatgtttagccttctgcattgctcacatggaagaggacttgagacccgggaccgagcagtacagattcatcgagcaatgccacattggcctcatgaagtttcacaatcacagtggtttttacaaggatttcagttcatggttgtacatagtttttttagttttttttttgaaaaatgaggcattttctttttaccggcggcggaggcgatggcaacaagcccttccctattcgaatctctgtgaccacagagcctacctcgctgagctcatcaccgagatcactggtgggatcaatgagctcgccgacgtagcacagttcttttgatgagagtggttcaactctattttgcttggttcagtggagatggtagcatggtgaaggataatgcctacgtgcgcagcaattttcatttttcttttagtttcttggagtcgtggaaatctcgctattcacaaggatttcatggcggcgttgttaatttgggggttgggcagaggctttaccttttgcgtcagacagtgctctctcacagcaattgtccttttgcctacctgtatcattctgtcatactatctgcaattcagctatgcacagaactatcaaaagcaagcaaagatgctctagagtacctgaggaaggctactttgtgctctataaggattgccaggaaagtgccagatttggcagagaacttcatgggcctggatgcatcattgttaaaggagaaacaccatgggtccttatatctgcaattcagctatgcacagaactatgcaaagcaagcaaagatgctctagagtacctgaggaagttgcaaatacattgatcccttaggggttgagatggaaactgccacaagggagggaggacgtgagtcagctgcacgtgccgacatacacatcacttcctgcctcgctgtccttgatcgagacaaaatcagaagagctgtatctatatgtactccataccttgacgtatgcaggggctagatccataccccggcctatctgccctgtgaggaatgtatacttctgcaagtttgaatactttgacaccttgtgaggagcactctttgaaggtggagaaggtgttgttccaagggaagccagactaccaaaatgttatggttttttagcttctcaatagccggcgacagtgcatacgacctgccccgcgctggggctgtgtctgccttctcctccttcgatgccatgacactgtaaagtgaagccttcgagctaggcgcggaggccagggagatgctatgcgcccacatctaccacgccgccttcatattgctcaagctcgcgctccgcaactcctgccccatctgccgccatgagatgcccaccgatgctgccctgcgggctgccgccagcgtcggcgttgccgaacgcgccgccggggaggaacaagcgtgggatgcgccccacgcgcgcgactttcacctgcctcccaatttgatccgtgagttcaccaggaccaggcttctatgcttacatattcagtgctgttcgctcgtgctgtatctgtggccgcgtgagcaggaaatcaccatattagagcttacaaccttcgcatcaactgtttgtgcagcaatgagtttatcttaagttatgtttttttggtaatatcggttgactgcacttaagttctaataaagcatctttgatgtcacttgtaggaagagtttgacactcatgatccaaaggagaacactttgctactcccttacttgaggaaaaggtcaaaaatcattgagatagttgcagcgcgtgatatagtctttgctctatcacagttaggagtatgtgctgcttttagtagcggtacgttcgccgaggacaagacaaaaccggatgctggtttccctctttttgactcaccatgtcaacatggcaatttcaggacccaacgtctctgcgagagaccttgggttcccttatccgaaggcaggcaccgctaagcctacagacgtggtggtgaagttctacgtcctctacgagaagtggcggaggggcgagctcctgggttcttcgtcagttgcgcggtacttgaaaagcatcactcattcgaacggtacgattattcatccttctggatcggagcgttctcttcatgcgtctgttgacgctctaagttcttgctacgtggacaaacagggcaacaagaatttccgggtgtgggtggacagactggtcacatcgccgatcggtacaagcaactggttggtgaggtttgataactgggagatggaaggtggcgttcggtactgctgccgcactactcttctgctgaataacaaggatcaaggtcgttgtcgtctccaggtccatcaaatgcgacaaggtcgagcgcacgcaattcagctccgaagtcatctcctttcaacagaaagatgcaagtaacaccaagtcacttgcctttgatggttgatacatttcactgtatatcattgcacgacagatccatttagtacctttttctgagttaaactacttcaaacattgctgaagactacaaccagttgttgtaattgaagcgggtcaagacatagcatttgcaaagatttagttcattctcatcactctgcaatattcgggttctctactatgtgtaatctcatatcaagattaatgagtatcgtgatcgtataattttgaatcctatcaacccatatggcaaggcaaagaaaaatgacagtggacatcattctagattttacaaaatcaaaggagcaaccagacatggctgtcatgatctaagatacttcaacgtgattggatcgaacccaaacatatgactaggagaagctccaaggccactttgtcaagggtctctgcaatgcacctactggtgcatgatttactggaggttgtgcgcatgaatgtgccacacattggtatgggggttggagttgaagcaggagacatgattgttattcctatcatgtgcacactgcctcctcgctgtcatttgtcgtcactctcgtagtcctgataccggagcatggttgccaggggagagcagtccaaggcaaatttgccatgttggagcagtcacaggagccaaggggctgcagtcacaggtcctgctagccaggatggagcaatcataggacctcctagcagtccaaggaaaatttgcgaggtggagtagttgcaacttttgaaacccacgtgataacatgctcaagcgttcgtatgataaaaaagatggcacataatcaaaagaagatctcatgttctgcgtttgtgaacctgtttgtattttttgaacttgttttgtgaacctctatttgtaaacctgtaaaatctgaggttgtgaatagatttgggtaacttcatacaagtggtggaggcctggtggtaatcctggatgcatataaagcgaggcatgcaatatccatagcactcgtttgacagaaggcaacaccatcaaccttgtcctccacctttaaactagcatgagcaccatccttcttcacatttatattcatgtcccctatacgttc

SEQ ID NO: 206552 - DNA, 4841 bp, Zea Mays
cgcagacatcacgctccctccccatgaaacccccttcccccaatctacccctctctgtgcccccgacatccacgctgcctcagcccgccgtccagcgccctctctgcgcctccctccccacaccgcctcagcccgccgttcgccacgctccccacgctgcctccccccgtcgcccctccctcccgcgcggaactccgccatgctccccacgtcgcctccccccatcgcccaccagccgtcgcccaccagcccacactatctcacgccatggatggtggcaacagtccccgcccccgtacctcacacgcatcaggctgggctggccgatcccgccgccgcaaacgccgcgcccagccccgatgtcagcgcggcccgcccgccaacgcactttcggcctccccccgcccctcccttcgcccgcccacccgcaacctccgcgccatccgcaacctccgcccgcttctcacgccaccgacccgacctccgcgccatccgcaaccgtcgtgcgtcttatcccttctctaccgcgcactccgtgtggaacaacctccgcgtaggaagcctcctcccttccccatccccattccccaccacgcgcttcggggacggcgagctccgggcgggagcgaccgccgggcgcttctgctgctggtgcggaggaggaggagcggcgagggtggttcggcgcaggctccacggcggcggtgcccgagccgagttcgactggctggcgctctactgcaacctcacacgcggcgatgggccggacggtaacaatggcaagctggtcctggaggagctgctgtcgtgcgccgccacccaattttgttttccccaaatcctgagctgtgaagagaagaagaagacaaggacgcggcgagtacgatgacgagcgccgcacagcaagtcagcgaggagcacgatgacgcgatgaggaccacgagctgccgaggaagtcaaggacgacgacggcgcagagacccgcgagttgagacatcttcttcgccggcgtgaaccgcaaggctgagacatcttcttcgccgggttcggccacgccgacaccaccgacccgatccgtgtttgcaggcctctcaaattgaaccgattgcttcaagggtgccatacatgattgtgttaaccatgagagggattggcctggcactggttcattctacgggaacctcgacttcggtggagaatgtggtgtccctgtccaaactgtgttctacactccaactgaaaaccgtgcaaagttctggtacgcaacagattacgacatgtttagccttctgcattgctcacatggaagaggacttgagacccgggaccgagcagtacagattcatcgagcaatgccacattggcctcatgaagtttcacaatcacagtggtttttacaaggatttcagttcatggttgtacatagtttttttagttttttttttgaaaaatgaggcattttctttttaccggcggcggaggcgatggcaacaagcccttccctattcgaatctctgtgaccacagagcctacctcgctgagctcatcaccgagatcactggtgggatcaatgagctcgccgacgtagcacagttcttttgatgagagtggttcaactctattttgcttggttcagtggagatggtagcatggtgaaggataatgcctacgtgcgcagcaattttcatttttcttttagtttcttggagtcgtggaaatctcgctattcacaaggatttcatggcggcgttgttaatttgggggttgggcagaggctttaccttttgcgtcagacagtgctctctcacagcaattgtccttttgcctacctgtatcattctgtcatactatctgcaattcagctatgcacagaactatcaaaagcaagcaaagatgctctagagtacctgaggaaggctactttgtgctctataaggattgccaggaaagtgccagatttggcagagaacttcatgggcctggatgcatcattgttaaaggagaaacaccatgggtccttatatctgcaattcagctatgcacagaactatgcaaagcaagcaaagatgctctagagtacctgaggaaggtaagggcatctatttcttaccacaaggccccaacaaatataagtatagaactacagttgcaaatacattgatcccttaggggttgagatggaaactgccacaagggagggaggacgtgagtcagctgcacgtgccgacatacacatcacttcctgcctcgctgtccttgatcgagacaaaatcagaagagctgtatctatatgtactccataccttgacgtatgcaggggctagatccataccccggcctatctgccctgtgaggaatgtatacttctgcaagtttgaatactttgacaccttgtgaggagcactctttgaaggtggagaaggtgttgttccaagggaagccagactaccaaaatgttatggttttttagcttctcaatagccggcgacagtgcatacgacctgccccgcgctggggctgtgtctgccttctcctccttcgatgccatgacactgtaaagtgaagccttcgagctaggcgcggaggccagggagatgctatgcgcccacatctaccacgccgccttcatattgctcaagctcgcgctccgcaactcctgccccatctgccgccatgagatgcccaccgatgctgccctgcgggctgccgccagcgtcggcgttgccgaacgcgccgccggggaggaacaagcgtgggatgcgccccacgcgcgcgactttcacctgcctcccaatttgatccgtgagttcaccaggaccagaacttcttcgatgatttgttggaccatccctgctgatacaaacacaatcattttgtggcaggaaatcaccatattagagcttacaaccttcgcatcaactgaagagtttgacactcatgatccaaaggagaacactttgctactcccttacttgaggaaaaggtcaaaaatcattgagatagttgcagcgcgtgatatagtctttgctctatcacagttaggagtatgtgctgcttttagtagcggtacgttcgccgaggacaagacaaaaccggatgctggtttccctctttttgactcaccatgtcaacatggcaatttcaggacccaacgtctctgcgagagaccttgggttcccttatccgaaggcaggcaccgctaagcctacagacgtggtggtgaagttctacgtcctctacgagaagtggcggaggggcgagctcctgggttcttcgtcagttgcgcggtacttgaaaagcatcactcattcgaacggtacgattattcatccttctggatcggagcgttctcttcatgcgtctgttgacgctctaagttcttgctacgtggacaaacagggcaacaagaatttccgggtgtgggtggacagactggtcacatcgccgatcggtacaagcaactggttggtgaggtttgataactgggagatggaaggtggcgttcggtactgctgccgcactactcttctgctgaataacaaggttccaaaagaactagaagtacagattggttgaacttcaaacaaatacaaagagctatgcatacaagtggtggaggcctggtggatcaaggtcgttgtcgtctccaggtccatcaaatgcgacaaggtcgagcgcacgcaattcagctccgaagtcatctcctttcaacagaaagatgcaagtaacaccaagtcacttgcctttgatggttgatacatttcactgtatatcattgcacgacagatccatttagtacctttttctgagttaaactacttcaaacattgctgaagactacaaccagcctacagttgttgtaattgaagcgggtcaagacatagcatttgcaaagatttagttcattctcatcactctgcaatattcgggttctctactatgtgtaatctcatatcaagattaatgagtatcgtgatcgtataattttgaatcctatcaacccatatggcaaggcaaagaaaaatgacagtggacatcattctagattttacaaaatcaaaggagcaaccagacatggctgtcatgatctaagatacttcaacgtgattggatcgaacccaaacatatgactaggagaagctccaaggccactttgtcaagggtctctgcaatgcacctactggtgcatgatttactggaggttgtgcgcatgaatgtgccacacattggtatgggggttggagttgaagcaggagacatgattgttattcctatcatgtgcacactgcctcctcgctgtcatttgtcgtcactctcgtagtcctgataccggagcatggttgccaggggagagcagtccaaggcaaatttgccatgttggagcagtcacaggagccaaggggctgcagtcacaggtcctgctagccaggatggagcaatcataggacctcctagcagtccaaggaaaatttgcgaggtggagtagttgcaacttttgaaacccacgtgataacatgctcaagcgttcgtatgataaaaaagatggcacataatcaaaagaagatctcatgttctgcgtttgtgaacctgtttgtattttttgaacttgttttgtgaacctctatttgtaaacctgtaaaatctgaggttgtgaatagatttgggtaacttcatacaagtggtggaggcctggtggtaatcctggatgcatataaagcgaggcatgcaatatccatagcactcgtttgacagaaggcaacaccatcaaccttgtcctccacctttaaactagcatgagcaccatccttcttcacatttatattcatgtcccctatacgttc

SEQ ID NO: 206553 - DNA, 4895 bp, Zea Mays
cgcagacatcacgctccctccccatgaaacccccttcccccaatctacccctctctgtgcccccgacatccacgctgcctcagcccgccgtccagcgccctctctgcgcctccctccccacaccgcctcagcccgccgttcgccacgctccccacgctgcctccccccgtcgcccctccctcccgcgcggaactccgccatgctccccacgtcgcctccccccatcgcccaccagccgtcgcccaccagcccacactatctcacgccatggatggtggcaacagtccccgcccccgtacctcacacgcatcaggctgggctggccgatcccgccgccgcaaacgccgcgcccagccccgatgtcagcgcggcccgcccgccaacgcactttcggcctccccccgcccctcccttcgcccgcccacccgcaacctccgcgccatccgcaacctccgcccgcttctcacgccaccgacccgacctccgcgccatccgcaaccgtcgtgcgtcttatcccttctctaccgcgcactccgtgtggaacaacctccgcgtaggaagcctcctcccttccccatccccattccccaccacgcgcttcggggacggcgagctccgggcgggagcgaccgccgggcgcttctgctgctggtgcggaggaggaggagcggcgagggtggttcggcgcaggctccacggcggcggtgcccgagccgagttcgactggctggcgctctactgcaacctcacacgcggcgatgggccggacggtaacaatggcaagctggtcctggaggagctgctgtcgtgcgccgccacccaattttgttttccccaaatcctgagctgtgaagagaagaagaagacaaggacgcggcgagtacgatgacgagcgccgcacagcaagtcagcgaggagcacgatgacgcgatgaggaccacgagctgccgaggaagtcaaggacgacgacggcgcagagacccgcgagttgagacatcttcttcgccggcgtgaaccgcaaggctgagacatcttcttcgccgggttcggccacgccgacaccaccgacccgatgtacctatcctagccgtgtttgcaggcctctcaaattgaaccgattgcttcaagggtgccatacatgattgtgttaaccatgagagggattggcctggcactggttcattctacgggaacctcgacttcggtggagaatgtggtgtccctgtccaaactgtgttctacactccaactgaaaaccgtgcaaagttctggtacgcaacagattacgacatgtttagccttctgcattgctcacatggaagaggacttgagacccgggaccgagcagtacagattcatcgagcaatgccacattggcctcatgaagtttcacaatcacagtggtttttacaaggatttcagttcatggttgtacatagtttttttagttttttttttgaaaaatgaggcattttctttttaccggcggcggaggcgatggcaacaagcccttccctattcgaatctctgtgaccacagagcctacctcgctgagctcatcaccgagatcactggtgggatcaatgagctcgccgacgtagcacagttcttttgatgagagtggttcaactctattttgcttggttcagtggagatggtagcatggtgaaggataatgcctacgtgcgcagcaattttcatttttcttttagtttcttggagtcgtggaaatctcgctattcacaaggatttcatggcggcgttgttaatttgggggttgggcagaggctttaccttttgcgtcagacagtgctctctcacagcaattgtccttttgcctacctgtatcattctgtcatactatctgcaattcagctatgcacagaactatcaaaagcaagcaaagatgctctagagtacctgaggaaggctactttgtgctctataaggattgccaggaaagtgccagatttggcagagaacttcatgggcctggatgcatcattgttaaaggagaaacaccatgggtccttatatctgcaattcagctatgcacagaactatgcaaagcaagcaaagatgctctagagtacctgaggaagttgcaaatacattgatcccttaggggttgagatggaaactgccacaagggagggaggacgtgagtcagctgcacgtgccgacatacacatcacttcctgcctcgctgtccttgatcgagacaaaatcagaagagctgtatctatatgtactccataccttgacgtatgcaggggctagatccataccccggcctatctgccctgtgaggaatgtatacttctgcaagtttgaatactttgacaccttgtgaggagcactctttgaaggtggagaaggtgttgttccaagggaagccagactaccaaaatgttatggttttttagcttctcaatagccggcgacagtgcatacgacctgccccgcgctggggctgtgtctgccttctcctccttcgatgccatgacactgtaaagtgaagccttcgagctaggcgcggaggccagggagatgctatgcgcccacatctaccacgccgccttcatattgctcaagctcgcgctccgcaactcctgccccatctgccgccatgagatgcccaccgatgctgccctgcgggctgccgccagcgtcggcgttgccgaacgcgccgccggggaggaacaagcgtgggatgcgccccacgcgcgcgactttcacctgcctcccaatttgatccgtgagttcaccaggaccaggcttctatgcttacatattcagtgctgttcgctcgtgctgtatctgtggccgcgtgagcaggaaatcaccatattagagcttacaaccttcgcatcaactgtttgtgcagcaatgagtttatcttaagttatgtttttttggtaatatcggttgactgcacttaagttctaataaagcatctttgatgtcacttgtaggaagagtttgacactcatgatccaaaggagaacactttgctactcccttacttgaggaaaaggtcaaaaatcattgagatagttgcagcgcgtgatatagtctttgctctatcacagttaggagtatgtgctgcttttagtagcggtacgttcgccgaggacaagacaaaaccggatgctggtttccctctttttgactcaccatgtcaacatggcaatttcaggacccaacgtctctgcgagagaccttgggttcccttatccgaaggcaggcaccgctaagcctacagacgtggtggtgaagttctacgtcctctacgagaagtggcggaggggcgagctcctgggttcttcgtcagttgcgcggtacttgaaaagcatcactcattcgaacggtacgattattcatccttctggatcggagcgttctcttcatgcgtctgttgacgctctaagttcttgctacgtggacaaacagggcaacaagaatttccgggtgtgggtggacagactggtcacatcgccgatcggtacaagcaactggttggtgaggtttgataactgggagatggaaggtggcgttcggtactgctgccgcactactcttctgctgaataacaaggttccaaaagaactagaagtacagattggttgaacttcaaacaaatacaaagagctatgcatacaagtggtggaggcctggtggatcaaggtcgttgtcgtctccaggtccatcaaatgcgacaaggtcgagcgcacgcaattcagctccgaagtcatctcctttcaacagaaagatgcaagtaacaccaagtcacttgcctttgatggttgatacatttcactgtatatcattgcacgacagatccatttagtacctttttctgagttaaactacttcaaacattgctgaagactacaaccagcctacagttgttgtaattgaagcgggtcaagacatagcatttgcaaagatttagttcattctcatcactctgcaatattcgggttctctactatgtgtaatctcatatcaagattaatgagtatcgtgatcgtataattttgaatcctatcaacccatatggcaaggcaaagaaaaatgacagtggacatcattctagattttacaaaatcaaaggagcaaccagacatggctgtcatgatctaagatacttcaacgtgattggatcgaacccaaacatatgactaggagaagctccaaggccactttgtcaagggtctctgcaatgcacctactggtgcatgatttactggaggttgtgcgcatgaatgtgccacacattggtatgggggttggagttgaagcaggagacatgattgttattcctatcatgtgcacactgcctcctcgctgtcatttgtcgtcactctcgtagtcctgataccggagcatggttgccaggggagagcagtccaaggcaaatttgccatgttggagcagtcacaggagccaaggggctgcagtcacaggtcctgctagccaggatggagcaatcataggacctcctagcagtccaaggaaaatttgcgaggtggagtagttgcaacttttgaaacccacgtgataacatgctcaagcgttcgtatgataaaaaagatggcacataatcaaaagaagatctcatgttctgcgtttgtgaacctgtttgtattttttgaacttgttttgtgaacctctatttgtaaacctgtaaaatctgaggttgtgaatagatttgggtaacttcatacaagtggtggaggcctggtggtaatcctggatgcatataaagcgaggcatgcaatatccatagcactcgtttgacagaaggcaacaccatcaaccttgtcctccacctttaaactagcatgagcaccatccttcttcacatttatattcatgtcccctatacgttc

SEQ ID NO: 206554 - DNA, 4912 bp, Zea Mays
cgcagacatcacgctccctccccatgaaacccccttcccccaatctacccctctctgtgcccccgacatccacgctgcctcagcccgccgtccagcgccctctctgcgcctccctccccacaccgcctcagcccgccgttcgccacgctccccacgctgcctccccccgtcgcccctccctcccgcgcggaactccgccatgctccccacgtcgcctccccccatcgcccaccagccgtcgcccaccagcccacactatctcacgccatggatggtggcaacagtccccgcccccgtacctcacacgcatcaggctgggctggccgatcccgccgccgcaaacgccgcgcccagccccgatgtcagcgcggcccgcccgccaacgcactttcggcctccccccgcccctcccttcgcccgcccacccgcaacctccgcgccatccgcaacctccgcccgcttctcacgccaccgacccgacctccgcgccatccgcaaccgtcgtgcgtcttatcccttctctaccgcgcactccgtgtggaacaacctccgcgtaggaagcctcctcccttccccatccccattccccaccacgcgcttcggggacggcgagctccgggcgggagcgaccgccgggcgcttctgctgctggtgcggaggaggaggagcggcgagggtggttcggcgcaggctccacggcggcggtgcccgagccgagttcgactggctggcgctctactgcaacctcacacgcggcgatgggccggacggtaacaatggcaagctggtcctggaggagctgctgtcgtgcgccgccacccaattttgttttccccaaatcctgagctgtgaagagaagaagaagacaaggacgcggcgagtacgatgacgagcgccgcacagcaagtcagcgaggagcacgatgacgcgatgaggaccacgagctgccgaggaagtcaaggacgacgacggcgcagagacccgcgagttgagacatcttcttcgccggcgtgaaccgcaaggctgagacatcttcttcgccgggttcggccacgccgacaccaccgacccgatccgtgtttgcaggcctctcaaattgaaccgattgcttcaagggtgccatacatgattgtgttaaccatgagagggattggcctggcactggttcattctacgggaacctcgacttcggtggagaatgtggtgtccctgtccaaactgtgttctacactccaactgaaaaccgtgcaaagttctggtacgcaacagattacgacatgtttagccttctgcattgctcacatggaagaggacttgagacccgggaccgagcagtacagattcatcgagcaatgccacattggcctcatgaagtttcacaatcacagtggtttttacaaggatttcagttcatggttgtacatagtttttttagttttttttttgaaaaatgaggcattttctttttaccggcggcggaggcgatggcaacaagcccttccctattcgaatctctgtgaccacagagcctacctcgctgagctcatcaccgagatcactggtgggatcaatgagctcgccgacgtagcacagttcttttgatgagagtggttcaactctattttgcttggttcagtggagatggtagcatggtgaaggataatgcctacgtgcgcagcaattttcatttttcttttagtttcttggagtcgtggaaatctcgctattcacaaggatttcatggcggcgttgttaatttgggggttgggcagaggctttaccttttgcgtcagacagtgctctctcacagcaattgtccttttgcctacctgtatcattctgtcatactatctgcaattcagctatgcacagaactatcaaaagcaagcaaagatgctctagagtacctgaggaaggctactttgtgctctataaggattgccaggaaagtgccagatttggcagagaacttcatgggcctggatgcatcattgttaaaggagaaacaccatgggtccttatatctgcaattcagctatgcacagaactatgcaaagcaagcaaagatgctctagagtacctgaggaagttgcaaatacattgatcccttaggggttgagatggaaactgccacaagggagggaggacgtgagtcagctgcacgtgccgacatacacatcacttcctgcctcgctgtccttgatcgagacaaaatcagaagagctgtatctatatgtactccataccttgacgtatgcaggggctagatccataccccggcctatctgccctgtgaggaatgtatacttctgcaagtttgaatactttgacaccttgtgaggagcactctttgaaggtggagaaggtgttgttccaagggaagccagactaccaaaatgttatggttttttagcttctcaatagccggcgacagtgcatacgacctgccccgcgctggggctgtgtctgccttctcctccttcgatgccatgacactgtaaagtgaagccttcgagctaggcgcggaggccagggagatgctatgcgcccacatctaccacgccgccttcatattgctcaagctcgcgctccgcaactcctgccccatctgccgccatgagatgcccaccgatgctgccctgcgggctgccgccagcgtcggcgttgccgaacgcgccgccggggaggaacaagcgtgggatgcgccccacgcgcgcgactttcacctgcctcccaatttgatccgtgagttcaccaggaccagaacttcttcgatgatttgttggaccatccctgctgatacaaacacaatcattttgtggcaggaaatcaccatattagagcttacaaccttcgcatcaactgtttgtgcagcaatgagtttatcttaagttatgtttttttggtaatatcggttgactgcacttaagttctaataaagcatctttgatgtcacttgtaggaagagtttgacactcatgatccaaaggagaacactttgctactcccttacttgaggaaaaggtcaaaaatcattgagatagttgcagcgcgtgatatagtctttgctctatcacagttaggagtatgtgctgcttttagtagcggtacgttcgccgaggacaagacaaaaccggatgctggtttccctctttttgactcaccatgtcaacatggcaatttcaggacccaacgtctctgcgagagaccttgggttcccttatccgaaggcaggcaccgctaagcctacagacgtggtggtgaagttctacgtcctctacgagaagtggcggaggggcgagctcctgggttcttcgtcagttgcgcggtacttgaaaagcatcactcattcgaacgggcaacaagaatttccgggtgtgggtggacagactggtcacatcgccgatcggtacaagcaactggttggtgaggtttgataactgggagatggaaggtggcgttcggtactgctgccgcactactcttctgctgaataacaaggttccaaaagaactagaagtacagattggttgaacttcaaacaaatacaaagagctatgcatacaagtggtggaggcctggtggtaaattgtttatcaagatcgctagagcagttaaatttactcctattatcttctgggatagatttggcaggatcaaggtcgttgtcgtctccaggtccatcaaatgcgacaaggtcgagcgcacgcaattcagctccgaagtcatctcctttcaacagaaagatgcaagtaacaccaagtcacttgcctttgatggttgatacatttcactgtatatcattgcacgacagatccatttagtacctttttctgagttaaactacttcaaacattgctgaagactacaaccagcctacagttgttgtaattgaagcgggtcaagacatagcatttgcaaagatttagttcattctcatcactctgcaatattcgggttctctactatgtgtaatctcatatcaagattaatgagtatcgtgatcgtataattttgaatcctatcaacccatatggcaaggcaaagaaaaatgacagtggacatcattctagattttacaaaatcaaaggagcaaccagacatggctgtcatgatctaagatacttcaacgtgattggatcgaacccaaacatatgactaggagaagctccaaggccactttgtcaagggtctctgcaatgcacctactggtgcatgatttactggaggttgtgcgcatgaatgtgccacacattggtatgggggttggagttgaagcaggtgattttcaccaacattggtttgcgaactggagttgaagcaggagacatgattgttattcctatcatgtgcacactgcctcctcgctgtcatttgtcgtcactctcgtagtcctgataccggagcatggttgccaggggagagcagtccaaggcaaatttgccatgttggagcagtcacaggagccaaggggctgcagtcacaggtcctgctagccaggatggagcaatcataggacctcctagcagtccaaggaaaatttgcgaggtggagtagttgcaacttttgaaacccacgtgataacatgctcaagcgttcgtatgataaaaaagatggcacataatcaaaagaagatctcatgttctgcgtttgtgaacctgtttgtattttttgaacttgttttgtgaacctctatttgtaaacctgtaaaatctgaggttgtgaatagatttgggtaacttcatacaagtggtggaggcctggtggtaatcctggatgcatataaagcgaggcatgcaatatccatagcactcgtttgacagaaggcaacaccatcaaccttgtcctccacctttaaactagcatgagcaccatccttcttcacatttatattcatgtcccctatacgttc

SEQ ID NO: 206555 - DNA, 4922 bp, Zea Mays
cgcagacatcacgctccctccccatgaaacccccttcccccaatctacccctctctgtgcccccgacatccacgctgcctcagcccgccgtccagcgccctctctgcgcctccctccccacaccgcctcagcccgccgttcgccacgctccccacgctgcctccccccgtcgcccctccctcccgcgcggaactccgccatgctccccacgtcgcctccccccatcgcccaccagccgtcgcccaccagcccacactatctcacgccatggatggtggcaacagtccccgcccccgtacctcacacgcatcaggctgggctggccgatcccgccgccgcaaacgccgcgcccagccccgatgtcagcgcggcccgcccgccaacgcactttcggcctccccccgcccctcccttcgcccgcccacccgcaacctccgcgccatccgcaacctccgcccgcttctcacgccaccgacccgacctccgcgccatccgcaaccgtcgtgcgtcttatcccttctctaccgcgcactccgtgtggaacaacctccgcgtaggaagcctcctcccttccccatccccattccccaccacgcgcttcggggacggcgagctccgggcgggagcgaccgccgggcgcttctgctgctggtgcggaggaggaggagcggcgagggtggttcggcgcaggctccacggcggcggtgcccgagccgagttcgactggctggcgctctactgcaacctcacacgcggcgatgggccggacggtaacaatggcaagctggtcctggaggagctgctgtcgtgcgccgccacccaattttgttttccccaaatcctgagctgtgaagagaagaagaagacaaggacgcggcgagtacgatgacgagcgccgcacagcaagtcagcgaggagcacgatgacgcgatgaggaccacgagctgccgaggaagtcaaggacgacgacggcgcagagacccgcgagttgagacatcttcttcgccggcgtgaaccgcaaggctgagacatcttcttcgccgggttcggccacgccgacaccaccgacccgatccgtgtttgcaggcctctcaaattgaaccgattgcttcaagggtgccatacatgattgtgttaaccatgagagggattggcctggcactggttcattctacgggaacctcgacttcggtggagaatgtggtgtccctgtccaaactgtgttctacactccaactgaaaaccgtgcaaagttctggtacgcaacagattacgacatgtttagccttctgcattgctcacatggaagaggacttgagacccgggaccgagcagtacagattcatcgagcaatgccacattggcctcatgaagtttcacaatcacagtggtttttacaaggatttcagttcatggttgtacatagtttttttagttttttttttgaaaaatgaggcattttctttttaccggcggcggaggcgatggcaacaagcccttccctattcgaatctctgtgaccacagagcctacctcgctgagctcatcaccgagatcactggtgggatcaatgagctcgccgacgtagcacagttcttttgatgagtggagatggtagcatggtgaaggataatgcctacgtgcgcagcaattttcatttttcttttagtttcttggagtcgtggaaatctcgctattcacaaggatttcatggcggcgttgttaatttgggggttgggcagaggctttaccttttgcgtcagacagtgctctctcacagcaattgtccttttgcctacctgtatcattctgtcatactatctgcaattcagctatgcacagaactatcaaaagcaagcaaagatgctctagagtacctgaggaaggctactttgtgctctataaggattgccaggaaagtgccagatttggcagagaacttcatgggcctggatgcatcattgttaaaggagaaacaccatgggtccttatatctgcaattcagctatgcacagaactatgcaaagcaagcaaagatgctctagagtacctgaggaagttgcaaatacattgatcccttaggggttgagatggaaactgccacaagggagggaggacgtgagtcagctgcacgtgccgacatacacatcacttcctgcctcgctgtccttgatcgagacaaaatcagaagagctgtatctatatgtactccataccttgacgtatgcaggggctagatccataccccggcctatctgccctgtgaggaatgtatacttctgcaagtttgaatactttgacaccttgtgaggagcactctttgaaggtggagaaggtgttgttccaagggaagccagactaccaaaatgttatggttttttagcttctcaatagccggcgacagtgcatacgacctgccccgcgctggggctgtgtctgccttctcctccttcgatgccatgacactgtaaagtgaagccttcgagctaggcgcggaggccagggagatgctatgcgcccacatctaccacgccgccttcatattgctcaagctcgcgctccgcaactcctgccccatctgccgccatgagatgcccaccgatgctgccctgcgggctgccgccagcgtcggcgttgccgaacgcgccgccggggaggaacaagcgtgggatgcgccccacgcgcgcgactttcacctgcctcccaatttgatccgtgagttcaccaggaccagaacttcttcgatgatttgttggaccatccctgctgatacaaacacaatcattttgtggcaggaaatcaccatattagagcttacaaccttcgcatcaactgtttgtgcagcaatgagtttatcttaagttatgtttttttggtaatatcggttgactgcacttaagttctaataaagcatctttgatgtcacttgtaggaagagtttgacactcatgatccaaaggagaacactttgctactcccttacttgaggaaaaggtcaaaaatcattgagatagttgcagcgcgtgatatagtctttgctctatcacagttaggagtatgtgctgcttttagtagcggtacgttcgccgaggacaagacaaaaccggatgctggtttccctctttttgactcaccatgtcaacatggcaatttcaggacccaacgtctctgcgagagaccttgggttcccttatccgaaggcaggcaccgctaagcctacagacgtggtggtgaagttctacgtcctctacgagaagtggcggaggggcgagctcctgggttcttcgtcagttgcgcggtacttgaaaagcatcactcattcgaacggtacgattattcatccttctggatcggagcgttctcttcatgcgtctgttgacgctctaagttcttgctacgtggacaaacagggcaacaagaatttccgggtgtgggtggacagactggtcacatcgccgatcggtacaagcaactggttggtgaggtttgataactgggagatggaaggtggcgttcggtactgctgccgcactactcttctgctgaataacaaggttccaaaagaactagaagtacagattggttgaacttcaaacaaatacaaagagctatgcatacaagtggtggaggcctggtggtaaattgtttatcaagatcgctagagcagttaaatttactcctattatcttctgggatagatttggcaggatcaaggtcgttgtcgtctccaggtccatcaaatgcgacaaggtcgagcgcacgcaattcagctccgaagtcatctcctttcaacagaaagatgcaagtaacaccaagtcacttgcctttgatggttgatacatttcactgtatatcattgcacgacagatccatttagtacctttttctgagttaaactacttcaaacattgctgaagactacaaccagcctacagttgttgtaattgaagcgggtcaagacatagcatttgcaaagatttagttcattctcatcactctgcaatattcgggttctctactatgtgtaatctcatatcaagattaatgagtatcgtgatcgtataattttgaatcctatcaacccatatggcaaggcaaagaaaaatgacagtggacatcattctagattttacaaaatcaaaggagcaaccagacatggctgtcatgatctaagatacttcaacgtgattggatcgaacccaaacatatgactaggagaagctccaaggccactttgtcaagggtctctgcaatgcacctactggtgcatgatttactggaggttgtgcgcatgaatgtgccacacattggtatgggggttggagttgaagcaggagacatgattgttattcctatcatgtgcacactgcctcctcgctgtcatttgtcgtcactctcgtagtcctgataccggagcatggttgccaggggagagcagtccaaggcaaatttgccatgttggagcagtcacaggagccaaggggctgcagtcacaggtcctgctagccaggatggagcaatcataggacctcctagcagtccaaggaaaatttgcgaggtggagtagttgcaacttttgaaacccacgtgataacatgctcaagcgttcgtatgataaaaaagatggcacataatcaaaagaagatctcatgttctgcgtttgtgaacctgtttgtattttttgaacttgttttgtgaacctctatttgtaaacctgtaaaatctgaggttgtgaatagatttgggtaacttcatacaagtggtggaggcctggtggtaatcctggatgcatataaagcgaggcatgcaatatccatagcactcgtttgacagaaggcaacaccatcaaccttgtcctccacctttaaactagcatgagcaccatccttcttcacatttatattcatgtcccctatacgttc

SEQ ID NO: 206556 - DNA, 4484 bp, Zea Mays
cgcagacatcacgctccctccccatgaaacccccttcccccaatctacccctctctgtgcccccgacatccacgctgcctcagcccgccgtccagcgccctctctgcgcctccctccccacaccgcctcagcccgccgttcgccacgctccccacgctgcctccccccgtcgcccctccctcccgcgcggaactccgccatgctccccacgtcgcctccccccatcgcccaccagccgtcgcccaccagcccacactatctcacgccatggatggtggcaacagtccccgcccccgtacctcacacgcatcaggctgggctggccgatcccgccgccgcaaacgccgcgcccagccccgatgtcagcgcggcccgcccgccaacgcactttcggcctccccccgcccctcccttcgcccgcccacccgcaacctccgcgccatccgcaacctccgcccgcttctcacgccaccgacccgacctccgcgccatccgcaaccgtcgtgcgtcttatcccttctctaccgcgcactccgtgtggaacaacctccgcgtaggaagcctcctcccttccccatccccattccccaccacgcgcttcggggacggcgagctccgggcgggagcgaccgccgggcgcttctgctgctggtgcggaggaggaggagcggcgagggtggttcggcgcaggctccacggcggcggtgcccgagccgagttcgactggctggcgctctactgcaacctcacacgcggcgatgggccggacggtaacaatggcaagctggtcctggaggagctgctgtcgtgcgccgccacccaattttgttttccccaaatcctgagctgtgaagagaagaagaagacaaggacgcggcgagtacgatgacgagcgccgcacagcaagtcagcgaggagcacgatgacgcgatgaggaccacgagctgccgaggaagtcaaggacgacgacggcgcagagacccgcgagttgagacatcttcttcgccggcgtgaaccgcaaggctgagacatcttcttcgccgggttcggccacgccgacaccaccgacccgatgtacctatcctagccgtgtttgcaggcctctcaaattgaaccgattgcttcaagggtgccatacatgattgtgttaaccatgagagggattggcctggcactggttcattctacgggaacctcgacttcggtggagaatgtggtgtccctgtccaaactgtgttctacactccaactgaaaaccgtgcaaagttctggtacgcaacagattacgacatgtttagccttctgcattgctcacatggaagaggacttgagacccgggaccgagcagtacagattcatcgagcaatgccacattggcctcatgaagtttcacaatcacagtggtttttacaaggatttcagttcatgggttgggcagaggctttaccttttgcgtcagacagtgctctctcacagcaattgtccttttgcctacctgtatcattctgtcatactatctgcaattcagctatgcacagaactatcaaaagcaagcaaagatgctctagagtacctgaggaaggctactttgtgctctataaggattgccaggaaagtgccagatttggcagagaacttcatgggcctggatgcatcattgttaaaggagaaacaccatgggtccttatatctgcaattcagctatgcacagaactatgcaaagcaagcaaagatgctctagagtacctgaggaaggtaagggcatctatttcttaccacaaggccccaacaaatataagtatagaactacagttgcaaatacattgatcccttaggggttgagatggaaactgccacaagggagggaggacgtgagtcagctgcacgtgccgacatacacatcacttcctgcctcgctgtccttgatcgagacaaaatcagaagagctgtatctatatgtactccataccttgacgtatgcaggggctagatccataccccggcctatctgccctgtgaggaatgtatacttctgcaagtttgaatactttgacaccttgtgaggagcactctttgaaggtggagaaggtgttgttccaagggaagccagactaccaaaatgttatggttttttagcttctcaatagccggcgacagtgcatacgacctgccccgcgctggggctgtgtctgccttctcctccttcgatgccatgacactgtaaagtgaagccttcgagctaggcgcggaggccagggagatgctatgcgcccacatctaccacgccgccttcatattgctcaagctcgcgctccgcaactcctgccccatctgccgccatgagatgcccaccgatgctgccctgcgggctgccgccagcgtcggcgttgccgaacgcgccgccggggaggaacaagcgtgggatgcgccccacgcgcgcgactttcacctgcctcccaatttgatccgtgagttcaccaggaccagaacttcttcgatgatttgttggaccatccctgctgatacaaacacaatcattttgtggcaggaaatcaccatattagagcttacaaccttcgcatcaactgtttgtgcagcaatgagtttatcttaagttatgtttttttggtaatatcggttgactgcacttaagttctaataaagcatctttgatgtcacttgtaggaagagtttgacactcatgatccaaaggagaacactttgctactcccttacttgaggaaaaggtcaaaaatcattgagatagttgcagcgcgtgatatagtctttgctctatcacagttaggagtatgtgctgcttttagtagcggtacgttcgccgaggacaagacaaaaccggatgctggtttccctctttttgactcaccatgtcaacatggcaatttcaggacccaacgtctctgcgagagaccttgggttcccttatccgaaggcaggcaccgctaagcctacagacgtggtggtgaagttctacgtcctctacgagaagtggcggaggggcgagctcctgggttcttcgtcagttgcgcggtacttgaaaagcatcactcattcgaacggtacgattattcatccttctggatcggagcgttctcttcatgcgtctgttgacgctctaagttcttgctacgtggacaaacagggcaacaagaatttccgggtgtgggtggacagactggtcacatcgccgatcggtacaagcaactggttggtgaggtttgataactgggagatggaaggtggcgttcggtactgctgccgcactactcttctgctgaataacaaggatcaaggtcgttgtcgtctccaggtccatcaaatgcgacaaggtcgagcgcacgcaattcagctccgaagtcatctcctttcaacagaaagatgcaagtaacaccaagtcacttgcctttgatggttgatacatttcactgtatatcattgcacgacagatccatttagtacctttttctgagttaaactacttcaaacattgctgaagactacaaccagttgttgtaattgaagcgggtcaagacatagcatttgcaaagatttagttcattctcatcactctgcaatattcgggttctctactatgtgtaatctcatatcaagattaatgagtatcgtgatcgtataattttgaatcctatcaacccatatggcaaggcaaagaaaaatgacagtggacatcattctagattttacaaaatcaaaggagcaaccagacatggctgtcatgatctaagatacttcaacgtgattggatcgaacccaaacatatgactaggagaagctccaaggccactttgtcaagggtctctgcaatgcacctactggtgcatgatttactggaggttgtgcgcatgaatgtgccacacattggtatgggggttggagttgaagcaggtgattttcaccaacattggtttgcgaactggagttgaagcaggttattcatttgatgaaagtgggagagcagtccaaggcaaatttgccatgttggagcagtcacaggagccaaggggctgcagtcacaggtcctgctagccaggatggagcaatcataggacctcctagcagtccaaggaaaatttgcgaggtggagtagttgcaacttttgaaacccacgtgataacatgctcaagcgttcgtatgataaaaaagatggcacataatcaaaagaagatctcatgttctgcgtttgtgaacctgtttgtattttttgaacttgttttgtgaacctctatttgtaaacctgtaaaatctgaggttgtgaatagatttgggtaacttcatacaagtggtggaggcctggtggtaatcctggatgcatataaagcgaggcatgcaatatccatagcactcgtttgacagaaggcaacaccatcaaccttgtcctccacctttaaactagcatgagcaccatccttcttcacatttatattcatgtcccctatacgttc

SEQ ID NO: 206557 - DNA, 4958 bp, Zea Mays
cgcagacatcacgctccctccccatgaaacccccttcccccaatctacccctctctgtgcccccgacatccacgctgcctcagcccgccgtccagcgccctctctgcgcctccctccccacaccgcctcagcccgccgttcgccacgctccccacgctgcctccccccgtcgcccctccctcccgcgcggaactccgccatgctccccacgtcgcctccccccatcgcccaccagccgtcgcccaccagcccacactatctcacgccatggatggtggcaacagtccccgcccccgtacctcacacgcatcaggctgggctggccgatcccgccgccgcaaacgccgcgcccagccccgatgtcagcgcggcccgcccgccaacgcactttcggcctccccccgcccctcccttcgcccgcccacccgcaacctccgcgccatccgcaacctccgcccgcttctcacgccaccgacccgacctccgcgccatccgcaaccgtcgtgcgtcttatcccttctctaccgcgcactccgtgtggaacaacctccgcgtaggaagcctcctcccttccccatccccattccccaccacgcgcttcggggacggcgagctccgggcgggagcgaccgccgggcgcttctgctgctggtgcggaggaggaggagcggcgagggtggttcggcgcaggctccacggcggcggtgcccgagccgagttcgactggctggcgctctactgcaacctcacacgcggcgatgggccggacggtaacaatggcaagctggtcctggaggagctgctgtcgtgcgccgccacccaattttgttttccccaaatcctgagctgtgaagagaagaagaagacaaggacgcggcgagtacgatgacgagcgccgcacagcaagtcagcgaggagcacgatgacgcgatgaggaccacgagctgccgaggaagtcaaggacgacgacggcgcagagacccgcgagttgagacatcttcttcgccggcgtgaaccgcaaggctgagacatcttcttcgccgggttcggccacgccgacaccaccgacccgatccgtgtttgcaggcctctcaaattgaaccgattgcttcaagggtgccatacatgattgtgttaaccatgagagggattggcctggcactggttcattctacgggaacctcgacttcggtggagaatgtggtgtccctgtccaaactgtgttctacactccaactgaaaaccgtgcaaagttctggtacgcaacagattacgacatgtttagccttctgcattgctcacatggaagaggacttgagacccgggaccgagcagtacagattcatcgagcaatgccacattggcctcatgaagtttcacaatcacagtggtttttacaaggatttcagttcatggttgtacatagtttttttagttttttttttgaaaaatgaggcattttctttttaccggcggcggaggcgatggcaacaagcccttccctattcgaatctctgtgaccacagagcctacctcgctgagctcatcaccgagatcactggtgggatcaatgagctcgccgacgtagcacagttcttttgatgagagtggttcaactctattttgcttggttcagtggagatggtagcatggtgaaggataatgcctacgtgcgcagcaattttcatttttcttttagtttcttggagtcgtggaaatctcgctattcacaaggatttcatggcggcgttgttaatttgggggttgggcagaggctttaccttttgcgtcagacagtgctctctcacagcaattgtccttttgcctacctgtatcattctgtcatactatctgcaattcagctatgcacagaactatcaaaagcaagcaaagatgctctagagtacctgaggaaggctactttgtgctctataaggattgccaggaaagtgccagatttggcagagaacttcatgggcctggatgcatcattgttaaaggagaaacaccatgggtccttatatctgcaattcagctatgcacagaactatgcaaagcaagcaaagatgctctagagtacctgaggaagttgcaaatacattgatcccttaggggttgagatggaaactgccacaagggagggaggacgtgagtcagctgcacgtgccgacatacacatcacttcctgcctcgctgtccttgatcgagacaaaatcagaagagctgtatctatatgtactccataccttgacgtatgcaggggctagatccataccccggcctatctgccctgtgaggaatgtatacttctgcaagtttgaatactttgacaccttgtgaggagcactctttgaaggtggagaaggtgttgttccaagggaagccagactaccaaaatgttatggttttttagcttctcaatagccggcgacagtgcatacgacctgccccgcgctggggctgtgtctgccttctcctccttcgatgccatgacactgtaaagtgaagccttcgagctaggcgcggaggccagggagatgctatgcgcccacatctaccacgccgccttcatattgctcaagctcgcgctccgcaactcctgccccatctgccgccatgagatgcccaccgatgctgccctgcgggctgccgccagcgtcggcgttgccgaacgcgccgccggggaggaacaagcgtgggatgcgccccacgcgcgcgactttcacctgcctcccaatttgatccgtgagttcaccaggaccaggcttctatgcttacatattcagtgctgttcgctcgtgctgtatctgtggccgcgtgagcaggaaatcaccatattagagcttacaaccttcgcatcaactgtttgtgcagcaatgagtttatcttaagttatgtttttttggtaatatcggttgactgcacttaagttctaataaagcatctttgatgtcacttgtaggaagagtttgacactcatgatccaaaggagaacactttgctactcccttacttgaggaaaaggtcaaaaatcattgagatagttgcagcgcgtgatatagtctttgctctatcacagttaggagtatgtgctgcttttagtagcggtacgttcgccgaggacaagacaaaaccggatgctggtttccctctttttgactcaccatgtcaacatggcaatttcaggacccaacgtctctgcgagagaccttgggttcccttatccgaaggcaggcaccgctaagcctacagacgtggtggtgaagttctacgtcctctacgagaagtggcggaggggcgagctcctgggttcttcgtcagttgcgcggtacttgaaaagcatcactcattcgaacggtacgattattcatccttctggatcggagcgttctcttcatgcgtctgttgacgctctaagttcttgctacgtggacaaacagggcaacaagaatttccgggtgtgggtggacagactggtcacatcgccgatcggtacaagcaactggttggtgaggtttgataactgggagatggaaggtggcgttcggtactgctgccgcactactcttctgctgaataacaaggttccaaaagaactagaagtacagattggttgaacttcaaacaaatacaaagagctatgcatacaagtggtggaggcctggtggatcaaggtcgttgtcgtctccaggtccatcaaatgcgacaaggtcgagcgcacgcaattcagctccgaagtcatctcctttcaacagaaagatgcaagtaacaccaagtcacttgcctttgatggttgatacatttcactgtatatcattgcacgacagatccatttagtacctttttctgagttaaactacttcaaacattgctgaagactacaaccagcctacagttgttgtaattgaagcgggtcaagacatagcatttgcaaagatttagttcattctcatcactctgcaatattcggttcatggcctgtcttattttttcccctacaagtcatctacgacagtttgccagtagcactaaatcttttaactgtggttctctactatgtgtaatctcatatcaagattaatgagtatcgtgatcgtataattttgaatcctatcaacccatatggcaaggcaaagaaaaatgacagtggacatcattctagattttacaaaatcaaaggagcaaccagacatggctgtcatgatctaagatacttcaacgtgattggatcgaacccaaacatatgactaggagaagctccaaggccactttgtcaagggtctctgcaatgcacctactggtgcatgatttactggaggttgtgcgcatgaatgtgccacacattggtatgggggttggagttgaagcaggagacatgattgttattcctatcatgtgcacactgcctcctcgctgtcatttgtcgtcactctcgtagtcctgataccggagcatggttgccaggggagagcagtccaaggcaaatttgccatgttggagcagtcacaggagccaaggggctgcagtcacaggtcctgctagccaggatggagcaatcataggacctcctagcagtccaaggaaaatttgcgaggtggagtagttgcaacttttgaaacccacgtgataacatgctcaagcgttcgtatgataaaaaagatggcacataatcaaaagaagatctcatgttctgcgtttgtgaacctgtttgtattttttgaacttgttttgtgaacctctatttgtaaacctgtaaaatctgaggttgtgaatagatttgggtaacttcatacaagtggtggaggcctggtggtaatcctggatgcatataaagcgaggcatgcaatatccatagcactcgtttgacagaaggcaacaccatcaaccttgtcctccacctttaaactagcatgagcaccatccttcttcacatttatattcatgtcccctatacgttc

SEQ ID NO: 206558 - DNA, 5327 bp, Zea Mays
cgcagacatcacgctccctccccatgaaacccccttcccccaatctacccctctctgtgcccccgacatccacgctgcctcagcccgccgtccagcgccctctctgcgcctccctccccacaccgcctcagcccgccgttcgccacgctccccacgctgcctccccccgtcgcccctccctcccgcgcggaactccgccatgctccccacgtcgcctccccccatcgcccaccagccgtcgcccaccagcccacactatctcacgccatggatggtggcaacagtccccgcccccgtacctcacacgcatcaggctgggctggccgatcccgccgccgcaaacgccgcgcccagccccgatgtcagcgcggcccgcccgccaacgcactttcggcctccccccgcccctcccttcgcccgcccacccgcaacctccgcgccatccgcaacctccgcccgcttctcacgccaccgacccgacctccgcgccatccgcaaccgtcgtgcgtcttatcccttctctaccgcgcactccgtgtggaacaacctccgcgtaggaagcctcctcccttccccatccccattccccaccacgcgcttcggggacggcgagctccgggcgggagcgaccgccgggcgcttctgctgctggtgcggaggaggaggagcggcgagggtggttcggcgcaggctccacggcggcggtgcccgagccgagttcgactggctggcgctctactgcaacctcacacgcggcgatgggccggacggtaacaatggcaagctggtcctggaggagctgctgtcgtgcgccgccacccaattttgttttccccaaatcctgagctgtgaagagaagaagaagacaaggacgcggcgagtacgatgacgagcgccgcacagcaagtcagcgaggagcacgatgacgcgatgaggaccacgagctgccgaggaagtcaaggacgacgacggcgcagagacccgcgagttgagacatcttcttcgccggcgtgaaccgcaaggctgagacatcttcttcgccgggttcggccacgccgacaccaccgacccgatccgtgtttgcaggcctctcaaattgaaccgattgcttcaagggtgccatacatgattgtgttaaccatgagagggattggcctggcactggttcattctacgggaacctcgacttcggtggagaatgtggtgtccctgtccaaactgtgttctacactccaactgaaaaccgtgcaaagttctggtacgcaacagattacgacatgtttagccttctgcattgctcacatggaagaggacttgagacccgggaccgagcagtacagattcatcgagcaatgccacattggcctcatgaagtttcacaatcacagtggtttttacaaggatttcagttcatggttgtacatagtttttttagttttttttttgaaaaatgaggcattttctttttaccggcggcggaggcgatggcaacaagcccttccctattcgaatctctgtgaccacagagcctacctcgctgagctcatcaccgagatcactggtgggatcaatgagctcgccgacgtagcacagttcttttgatgagagtggttcaactctattttgcttggttcagtggagatggtagcatggtgaaggataatgcctacgtgcgcagcaattttcatttttcttttagtttcttggagtcgtggaaatctcgctattcacaaggatttcatggcggcgttgttaatttgggggttgggcagaggctttaccttttgcgtcagacagtgctctctcacagcaattgtccttttgcctacctgtatcattctgtcatactatctgcaattcagctatgcacagaactatcaaaagcaagcaaagatgctctagagtacctgaggaaggctactttgtgctctataaggattgccaggaaagtgccagatttggcagagaacttcatgggcctggatgcatcattgttaaaggagaaacaccatgggtccttatatctgcaattcagctatgcacagaactatgcaaagcaagcaaagatgctctagagtacctgaggaagagctaggataaaactgttgattgttacagccctgggcaaggattgatgcttgctagcttcaagattaggaccctaccacttgatgagaacagatagtgctatactgctatgtacatctacatttctccagttatacataatcagatcttgcttctagccaactgttgcaaatacattgatcccttaggggttgagatggaaactgccacaagggagggaggacgtgagtcagctgcacgtgccgacatacacatcacttcctgcctcgctgtccttgatcgagacaaaatcagaagagctgtatctatatgtactccataccttgacgtatgcaggggctagatccataccccggcctatctgccctgtgaggaatgtatacttctgcaagtttgaatactttgacaccttgtgaggagcactctttgaaggtggagaaggtgttgttccaagggaagccagactaccaaaatgttatggttttttagcttctcaatagccggcgacagtgcatacgacctgccccgcgctggggctgtgtctgccttctcctccttcgatgccatgacactgtaaagtgaagccttcgagctaggcgcggaggccagggagatgctatgcgcccacatctaccacgccgccttcatattgctcaagctcgcgctccgcaactcctgccccatctgccgccatgagatgcccaccgatgctgccctgcgggctgccgccagcgtcggcgttgccgaacgcgccgccggggaggaacaagcgtgggatgcgccccacgcgcgcgactttcacctgcctcccaatttgatccgtgagttcaccaggaccaggcttctatgcttacatattcagtgctgttcgctcgtgctgtatctgtggccgcgtgagcaggaaatcaccatattagagcttacaaccttcgcatcaactgaagagtttgacactcatgatccaaaggagaacactttgctactcccttacttgaggaaaaggtcaaaaatcattgagatagttgcagcgcgtgatatagtctttgctctatcacagttaggagtatgtgctgcttttagtagcggtacgttcgccgaggacaagacaaaaccggatgctggtttccctctttttgactcaccatgtcaacatggcaatttcaggacccaacgtctctgcgagagaccttgggttcccttatccgaaggcaggcaccgctaagcctacagacgtggtggtgaagttctacgtcctctacgagaagtggcggaggggcgagctcctgggttcttcgtcagttgcgcggtacttgaaaagcatcactcattcgaacggtacgattattcatccttctggatcggagcgttctcttcatgcgtctgttgacgctctaagttcttgctacgtggacaaacagggcaacaagaatttccgggtgtgggtggacagactggtcacatcgccgatcggtacaagcaactggttggtgaggtttgataactgggagatggaaggtggcgttcggtactgctgccgcactactcttctgctgaataacaagatcgcagatctacgaggtagcatcagatggctctgtagggattggaggcaaggatggaggcgtcggcgggggtggtgaggatgaaggcgactatgatgaggcggaacccgggcgacatgatggaggcgagccggtgccggtgacgaggatcccacggccatggacgtcgtcaggacatagctgatgccggaggaggaggcgctccggctctgcatcggctgcgtccacttctagacttccttgcctcgcttgtcacctacaggaaggttccaaaagaactagaagtacagattggttgaacttcaaacaaatacaaagagctatgcatacaagtggtggaggcctggtggtaaattgtttatcaagatcgctagagcagttaaatttactcctattatcttctgggatagatttggcaggatcaaggtcgttgtcgtctccaggtccatcaaatgcgacaaggtcgagcgcacgcaattcagctccgaagtcatctcctttcaacagaaagatgcaagtaacaccaagtcacttgcctttgatggttgatacatttcactgtatatcattgcacgacagatccatttagtacctttttctgagttaaactacttcaaacattgctgaagactacaaccagcctacagttgttgtaattgaagcgggtcaagacatagcatttgcaaagatttagttcattctcatcactctgcaatattcgggttctctactatgtgtaatctcatatcaagattaatgagtatcgtgatcgtataattttgaatcctatcaacccatatggcaaggcaaagaaaaatgacagtggacatcattctagattttacaaaatcaaaggagcaaccagacatggctgtcatgatctaagatacttcaacgtgattggatcgaacccaaacatatgactaggagaagctccaaggccactttgtcaagggtctctgcaatgcacctactggtgcatgatttactggaggttgtgcgcatgaatgtgccacacattggtatgggggttggagttgaagcaggtgattttcaccaacattggtttgcgaactggagttgaagcaggagacatgattgttattcctatcatgtgcacactgcctcctcgctgtcatttgtcgtcactctcgtagtcctgataccggagcatggttgccaggggagagcagtccaaggcaaatttgccatgttggagcagtcacaggagccaaggggctgcagtcacaggtcctgctagccaggatggagcaatcataggacctcctagcagtccaaggaaaatttgcgaggtggagtagttgcaacttttgaaacccacgtgataacatgctcaagcgttcgtatgataaaaaagatggcacataatcaaaagaagatctcatgttctgcgtttgtgaacctgtttgtattttttgaacttgttttgtgaacctctatttgtaaacctgtaaaatctgaggttgtgaatagatttgggtaacttcatacaagtggtggaggcctggtggtaatcctggatgcatataaagcgaggcatgcaatatccatagcactcgtttgacagaaggcaacaccatcaaccttgtcctccacctttaaactagcatgagcaccatccttcttcacatttatattcatgtcccctatacgttc

SEQ ID NO: 206559 - DNA, 4496 bp, Zea Mays
cgcagacatcacgctccctccccatgaaacccccttcccccaatctacccctctctgtgcccccgacatccacgctgcctcagcccgccgtccagcgccctctctgcgcctccctccccacaccgcctcagcccgccgttcgccacgctccccacgctgcctccccccgtcgcccctccctcccgcgcggaactccgccatgctccccacgtcgcctccccccatcgcccaccagccgtcgcccaccagcccacactatctcacgccatggatggtggcaacagtccccgcccccgtacctcacacgcatcaggctgggctggccgatcccgccgccgcaaacgccgcgcccagccccgatgtcagcgcggcccgcccgccaacgcactttcggcctccccccgcccctcccttcgcccgcccacccgcaacctccgcgccatccgcaacctccgcccgcttctcacgccaccgacccgacctccgcgccatccgcaaccgtcgtgcgtcttatcccttctctaccgcgcactccgtgtggaacaacctccgcgtaggaagcctcctcccttccccatccccattccccaccacgcgcttcggggacggcgagctccgggcgggagcgaccgccgggcgcttctgctgctggtgcggaggaggaggagcggcgagggtggttcggcgcaggctccacggcggcggtgcccgagccgagttcgactggctggcgctctactgcaacctcacacgcggcgatgggccggacggtaacaatggcaagctggtcctggaggagctgctgtcgtgcgccgccacccaattttgttttccccaaatcctgagctgtgaagagaagaagaagacaaggacgcggcgagtacgatgacgagcgccgcacagcaagtcagcgaggagcacgatgacgcgatgaggaccacgagctgccgaggaagtcaaggacgacgacggcgcagagacccgcgagttgagacatcttcttcgccggcgtgaaccgcaaggctgagacatcttcttcgccgggttcggccacgccgacaccaccgacccgatgtacctatcctagccgtgtttgcaggcctctcaaattgaaccgattgcttcaagggtgccatacatgattgtgttaaccatgagagggattggcctggcactggttcattctacgggaacctcgacttcggtggagaatgtggtgtccctgtccaaactgtgttctacactccaactgaaaaccgtgcaaagttctggtacgcaacagattacgacatgtttagccttctgcattgctcacatggaagaggacttgagacccgggaccgagcagtacagattcatcgagcaatgccacattggcctcatgaagtttcacaatcacagtggtttttacaaggatttcagttcatggttgtacatagtttttttagttttttttttgaaaaatgaggcattttctttttaccggcggcggaggcgatggcaacaagcccttccctattcgaatctctgtgaccacagagcctacctcgctgagctcatcaccgagatcactggtgggatcaatgagctcgccgacgtagcacagttcttttgatgagagtggttcaactctattttgcttggttcagtggagatggtagcatggtgaaggataatgcctacgtgcgcagcaattttcatttttcttttagtttcttggagtcgtggaaatctcgctattcacaaggatttcatggcggcgttgttaatttgggggttgggcagaggctttaccttttgcgtcagacagtgctctctcacagcaattgtccttttgcctacctgtatcattctgtcatactatctgcaattcagctatgcacagaactatcaaaagcaagcaaagatgctctagagtacctgaggaaggctactttgtgctctataaggattgccaggaaagtgccagatttggcagagaacttcatgggcctggatgcatcattgttaaaggagaaacaccatgggtccttatatctgcaattcagctatgcacagaactatgcaaagcaagcaaagatgctctagagtacctgaggaagttgcaaatacattgatcccttaggggttgagatggaaactgccacaagggagggaggacgtgagtcagctgcacgtgccgacatacacatcacttcctgcctcgctgtccttgatcgagacaaaatcagaagagctgtatctatatgtactccataccttgacgtatgcaggggctagatccataccccggcctatctgccctgtgaggaatgtatacttctgcaagtttgaatactttgacaccttgtgaggagcactctttgaaggtggagaaggtgttgttccaagggaagccagactaccaaaatgttatggttttttagcttctcaatagccggcgacagtgcatacgacctgccccgcgctggggctgtgtctgccttctcctccttcgatgccatgacactgtaaagtgaagccttcgagctaggcgcggaggccagggagatgctatgcgcccacatctaccacgccgccttcatattgctcaagctcgcgctccgcaactcctgccccatctgccgccatgagatgcccaccgatgctgccctgcgggctgccgccagcgtcggcgttgccgaacgcgccgccggggaggaacaagcgtgggatgcgccccacgcgcgcgactttcacctgcctcccaatttgatccgtgagttcaccaggaccagcaacgatattggatttcaggcttctatgcttacatattcagtgctgttcgctcgtgctgtatctgtggccgcgtgagcaggaaatcaccatattagagcttacaaccttcgcatcaactgaagagtttgacactcatgatccaaaggagaacactttgctactcccttacttgaggaaaaggtcaaaaatcattgagatagttgcagcgcgtgatatagtctttgctctatcacagttaggagtatgtgctgcttttagtagcggtacgttcgccgaggacaagacaaaaccggatgctggtttccctctttttgactcaccatgtcaacatggcaatttcaggacccaacgtctctgcgagagaccttgggttcccttatccgaaggcaggcaccgctaagcctacagacgtggtggtgaagttctacgtcctctacgagaagtggcggaggggcgagctcctgggttcttcgtcagttgcgcggtacttgaaaagcatcactcattcgaacggtacgattattcatccttctggatcggagcgttctcttcatgcgtctgttgacgctctaagttcttgctacgtggacaaacagggcaacaagaatttccgggtgtgggtggacagactggtcacatcgccgatcggtacaagcaactggttggtgaggtttgataactgggagatggaaggtggcgttcggtactgctgccgcactactcttctgctgaataacaaggcttttcctttctctttctctaaattcatgctgcaagaaatagtcttcaaacaaaagagaagagagaatctcgtactttggcctgaagctataagcaaaacaaagtgaattatttttgtcttgctctgttaggctcagttttgccatgacaaggcttaggggcagactatccccaacgtgggcatgtatttgcccaaaccagtactctcatggtcagttgtatgttgcgctatctagggccactgttagaccgaacatcaatatccttgcagttccaccctgtaaatcttacatttatattgcattactaactgcatttcagctaataggagtatgagataaaagatatttagcatttgatgacttgtggacatgctattaatgggatttactggttatatatatattaatgagtatccgtttgaattgtaagaccttgtgatatttcttgaagatttatataagtttgtaatttattgtgataatcttagcatttaaatgatgcaattgacatgacattattaaaatcatatatagaagtatgtatgatactgatggttgcaatgtagtggtgaaacaactggattaaaataacaaaatttatgtatggataggatcacaaatggattacgaaatcttttctcataacagtataacacacatttgtacataagttattatggtattatatgttttcgttgcaacgtacggacactcacctagtagatacattggtttcatatatctctactactctataagacaatagtgtagacgtacacacacattttggtgcacggttctgcctgcagtgcccgctctctctcgcgcccccgctctctgcgcccccgaccctgcccgcatcgccatccccgcgcgcaatccccgctcggctgctccaaggaaggaagggcgtcgtgtggagatcgccatccccgctggggcgttcctccccaccgccgccgcaatggaagggcg

SEQ ID NO: 206560 - DNA, 4072 bp, Zea Mays
cgcagacatcacgctccctccccatgaaacccccttcccccaatctacccctctctgtgcccccgacatccacgctgcctcagcccgccgtccagcgccctctctgcgcctccctccccacaccgcctcagcccgccgttcgccacgctccccacgctgcctccccccgtcgcccctccctcccgcgcggaactccgccatgctccccacgtcgcctccccccatcgcccaccagccgtcgcccaccagcccacactatctcacgccatggatggtggcaacagtccccgcccccgtacctcacacgcatcaggctgggctggccgatcccgccgccgcaaacgccgcgcccagccccgatgtcagcgcggcccgcccgccaacgcactttcggcctccccccgcccctcccttcgcccgcccacccgcaacctccgcgccatccgcaacctccgcccgcttctcacgccaccgacccgacctccgcgccatccgcaaccgtcgtgcgtcttatcccttctctaccgcgcactccgtgtggaacaacctccgcgtaggaagcctcctcccttccccatccccattccccaccacgcgcttcggggacggcgagctccgggcgggagcgaccgccgggcgcttctgctgctggtgcggaggaggaggagcggcgagggtggttcggcgcaggctccacggcggcggtgcccgagccgagttcgactggctggcgctctactgcaacctcacacgcggcgatgggccggacggtaacaatggcaagctggtcctggaggagctgctgtcgtgcgccgccacccaattttgttttccccaaatcctgagctgtgaagagaagaagaagacaaggacgcggcgagtacgatgacgagcgccgcacagcaagtcagcgaggagcacgatgacgcgatgaggaccacgagctgccgaggaagtcaaggacgacgacggcgcagagacccgcgagttgagacatcttcttcgccggcgtgaaccgcaaggctgagacatcttcttcgccgggttcggccacgccgacaccaccgacccgatgtacctatcctagccgtgtttgcaggcctctcaaattgaaccgattgcttcaagggtgccatacatgattgtgttaaccatgagagggattggcctggcactggttcattctacgggaacctcgacttcggtggagaatgtggtgtccctgtccaaactgtgttctacactccaactgaaaaccgtgcaaagttctggtacgcaacagattacgacatgtttagccttctgcattgctcacatggaagaggacttgagacccgggaccgagcagtacagattcatcgagcaatgccacattggcctcatgaagtttcacaatcacagtggtttttacaaggatttcagttcatgggttgggcagaggctttaccttttgcgtcagacagtgctctcctatgcacagaactatcaaaagcaagcaaagatgctctagagtacctgaggaaggctactttgtgctctataaggattgccaggaaagtgccagatttggcagagaacttcatgggcctggatgcatcattgttaaaggagaaacaccatgggtccttatatctgcaattcagctatgcacagaactatgcaaagcaagcaaagatgctctagagtacctgaggaagttgcaaatacattgatcccttaggggttgagatggaaactgccacaagggagggaggacgtgagtcagctgcacgtgccgacatacacatcacttcctgcctcgctgtccttgatcgagacaaaatcagaagagctgtatctatatgtactccataccttgacgtatgcaggggctagatccataccccggcctatctgccctgtgaggaatgtatacttctgcaagtttgaatactttgacaccttgtgaggagcactctttgaaggtggagaaggtgttgttccaagggaagccagactaccaaaatgttatggttttttagcttctcaatagccggcgacagtgcatacgacctgccccgcgctggggctgtgtctgccttctcctccttcgatgccatgacactgtaaagtgaagccttcgagctaggcgcggaggccagggagatgctatgcgcccacatctaccacgccgccttcatattgctcaagctcgcgctccgcaactcctgccccatctgccgccatgagatgcccaccgatgctgccctgcgggctgccgccagcgtcggcgttgccgaacgcgccgccggggaggaacaagcgtgggatgcgccccacgcgcgcgactttcacctgcctcccaatttgatccgtgagttcaccaggaccaggcttctatgcttacatattcagtgctgttcgctcgtgctgtatctgtggccgcgtgagcaggaaatcaccatattagagcttacaaccttcgcatcaactgaagagtttgacactcatgatccaaaggagaacactttgctactcccttacttgaggaaaaggtcaaaaatcattgagatagttgcagcgcgtgatatagtctttgctctatcacagttaggagtatgtgctgcttttagtagcggtacgttcgccgaggacaagacaaaaccggatgctggtttccctctttttgactcaccatgtcaacatggcaatttcaggacccaacgtctctgcgagagaccttgggttcccttatccgaaggcaggcaccgctaagcctacagacgtggtggtgaagttctacgtcctctacgagaagtggcggaggggcgagctcctgggttcttcgtcagttgcgcggtacttgaaaagcatcactcattcgaacggtacgattattcatccttctggatcggagcgttctcttcatgcgtctgttgacgctctaagttcttgctacgtggacaaacagggcaacaagaatttccgggtgtgggtggacagactggtcacatcgccgatcggtacaagcaactggttggtgaggtttgataactgggagatggaaggtggcgttcggtactgctgccgcactactcttctgctgaataacaaggcttttcctttctctttctctaaattcatgctgcaagaaatagtcttcaaacaaaagagaagagagaatctcgtactttggcctgaagctataagcaaaacaaagtgaattatttttgtcttgctctgttaggctcagttttgccatgacaaggcttaggggcagactatccccaacgtgggcatgtatttgcccaaaccagtactctcatggtcagttgtatgttgcgctatctagggccactgttagaccgaacatcaatatccttgcagttccaccctgtaaatcttacatttatattgcattactaactgcatttcagctaataggagtatgagataaaagatatttagcatttgatgacttgtggacatgctattaatgggatttactggttatatatatattaatgagtatccgtttgaattgtaagaccttgtgatatttcttgaagatttatataagtttgtaatttattgtgataatcttagcatttaaatgatgcaattgacatgacattattaaaatcatatatagaagtatgtatgatactgatggttgcaatgtagtggtgaaacaactggattaaaataacaaaatttatgtatggataggatcacaaatggattacgaaatcttttctcataacagtataacacacatttgtacataagttattatggtattatatgttttcgttgcaacgtacggacactcacctagtagatacattggtttcatatatctctactactctataagacaatagtgtagacgtacacacacattttggtgcacggttctgcctgcagtgcccgctctctctcgcgcccccgctctctgcgcccccgaccctgcccgcatcgccatccccgcgcgcaatccccgctcggctgctccaaggaaggaagggcgtcgtgtggagatcgccatccccgctggggcgttcctccccaccgccgccgcaatggaagggcg

SEQ ID NO: 206561 - DNA, 1323 bp, Zea Mays
aagtcctgctcatttgtcatttctcatccgccagattcttacaagaagttgaaggagagggcaggcgagtttgtggcatgaggcctagtgaggacaggagagagcaaggtcaaaatcgtaggcggtgacgacgtgctcgtcagcgacataagagaccccgagagcatagctctggcaattgagggcatcgacgcgctcatcatcctcaccagcgcggtcccgaagatgtgtggaagcgcaaggcagaacagtatctagcggactctggtcttctgcacacaattataagagctggcagtttacaagataaagatggtggcttgcgagagttgattgttgggaaggatgatgagatcctgaaaacagaaacaagaactattgccagggccgatgttgcagaagtttgcatacaggccttgctatttgaacaggcaaagtttaaggcatttgatctgtcatcaaaaccagaaggtgaagggacgccaactacagactttaggacacgttttgcacaagttaatagtcgcttctaaagagataatattgttcttgccaacaaattgagggtattcttttataaattgatatgaaatctgtattaaggatgcatgtataatggctaatatagcttggacatgaagagcaagcgttgaagctgtacttcacataccttgattaatagcaatgtcacctatgctcaagcccttcagcaggaggtggcaggaagaagagcatgtctttctctccaggaatgcaagcagccttatatagagataaaagaaaatctttgtacaacaagacttgaggtgccctatggtgttgttacactgaacagtgagcaacaccacccatggggatgtcgacatccaggacgcagacagagaatggcccaggctgtcttcccatcctctctacaatttagccgctcagctctgcagtttggaaggtcgataacagccaaagattgggagcaaagagcgagaccagcctgaccagctcagctggttaggctaccgtgctgctcatgaaggagtttgacaataccatctatatagcatgaagatcaatgtgaataatctgatggatttatatcctaacaataggcctactaatgctttacaaaaatctgttgaccatatagatgaagccataattgttcatccaaatgggaacgatactattacacatgaagttttcgttcacccatatggcaaactacaagagatgcatatacttcagaatgatatcatcctactttcctgtgtgctgtagcctgtagttttttttaaaaaattttgttttagcagttgactgtgtttcatg

SEQ ID NO: 206562 - DNA, 1390 bp, Zea Mays
ctcaagtcctgctcatttgtcatttctcatccgccagattcttacaagaagttgaaggagagggcaggcgagtttgtggcatgaggcctagtgaggacaggagagagcaaggtcaaaatcgtaggcggtgacgacgtgctcgtcagcgacataagagaccccgagagcatagctctggcaattgagggcatcgacgcgctcatcatcctcaccagcgcggtcccgaagatgtaggtttgatcctaccggagggtgccctgatttaattttgaagaagggagttatcttgagcaggtgtggaagcgcaaggcagaacagtatctagcggactctggtcttctgcacacaattataagagctggcagtttacaagataaagatggtggcttgcgagagttgattgttgggaaggatgatgagatcctgaaaacagaaacaagaactattgccagggccgatgttgcagaagtttgcatacaggccttgctatttgaacaggcaaagtttaaggcatttgatctgtcatcaaaaccagaaggtgaagggacgccaactacagactttaggacacgttttgcacaagttaatagtcgcttctaaagagataatattgttcttgccaacaaattgagggtattcttttataaattgatatgaaatctgtattaaggatgcatgtataatggctaatatagcttggacatgaagagcaagcgttgaagctgtacttcacataccttgattaatagcaatgtcacctatgctcaagcccttcagcaggaggtggcaggaagaagagcatgtctttctctccaggaatgcaagcagccttatatagagataaaagaaaatctttgtacaacaagacttgaggtgccctatggtgttgttacactgaacagtgagcaacaccacccatggggatgtcgacatccaggacgcagacagagaatggcccaggctgtcttcccatcctctctacaatttagccgctcagctctgcagtttggaaggtcgataacagccaaagattgggagcaaagagcgagaccagcctgaccagctcagctggttaggctaccgtgctgctcatgaaggagtttgacaataccatctatatagcatgaagatcaatgtgaataatctgatggatttatatcctaacaataggcctactaatgctttacaaaaatctgttgaccatatagatgaagccataattgttcatccaaatgggaacgatactattacacatgaagttttcgttcacccatatggcaaactacaagagatgcatatacttcagaatgatatcatcctactttcctgtgtgctgtagcctgtagttttttttaaaaaattttgttttagcagttgactgtgtttcatg

SEQ ID NO: 206563 - DNA, 2177 bp, Zea Mays
cagcggactccccctcccccaaccccgcgctccacttacgtgactcgcgcgcgacacgcgagcaggaggttgagacgaagacccgccgccaccggggatggcccaagcgccgccgcgacctagggagcgaggatgaggagctcgaggaggtgcgccgcatgcagaggattcctgcaaggaggagaacatggaggtggtgcccgtagtagtaggggaaccgatcaagagcactggcgaggggaagaaatagaagaagcactatgcttccttggagtaccacgtcaacagcttggagctggtgagcccatggcttgttcctcctgcccttccctcccctcccctccctgctcccccgactctgcgcggatctggtactatctagcccatagagccgtgttggacaacacaaccacgaccacaaggcatcgctgtggagcagtcggagccatttgtgatgcccccctcccgcttgcattgaccacagaggcacaccggagcatccggcgaggacctgcacgcttgaaaccgacgacgaggccatgctggggaattgcatattgtgtcaagggtggtccagaaaaagagctaaaagcaatgcagtacttggagagaagagagtgtgagtatgaccagaagatatccattgatttctacaaggaaggagatcccttgaaaccagctgtgatgggcgtcttagtgttcgtttccactccagatccaattggcaacaagtactatcttggccctgctcctttgcagaatatggcaaggccacgaagatgattcgatcatagagcttgcaaacaaggtgaggaaggtgctcaacagaacaaaggagaccaaaatcactgggcgcgtgaactcttctactacctcaagggtaagcaggtggactatggcgaggagcacagcaaggcttgcggccacaacaggtttgggagaatatatcacacaggtcactatcctgtttgttatgagcacaacccagtgcattttgtggggcactctgctggcgcgcaggttgtgagggtgctgcatcagatgcttgccgacaaggagaccgtggaggtggttctggagggagcatctttataagggctgcatcgataagctagatgtgatgatgagaaatcacttcgtatgtctcaaatgagcttggcgaagagatttggctaatccagatcttttgttgcctccactctgatggaatatggttttggatcctgaaggagaaagcgggtcctaagggaggaagcagagcaattggagctcgaactggagatgcatagagagttaagggagtagatgctgcaactcttgtggcctacgctcgagctgaagccagattagtgatgaggggggcagttgtccttgctgctaagcatgcaaaaacaatggtcgggaagccattgttgtatggaataggtaccctgttggtcatgtcgctgaggacactgtatggagtgggttgtgtttttggcgcacggtggttcctctacatgacaagcgtatctccatcgctgcaaattgagtttgtatatcgcaagttcttcggcgggtactgcaactgctcataccatgtggcacagaacacttctttgcatgaattccttgatagttatctacaattcaggcacaggtggtatgattctccaggatttttttgggactggtcattgcgggcatgttgagggtatttagttaagcaattttgttattattttagattgagtacatcagctcgctggttgcttacattttcttggtccctagagctactcacctcgctggttgtttacatttccttgttcctgggatccactttcctaaaatgaatctgttttaatcttgtaactggaactggtggatattttgatagggaaattacgatgattgatttctagatttgagtttcagattttttttgcttgtactggcctcttgagattggaagactggcgttgttgtgggcttgtggcataggcttcctttgtgggtctttttctcatctgatgtaaacaatattttttagtctggtaacggtgcaaaggcaaatggggcatcatcacatatctaggtcgtattttcgacagacagatataaaacggagtgggaatgcctcgattgatatcatgtccaagttcttcaagctgatggtggggtgacaaaaatatgat

SEQ ID NO: 206564 - DNA, 1933 bp, Zea Mays
aaccccgcgctccacttacgtgactcgcgcgcgacacgcgagcaggaggttgagacgaagacccgccgccaccggggatggcccaagcgccgccgcgacctagggagcgaggatgaggagctcgaggaggtgcgccgcatgcagaggattcctgcaaggaggagaacatggaggtggtgcccgtagtagtaggggaaccgatcaagagcactggcgaggggaagaaatagaagaagcactatgcttccttggagtaccacgtcaacagcttggagctgcttgcattgaccacagaggcacaccggagcatccggcgaggacctgcacgcttgaaaccgacgacgaggccatgctggggaattgcatattgtgtcaagggtggtccagaaaaagagctaaaagcaatgcagtacttggagagaagagagtgtgagtatgaccagaagatatccattgatttctacaaggaaggagatcccttgaaaccagctgtgatgggcgtcttagtgttcgtttccactccagatccaattggcaacaagtactatcttggccctgctcctttgcagaatatggcaaggccacgaagatgattcgatcatagagcttgcaaacaaggtgaggaaggtgctcaacagaacaaaggagaccaaaatcactgcgatgcagggcgcgtgaactcttctactacctcaagggtaagcaggtggactatggcgaggagcacagcaaggcttgcggccacaacaggtttgggagaatatatcacacaggtcactatcctgtttgttatgagcacaacccagtgcattttgtggggcactctgctggcgcgcaggttgtgagggtgctgcatcagatgcttgccgacaaggagaccgtggaggtggttctggagggagcatctttataagggctgcatcgataagctagatgtgatgatgagaaatcacttcgtatgtctcaaatgagcttggcgaagagatttggctaatccagatcttttgttgcctccactctgatggaatatggttttggatcctgaaggagaaagcgggtcctaagggaggaagcagagcaattggagctcgaactggagatgcatagagagttaagggagtagatgctgcaactcttgtggcctacgctcgagctgaagccagattagtgatgaggggggcagttgtccttgctgctaagcatgcaaaaacaatggtcgggaagccattgttgtatggaataggtaccctgttggtcatgtcgctgaggacactgtatggagtgggttgtgtttttggcgcacggtggttcctctacatgacaagcgtatctccatcgctgcaaattgagttttctggtaacggtgcaaaggcaaatggggcatcatcacatatctaggtcgtattttcgacagacagatataaaacggagtgggaatgcctcgattgatatcatgtccaagttcttcaagctgatggtggtaggtgttttgctttgctactttctcattgttgaagttgtctccatgttgtattcactaaagaacccctatattatttattttggaacaaacctttttaatggtggattagactgattcggtgaggtagctgtgcttttatggattgaggttggtttggtttggatctaagcccattagcagctctcattttgtgctgacaggttgccaaattacaatttaaagtacctgattagctgatttgctatgtactatgacatttaagtatttaacgtatcgataagaaattggttgttttattagttagtagtacttggattgattcacatgcaacattaataccatcatgtttaatgttctgtaacttcctgccatcatgtctgaaatagaaaataatctccatggggcttttagatcgtcaaaccaagtttggaaacaagaactccagtttgg

SEQ ID NO: 206565 - DNA, 5860 bp, Zea Mays
aaccccgcgctccacttacgtgactcgcgcgcgacacgcgagcaggaggttgagacgaagacccgccgccaccggggatggcccaagcgccgccgcgacctagggagcgaggatgaggagctcgaggaggtgcgccgcatgcagaggattcctgcaaggaggagaacatggaggtggtgcccgtagtagtaggggaaccgatcaagagcactggcgaggggaagaaatagaagaagcactatgcttccttggagtaccacgtcaacagcttggagctggtgagcccatggcttgttcctcctgcccttccctcccctcccctccctgctcccccgactctgcgcggatctggtactatctagcccatagagccgtgttggacaacacaaccacgaccacaaggcatcgctgtggagcagtcggagccatttgtgatgcccccctcccgcttgcattgaccacagaggcacaccggagcatccggcgaggacctgcacgcttgaaaccgacgacgaggccatgctggggaattgcatattgtgtcaagggtggtccagaaaaagagctaaaagcaatgcagtacttggagagaagagagtgtgagtatgaccagaagatatccattgatttctacaaggaaggagatcccttgaaaccagctgtgatgggcgtcttagtgttcgtttccactccagatccaattggcaacaagtactatcttggccctgctcctttgcagaatatggcaaggccacgaagatgattcgatcatagagcttgcaaacaaggtgaggaaggtgctcaacagaacaaaggagaccaaaatcactgcgatgcagggcgcgtgaactcttctactacctcaagggtaagcaggtggactatggcgaggagcacagcaaggcttgcggccacaacaggtttgggagaatatatcacacaggtcactatcctgtttgttatgagcacaacccagtgcattttgtggggcactctgctggcgcgcaggttgtgagggtgctgcatcagatgcttgccgacaaggagaccgtggaggtggttctggagggagcatctttataagggctgcatcgataagctagatgtgatgatgagaaatcacttcgtatgtctcaaatgagcttggcgaagagatttggctaatccagatcttttgttgcctccactctgatggaatatggttttggatcctgaaggagaaagcgggtcctaagggaggaagcagagcaattggagctcgaactggagatgcatagagagttaagggagtagatgctgcaactcttgtggcctacgctcgagctgaagccagattagtgatgaggggggcagttgtccttgctgctaagcatgcaaaaacaatggtcgggaagccattgttgtatggaataggtaccctgttggtcatgtcgctgaggacactgtatggagtgggttgtgtttttggcgcacggtggttcctctacatgacaagcgtatctccatcgctgcaaattgagtttgtaagtggtccgaaacaactaggtagctactagctattgagtatttaggagtcaatgcttaatgatatttacttaatgcttaattgcttatcgaagtaagaaccctgttttttgtattgacatggtggtgctctttaggagagaagccaggggtaaaaaacaattagttctgcagattttattttatttcgatcagttgtgagagtttcttacaattggatgacattgctttgtagaaagaaaatacaaggtattttttagtaggaaagagttgcattttctgtgctcatatacagctttgccgttcgttttctaaaatgttgaaaaggatcatgtcattggtgtaacactcctgtttgtcttaattgaagaagtggtaccaacgagatgtcatttcctatcataattttatctgatgcatatgttgtagtagagctctcagcaattgattcctctcataaattggtggctagagctcgtgtggccctctcatcggatttggtgtctgagccctcgctagatctcgcaccctcatcgaagccctcattggattcgacaccctcactggaggttgcaccgcaatgggatctaggaaccgtagacagcctcgaccacccacgtggattgttgcctctgtggatgagacgcagcgccaaggggccagaggaaactacgtgatgaacctcacatcacagctcatgtcatggttctgagacaacccgtggccgccggcgcgccaccgccgggacgtgagttcgtcggagcgtcagcgagtcgctacaacccaggtgagtttgttacggatatgattctctggattattctgatcgtagttttgccaactggccaagtacagagtatatatccggtctcttaacaggccattacagactccaaataaacccataacaccagattaggacactaaacccggcccacggcccaaccctagagagtacttactgctcagacatgacaattccccgggcctcagaatccgcttgtccccaagcgatggcgtctggaaaacggttcttcaacacatagtaatcttcccaagttgctgattccactggcacaccagaccagcggataagaacctgtggaacagcttgatggcctttgcgcacaagacgtcgatccaggatttcttcaggaacaatgccagttcttgagaggtccaccaatggaggcaaagaagtaaaaactggagtatatgatggataataaggtttcagctgggaaacgtgaaacaccggatgaacttgagcatcggctggaagatccaatttgtaagctgccgcaccaatcttagccaacactctgaaaggaccaaaaaacttgaaagccaactttgggcaaggacggttcaccacagtcttttgagcatatggctgaagcttgagcagcaccatctccccaacctgaaactctcttgctgtccttccccgatcagccatttgtttcatccgattttgagctcgagcgagttgttctttgagatgagttgagaaagcaaccctgtcagccagccaatctgttactgacccctcctccaggacaccagactgaggtaacgccaacatcggggcatcatatccatatagtgctttgaaaggcgtacaacccagactagtatggtaagtagtattgtaccaaaattctgccaatgctaaccacaacttccacttagccggctgagcattcactgcacatcttagatatgtctccaaacattgattcacccgttcactttgaccgtcagtctgtggatgataggcagtggaaaacagcaacttaacatccataagttgaaacaggtgcttccagaaagagctaatgaaaatcttgtctctgtctgacacaatggacttgggaggtccatgtaacttcaccacctgatccaaaaatatttgagccactccctgggcagtgaaagggtgcctgagtggaagaaaatgcccatatttggtgaatctgtccactactaccatgatggtgtcataaccctcagactttggtaacccttcgataaagtccattgtgacatctgcccaaatgccatgtggaatcggaagaggctgtaacagtccggctggatgagtcctttctggtttcgcctgttgacaggtcaagcactgttgtacaaattgagtcacatccaccttaagtcccttccaccagaaaagtttcttgactctctgataagtggcatgtatgccagaatgcccccccatggcactgtcatgtaaagctgctatcagtttggttctaagggcagagttggaccctatccagatttggtcacctttcctgacaataccttgctgcaagctaaacccttgttcatttggactatgcaccaacaactgagtaattaactcctgggcttcagcatctgtctcataggaattcaaaatctcttgaatccacactggttgcacttcagaaagaacagccaactccatcatagcccccaccctggataaagcatcagctactcgattctctaccccttttttgtaaacgatctgaaactgaaggcccattaatcttgccatagctttcctttgtagctcagactgaagttgctgctctcctaaaaatgtaagtgacttatgatcagtcttgataacaaaaggactccgctgcagatatggcctccatttctccacagcaagaattaaggctaaaaactctttatcatagatagataggtgtctattcctttctcctaaagccttgctgatataagctatgggctttccttgtttgcatgagcacagcccccattccggtgtcacatgcatctgtctctaccacaaaaggaagatcaaatcgtggtagagccaagacaggagtagtcgtcatagctttctttagggcctcaaatgctgcttgagcttcatcattccacttgaaaccatgctgtttttgcaacagctgagtgaggggtcgtgccaaaactccatacccacacacaaacttcctgtagtaccctgtaagccccaaaaatcccctcaactcagtgatattctgtggtctaggccatgccagcatagcagctgtctttgcagggtccgtcgcgaccccttcactggatataatatgtccaagatatctcagctctttcttcgcaaacacacacttcttatgcttcaagaaaaacttctgttctctgagcttggacaataccctcctaatatgtttgtagtgctcctccagactcggactgtagatcaatatatcatctaagaataccataacaaatttccgtagaaatggttctagcactgtgttcatggcacactggaatgttgctggtgcatttgtcaagccaaaaggcataactcggaattggtaatggccatgatgagttttgaacgcagttttaccctcatcctcctctgccatccgaatctgatgataccccgcagtcatgtctagacttgtgaaaaactgagttcctgccaactcatccagaatctcatccaccaagggcatgggaaaacggttcttgatggtcatggagttcaaccttctataatcaatacaaaacctccagctgccatctttcttctgaaccagtaatacgggagatgcaaatggactggcactgggtactatcaatcctgcagttaataactctgtcacttgcctttcaatttctgtcttgtggaaaggtgaatacctataaggcctggaattcaccggaatagaccctgggagcaatggtatatgatggtcatacattctaaccggaggtagtccagtgggcacagcaaacacatcttcaaactccttaagtatctgcctcagcggttcctgttccttttcagcaccttcctcctgtattgcttcgagcatcacaaaagcccacacttcatttcccttcatccacctgctcagctgaacagctgacacttgcaatacctctgtacttcctacgccatcccccttcagctgcactctgacccctttatcccagaatgtcagcaccttgttgtcccaatcacactccataggactatggctctttagccaatcataccccaatatagcatcataggcttctaaatccagtaccctcatgttactggcataagtgtgcccttctgcccaccactccagcgctgccaccctttttgaactcaacatgaactctccatttgccaccttgactcttaccggtgaaacaacttcagttgataaagccaactgatctaccatcctctggctgacaaagcttgaggaactgcccgagtctaccaacatcaccaacacttgattctggatcagtgcccgaactctcatacaattctcacggtcagttccac

SEQ ID NO: 206566 - DNA, 5852 bp, Zea Mays
aaccccgcgctccacttacgtgactcgcgcgcgacacgcgagcaggaggttgagacgaagacccgccgccaccggggatggcccaagcgccgccgcgacctagggagcgaggatgaggagctcgaggaggtgcgccgcatgcagaggattcctgcaaggaggagaacatggaggtggtgcccgtagtagtaggggaaccgatcaagagcactggcgaggggaagaaatagaagaagcactatgcttccttggagtaccacgtcaacagcttggagctggtgagcccatggcttgttcctcctgcccttccctcccctcccctccctgctcccccgactctgcgcggatctggtactatctagcccatagagccgtgttggacaacacaaccacgaccacaaggcatcgctgtggagcagtcggagccatttgtgatgcccccctcccgcttgcattgaccacagaggcacaccggagcatccggcgaggacctgcacgcttgaaaccgacgacgaggccatgctggggaattgcatattgtgtcaagggtggtccagaaaaagagctaaaagcaatgcagtacttggagagaagagagtgtgagtatgaccagaagatatccattgatttctacaaggaaggagatcccttgaaaccagctgtgatgggcgtcttagtgttcgtttccactccagatccaattggcaacaagtactatcttggccctgctcctttgcagaatatggcaaggccacgaagatgattcgatcatagagcttgcaaacaaggtgaggaaggtgctcaacagaacaaaggagaccaaaatcactgggcgcgtgaactcttctactacctcaagggtaagcaggtggactatggcgaggagcacagcaaggcttgcggccacaacaggtttgggagaatatatcacacaggtcactatcctgtttgttatgagcacaacccagtgcattttgtggggcactctgctggcgcgcaggttgtgagggtgctgcatcagatgcttgccgacaaggagaccgtggaggtggttctggagggagcatctttataagggctgcatcgataagctagatgtgatgatgagaaatcacttcgtatgtctcaaatgagcttggcgaagagatttggctaatccagatcttttgttgcctccactctgatggaatatggttttggatcctgaaggagaaagcgggtcctaagggaggaagcagagcaattggagctcgaactggagatgcatagagagttaagggagtagatgctgcaactcttgtggcctacgctcgagctgaagccagattagtgatgaggggggcagttgtccttgctgctaagcatgcaaaaacaatggtcgggaagccattgttgtatggaataggtaccctgttggtcatgtcgctgaggacactgtatggagtgggttgtgtttttggcgcacggtggttcctctacatgacaagcgtatctccatcgctgcaaattgagtttgtaagtggtccgaaacaactaggtagctactagctattgagtatttaggagtcaatgcttaatgatatttacttaatgcttaattgcttatcgaagtaagaaccctgttttttgtattgacatggtggtgctctttaggagagaagccaggggtaaaaaacaattagttctgcagattttattttatttcgatcagttgtgagagtttcttacaattggatgacattgctttgtagaaagaaaatacaaggtattttttagtaggaaagagttgcattttctgtgctcatatacagctttgccgttcgttttctaaaatgttgaaaaggatcatgtcattggtgtaacactcctgtttgtcttaattgaagaagtggtaccaacgagatgtcatttcctatcataattttatctgatgcatatgttgtagtagagctctcagcaattgattcctctcataaattggtggctagagctcgtgtggccctctcatcggatttggtgtctgagccctcgctagatctcgcaccctcatcgaagccctcattggattcgacaccctcactggaggttgcaccgcaatgggatctaggaaccgtagacagcctcgaccacccacgtggattgttgcctctgtggatgagacgcagcgccaaggggccagaggaaactacgtgatgaacctcacatcacagctcatgtcatggttctgagacaacccgtggccgccggcgcgccaccgccgggacgtgagttcgtcggagcgtcagcgagtcgctacaacccaggtgagtttgttacggatatgattctctggattattctgatcgtagttttgccaactggccaagtacagagtatatatccggtctcttaacaggccattacagactccaaataaacccataacaccagattaggacactaaacccggcccacggcccaaccctagagagtacttactgctcagacatgacaattccccgggcctcagaatccgcttgtccccaagcgatggcgtctggaaaacggttcttcaacacatagtaatcttcccaagttgctgattccactggcacaccagaccagcggataagaacctgtggaacagcttgatggcctttgcgcacaagacgtcgatccaggatttcttcaggaacaatgccagttcttgagaggtccaccaatggaggcaaagaagtaaaaactggagtatatgatggataataaggtttcagctgggaaacgtgaaacaccggatgaacttgagcatcggctggaagatccaatttgtaagctgccgcaccaatcttagccaacactctgaaaggaccaaaaaacttgaaagccaactttgggcaaggacggttcaccacagtcttttgagcatatggctgaagcttgagcagcaccatctccccaacctgaaactctcttgctgtccttccccgatcagccatttgtttcatccgattttgagctcgagcgagttgttctttgagatgagttgagaaagcaaccctgtcagccagccaatctgttactgacccctcctccaggacaccagactgaggtaacgccaacatcggggcatcatatccatatagtgctttgaaaggcgtacaacccagactagtatggtaagtagtattgtaccaaaattctgccaatgctaaccacaacttccacttagccggctgagcattcactgcacatcttagatatgtctccaaacattgattcacccgttcactttgaccgtcagtctgtggatgataggcagtggaaaacagcaacttaacatccataagttgaaacaggtgcttccagaaagagctaatgaaaatcttgtctctgtctgacacaatggacttgggaggtccatgtaacttcaccacctgatccaaaaatatttgagccactccctgggcagtgaaagggtgcctgagtggaagaaaatgcccatatttggtgaatctgtccactactaccatgatggtgtcataaccctcagactttggtaacccttcgataaagtccattgtgacatctgcccaaatgccatgtggaatcggaagaggctgtaacagtccggctggatgagtcctttctggtttcgcctgttgacaggtcaagcactgttgtacaaattgagtcacatccaccttaagtcccttccaccagaaaagtttcttgactctctgataagtggcatgtatgccagaatgcccccccatggcactgtcatgtaaagctgctatcagtttggttctaagggcagagttggaccctatccagatttggtcacctttcctgacaataccttgctgcaagctaaacccttgttcatttggactatgcaccaacaactgagtaattaactcctgggcttcagcatctgtctcataggaattcaaaatctcttgaatccacactggttgcacttcagaaagaacagccaactccatcatagcccccaccctggataaagcatcagctactcgattctctaccccttttttgtaaacgatctgaaactgaaggcccattaatcttgccatagctttcctttgtagctcagactgaagttgctgctctcctaaaaatgtaagtgacttatgatcagtcttgataacaaaaggactccgctgcagatatggcctccatttctccacagcaagaattaaggctaaaaactctttatcatagatagataggtgtctattcctttctcctaaagccttgctgatataagctatgggctttccttgtttgcatgagcacagcccccattccggtgtcacatgcatctgtctctaccacaaaaggaagatcaaatcgtggtagagccaagacaggagtagtcgtcatagctttctttagggcctcaaatgctgcttgagcttcatcattccacttgaaaccatgctgtttttgcaacagctgagtgaggggtcgtgccaaaactccatacccacacacaaacttcctgtagtaccctgtaagccccaaaaatcccctcaactcagtgatattctgtggtctaggccatgccagcatagcagctgtctttgcagggtccgtcgcgaccccttcactggatataatatgtccaagatatctcagctctttcttcgcaaacacacacttcttatgcttcaagaaaaacttctgttctctgagcttggacaataccctcctaatatgtttgtagtgctcctccagactcggactgtagatcaatatatcatctaagaataccataacaaatttccgtagaaatggttctagcactgtgttcatggcacactggaatgttgctggtgcatttgtcaagccaaaaggcataactcggaattggtaatggccatgatgagttttgaacgcagttttaccctcatcctcctctgccatccgaatctgatgataccccgcagtcatgtctagacttgtgaaaaactgagttcctgccaactcatccagaatctcatccaccaagggcatgggaaaacggttcttgatggtcatggagttcaaccttctataatcaatacaaaacctccagctgccatctttcttctgaaccagtaatacgggagatgcaaatggactggcactgggtactatcaatcctgcagttaataactctgtcacttgcctttcaatttctgtcttgtggaaaggtgaatacctataaggcctggaattcaccggaatagaccctgggagcaatggtatatgatggtcatacattctaaccggaggtagtccagtgggcacagcaaacacatcttcaaactccttaagtatctgcctcagcggttcctgttccttttcagcaccttcctcctgtattgcttcgagcatcacaaaagcccacacttcatttcccttcatccacctgctcagctgaacagctgacacttgcaatacctctgtacttcctacgccatcccccttcagctgcactctgacccctttatcccagaatgtcagcaccttgttgtcccaatcacactccataggactatggctctttagccaatcataccccaatatagcatcataggcttctaaatccagtaccctcatgttactggcataagtgtgcccttctgcccaccactccagcgctgccaccctttttgaactcaacatgaactctccatttgccaccttgactcttaccggtgaaacaacttcagttgataaagccaactgatctaccatcctctggctgacaaagcttgaggaactgcccgagtctaccaacatcaccaacacttgattctggatcagtgcccgaactctcatacaattctcacggtcagttccac

SEQ ID NO: 206567 - DNA, 5735 bp, Zea Mays
aaccccgcgctccacttacgtgactcgcgcgcgacacgcgagcaggaggttgagacgaagacccgccgccaccggggatggcccaagcgccgccgcgacctagggagcgaggatgaggagctcgaggaggtgcgccgcatgcagaggattcctgcaaggaggagaacatggaggtggtgcccgtagtagtaggggaaccgatcaagagcactggcgaggggaagaaatagaagaagcactatgcttccttggagtaccacgtcaacagcttggagctgcttgcattgaccacagaggcacaccggagcatccggcgaggacctgcacgcttgaaaccgacgacgaggccatgccatctttgcatgccccgcctttttacacggtgacacagtgttacatgggcaagtggggaattgcatattgtgtcaagggtggtccagaaaaagagctaaaagcaatgcagtacttggagagaagagagtgtgagtatgaccagaagatatccattgatttctacaaggaaggagatcccttgaaaccagctgtgatgggcgtcttagtgttcgtttccactccagatccaattggcaacaagtactatcttggccctgctcctttgcagaatatggcaaggccacgaagatgattcgatcatagagcttgcaaacaaggtgaggaaggtgctcaacagaacaaaggagaccaaaatcactgggcgcgtgaactcttctactacctcaagggtaagcaggtggactatggcgaggagcacagcaaggcttgcggccacaacaggtttgggagaatatatcacacaggtcactatcctgtttgttatgagcacaacccagtgcattttgtggggcactctgctggcgcgcaggttgtgagggtgctgcatcagatgcttgccgacaaggagaccgtggaggtggttctggagggagcatctttataagggctgcatcgataagctagatgtgatgatgagaaatcacttcgtatgtctcaaatgagcttggcgaagagatttggctaatccagatcttttgttgcctccactctgatggaatatggttttggatcctgaaggagaaagcgggtcctaagggaggaagcagagcaattggagctcgaactggagatgcatagagagttaagggagtagatgctgcaactcttgtggcctacgctcgagctgaagccagattagtgatgaggggggcagttgtccttgctgctaagcatgcaaaaacaatggtcgggaagccattgttgtatggaataggtaccctgttggtcatgtcgctgaggacactgtatggagtgggttgtgtttttggcgcacggtggttcctctacatgacaagcgtatctccatcgctgcaaattgagtttgtaagtggtccgaaacaactaggtagctactagctattgagtatttaggagtcaatgcttaatgatatttacttaatgcttaattgcttatcgaagtaagaaccctgttttttgtattgacatggtggtgctctttaggagagaagccaggggtaaaaaacaattagttctgcagattttattttatttcgatcagttgtgagagtttcttacaattggatgacattgctttgtagaaagaaaatacaaggtattttttagtaggaaagagttgcattttctgtgctcatatacagctttgccgttcgttttctaaaatgttgaaaaggatcatgtcattggtgtaacactcctgtttgtcttaattgaagaagtggtaccaacgagatgtcatttcctatcataattttatctgatgcatatgttgtagtagagctctcagcaattgattcctctcataaattggtggctagagctcgtgtggccctctcatcggatttggtgtctgagccctcgctagatctcgcaccctcatcgaagccctcattggattcgacaccctcactggaggttgcaccgcaatgggatctaggaaccgtagacagcctcgaccacccacgtggattgttgcctctgtggatgagacgcagcgccaaggggccagaggaaactacgtgatgaacctcacatcacagctcatgtcatggttctgagacaacccgtggccgccggcgcgccaccgccgggacgtgagttcgtcggagcgtcagcgagtcgctacaacccaggtgagtttgttacggatatgattctctggattattctgatcgtagttttgccaactggccaagtacagagtatatatccggtctcttaacaggccattacagactccaaataaacccataacaccagattaggacactaaacccggcccacggcccaaccctagagagtacttactgctcagacatgacaattccccgggcctcagaatccgcttgtccccaagcgatggcgtctggaaaacggttcttcaacacatagtaatcttcccaagttgctgattccactggcacaccagaccagcggataagaacctgtggaacagcttgatggcctttgcgcacaagacgtcgatccaggatttcttcaggaacaatgccagttcttgagaggtccaccaatggaggcaaagaagtaaaaactggagtatatgatggataataaggtttcagctgggaaacgtgaaacaccggatgaacttgagcatcggctggaagatccaatttgtaagctgccgcaccaatcttagccaacactctgaaaggaccaaaaaacttgaaagccaactttgggcaaggacggttcaccacagtcttttgagcatatggctgaagcttgagcagcaccatctccccaacctgaaactctcttgctgtccttccccgatcagccatttgtttcatccgattttgagctcgagcgagttgttctttgagatgagttgagaaagcaaccctgtcagccagccaatctgttactgacccctcctccaggacaccagactgaggtaacgccaacatcggggcatcatatccatatagtgctttgaaaggcgtacaacccagactagtatggtaagtagtattgtaccaaaattctgccaatgctaaccacaacttccacttagccggctgagcattcactgcacatcttagatatgtctccaaacattgattcacccgttcactttgaccgtcagtctgtggatgataggcagtggaaaacagcaacttaacatccataagttgaaacaggtgcttccagaaagagctaatgaaaatcttgtctctgtctgacacaatggacttgggaggtccatgtaacttcaccacctgatccaaaaatatttgagccactccctgggcagtgaaagggtgcctgagtggaagaaaatgcccatatttggtgaatctgtccactactaccatgatggtgtcataaccctcagactttggtaacccttcgataaagtccattgtgacatctgcccaaatgccatgtggaatcggaagaggctgtaacagtccggctggatgagtcctttctggtttcgcctgttgacaggtcaagcactgttgtacaaattgagtcacatccaccttaagtcccttccaccagaaaagtttcttgactctctgataagtggcatgtatgccagaatgcccccccatggcactgtcatgtaaagctgctatcagtttggttctaagggcagagttggaccctatccagatttggtcacctttcctgacaataccttgctgcaagctaaacccttgttcatttggactatgcaccaacaactgagtaattaactcctgggcttcagcatctgtctcataggaattcaaaatctcttgaatccacactggttgcacttcagaaagaacagccaactccatcatagcccccaccctggataaagcatcagctactcgattctctaccccttttttgtaaacgatctgaaactgaaggcccattaatcttgccatagctttcctttgtagctcagactgaagttgctgctctcctaaaaatgtaagtgacttatgatcagtcttgataacaaaaggactccgctgcagatatggcctccatttctccacagcaagaattaaggctaaaaactctttatcatagatagataggtgtctattcctttctcctaaagccttgctgatataagctatgggctttccttgtttgcatgagcacagcccccattccggtgtcacatgcatctgtctctaccacaaaaggaagatcaaatcgtggtagagccaagacaggagtagtcgtcatagctttctttagggcctcaaatgctgcttgagcttcatcattccacttgaaaccatgctgtttttgcaacagctgagtgaggggtcgtgccaaaactccatacccacacacaaacttcctgtagtaccctgtaagccccaaaaatcccctcaactcagtgatattctgtggtctaggccatgccagcatagcagctgtctttgcagggtccgtcgcgaccccttcactggatataatatgtccaagatatctcagctctttcttcgcaaacacacacttcttatgcttcaagaaaaacttctgttctctgagcttggacaataccctcctaatatgtttgtagtgctcctccagactcggactgtagatcaatatatcatctaagaataccataacaaatttccgtagaaatggttctagcactgtgttcatggcacactggaatgttgctggtgcatttgtcaagccaaaaggcataactcggaattggtaatggccatgatgagttttgaacgcagttttaccctcatcctcctctgccatccgaatctgatgataccccgcagtcatgtctagacttgtgaaaaactgagttcctgccaactcatccagaatctcatccaccaagggcatgggaaaacggttcttgatggtcatggagttcaaccttctataatcaatacaaaacctccagctgccatctttcttctgaaccagtaatacgggagatgcaaatggactggcactgggtactatcaatcctgcagttaataactctgtcacttgcctttcaatttctgtcttgtggaaaggtgaatacctataaggcctggaattcaccggaatagaccctgggagcaatggtatatgatggtcatacattctaaccggaggtagtccagtgggcacagcaaacacatcttcaaactccttaagtatctgcctcagcggttcctgttccttttcagcaccttcctcctgtattgcttcgagcatcacaaaagcccacacttcatttcccttcatccacctgctcagctgaacagctgacacttgcaatacctctgtacttcctacgccatcccccttcagctgcactctgacccctttatcccagaatgtcagcaccttgttgtcccaatcacactccataggactatggctctttagccaatcataccccaatatagcatcataggcttctaaatccagtaccctcatgttactggcataagtgtgcccttctgcccaccactccagcgctgccaccctttttgaactcaacatgaactctccatttgccaccttgactcttaccggtgaaacaacttcagttgataaagccaactgatctaccatcctctggctgacaaagcttgaggaactgcccgagtctaccaacatcaccaacacttgattctggatcagtgcccgaactctcatacaattctcacggtcagttccac

SEQ ID NO: 206568 - DNA, 1272 bp, Zea Mays
aaccccgcgctccacttacgtgactcgcgcgcgacacgcgagcaggaggttgagacgaagacccgccgccaccggggatggcccaagcgccgccgcgacctagggagcgaggatgaggagctcgaggaggtgcgccgcatgcagaggattcctgcaaggaggagaacatggaggtggtgcccgtagtagtaggggaaccgatcaagagcactggcgaggggaagaaatagaagaagcactatgcttccttggagtaccacgtcaacagcttggagctggtgagcccatggcttgttcctcctgcccttccctcccctcccctccctgctcccccgactctgcgcggatctggtactatctagcccatagagccgtgttggacaacacaaccacgaccacaaggcatcgctgtggagcagtcggagccatttgtgatgcccccctcccgcttgcattgaccacagaggcacaccggagcatccggcgaggacctgcacgcttgaaaccgacgacgaggccatgctggggaattgcatattgtgtcaagggtggtccagaaaaagagctaaaagcaatgcagtacttggagagaagagagtgtgagtatgaccagaagatatccattgatttctacaaggaaggagatcccttgaaaccagctgtgatgggcgtcttagtgttcgtttccactccagatccaattggcaacaagtactatcttggccctgctcctttgcagaatatggcaaggcaaattgctacaaccaatggctctactggctataatagggattacctgttctcaatggagaaggcattagccagcattagccacgaagatgattcgatcatagagcttgcaaacaaggtgaggaaggtgctcaacagaacaaaggagaccaaaatcactgggcgcgtgaactcttctactacctcaagggtaagcaggtggactatggcgaggagcacagcaaggcttgcggccacaacaggtttgggagaatatatcacacaggtcactatcctgtttgttatgagcacaacccagtgcattttgtggggcactctgctggcgcgcaggttgtgagggtgctgcatcagatgcttgccgacaagagggatggttcatgtgagctggagtacaggattagagcacccaaattaggaattagtcatgcctatcatcccgcttgagacgaaggatgagcttgggctgcttcatccagcattcaaggctgtgaagacttccacatgataattagagagaccgtg

SEQ ID NO: 206569 - DNA, 1238 bp, Zea Mays
gggtcagcggactccccctcccccaaccccgcgctccacttacgtgactcgcgcgcgacacgcgagcaggaggttgagacgaagacccgccgccaccggggatggcccaagcgccgccgcgacctagggagcgaggatgaggagctcgaggaggtgcgccgcatgcagaggattcctgcaaggaggagaacatggaggtggtgcccgtagtagtaggggaaccgatcaagagcactggcgaggggaagaaatagaagaagcactatgcttccttggagtaccacgtcaacagcttggagctgcttgcattgaccacagaggcacaccggagcatccggcgaggacctgcacgcttgaaaccgacgacgaggccatgctggggaattgcatattgtgtcaagggtggtccagaaaaagagctaaaagcaatgcagtacttggagagaagagagtgtgagtatgaccagaagatatccattgatttctacaaggaaggagatcccttgaaaccagctgtgatgggcgtcttagtgttcgtttccactccagatccaattggcaacaagtactatcttggccctgctcctttgcagaatatggcaaggccacgaagatgattcgatcatagagcttgcaaacaaggtgaggaaggtgctcaacagaacaaaggagaccaaaatcactgggcgcgtgaactcttctactacctcaagggtaagcaggtggactatggcgaggagcacagcaaggcttgcggccacaacaggtttgggagaatatatcacacaggtcactatcctgtttgttatgagcacaacccagtgcattttgtggggcactctgctggcgcgcaggttgtgagggtgctgcatcagatgcttgccgacaagagggatggttcatgtgagctggagtacaggattagagcacccaaattaggaattagtcatgcctatcatcccgcttgagacgaaggatgagcttgggctgcttcatccagcattcaaggctgtgaagacttccacatgataattagaaatctggtgacaacagaagtttgggttggggtcatgggatggatatctttgttgtaatgtgaggtgttaggagaattatgttatgcttatttattggcataagttatgtcttacacgtacaaatgagttaatggatgaactcaagttattggttcaattatagatttcaatggagtttcctgttttttttattattgtggg

SEQ ID NO: 206570 - DNA, 434 bp, Zea Mays
aaccccgcgctccacttacgtgactcgcgcgcgacacgcgagcaggaggttgagacgaagacccgccgccaccggggatggcccaagcgccgccgcgacctagggagcgaggatgaggagctcgaggaggtgcgccgcatgcagaggattcctgcaaggaggagaacatggaggtggtgcccgtagtagtaggggaaccgatcaagagcactggcgaggggaagaaatagaagaagcactatgcttccttggagtaccacgtcaacagcttggagctgcttgcattgaccacagaggcacaccggagcatccggcgaggacctgcacgcttgaaaccgacgacgaggccatgctggggaattgcatattgtgtcaagggtggtccagaaaaagagctaaaagcaatgcagtacttggagagaagagagtgtgag

SEQ ID NO: 206571 - DNA, 2039 bp, Zea Mays
atgtcgtggtcagccaaagcggcatcttctaactacaggctggagtgtctttgtaagtgcaaagagactcgttgctggtgactctgtcctttttatctggaatgacaataaccagcttctgcttggaattcgtcgggcaaatcggccacaaacagtcatgccatcttcagtcttatcaagtgatagcatgcatattggtcttcttgctgcagctgctcatgctgcttcgacaaatagccggtttacaattttctacaacccaagggcaagcccttcagagtttgtcataccgcttgcaaagtatgttaaggctgtgtatcatacccgtatatctgtggggatgcgcttcaggatgctttttgagacagaagagtctagtgttaggagatacatggggactattaccggaatcagtgatcttgattctgttcggtggccaaattcacactggcgttctgttaaggttggctgggatgaatcaactgctggcgatagacagccaagggtgtcactatgggagattgagcccctgacaactttcccaacgtatacatctccttttccgctcaggctcaagcgtccatggccaacaggcttgccttctctgcatggtgggaaggatgatgacctggctaactctctcatgtggcttcgagataccacaaatcctggtttccagtcgttaaattttggtggacttggtatgaactcttggatgcagccaaggctggatacttccttacttggtctgcagcctgacatgtatcaggcgatggccacaggtgctttccaggatccaacaaagcaggcatcacccacaatgctgcagttccagcagccacagaacatagctggccgggctgcgccactttcaagtcagattttgcagcaagcacatcctcaatttcagcagcagccgtacatccaaaacatctctgagagcacaatccaagcgcagggtcagtctgagttcctcaaacagcagatccaacgcagccagtcattcaatgagcagaagccccagctgcaaccccagcaagaatcacagcagcagcagcaatcacagtgtctgcaagcccctcagcatcaacaaatacaacagaacatagccaactaccagtctgtatccaatgcattatcggcgttttctcagctgtcgtcagcctctcagtctacacctatggcactgcaaactatattaccgttctcacaggcacagagctttacagacacgagtgcaagctcattgtctccatccaacaccaacacaatgcaaaatacgcttcggccattctcatcagaagcagtttctcacctcagtatgccgaggcccactgcgatacctgttcccgacgcatggtcatcgaagcgagctgcggtggagtctttgcttccttctcggccccaagattcgtctcaaatgcaacagttggactctacaccagctagtatacctcatagctctgcgttggcaccacttcctgggagaggatgcttggtggatcaagacgcgaaccctgatcctcaaaaccatctcttgtttggtgtcagtatagattcgcagtcactgctaatggagggaggcatccatggtctccaaaatggcaatgattcgaccgctataccttattccacctccaatttcctgagcccttcccagaacgattttcctttggatcatactctgaattcttcaggctgcttagatgattcagggtacgtcccgccatgttcggataattctgaccaagtgaaccgaccaccagcaacctttgtgaaggtttacaaatctggaacctacggaaggtcgcttgatatcaccaggtttagtagctatcacgagctccgtagggaactagggcgcctatttggccttgagggccagttggaagaccctctgagatcaggctggcagcttgtattcgtcgaccgcgaggaggacgtccttctcgtgggcgacgacccttggcagtaagttaccatgaccgtccatcagtcttggtgatacatcctcaacaaatttcatgtgtttcttcccc

SEQ ID NO: 206572 - DNA, 2889 bp, Zea Mays
gtgcttcatgagtccgtttctcagttttggtggcaggattctttgttattattagcttgtgaggaatgaggtgaccactcatcaaacttttccacttcatgaaccaaacaaaaaaaaagtgaggaatgagtagagagtagataatgaactaactcattcctcttaccaaacaccccaagttaataatacccttcttgattctcaattttatccgcttagaatttatttttgtgccatccactttctgatttttttttgttggcatatgcatgtcaccagttcattctcccatgatatctcgttccataagaaacttgcagattgcagtattgagttatcaaaacaaaacaaatacttctgccgttacagatgtggaggagcacaagtgtctgaactcggagttgtggcatgcctgtgccggcccgcttgtctccttgccagcggtgggtagccgggttgtgtacttccctcagggccacagcgagcaggtagcagcatcaacaaacaaggaaatggagtctcagatccccagttatcctaatctgccgccacagcttatatgccaactgcataatgtgacgatgcaagctgatgcagagacagaagaggtatatgcacagatgacattacaaccactcaacccgcaagaactgaaggatccatatttacctgcagaattaggtttggtcagtaaacagccaacaaactatttctgcaaaacattaacagcaagtgataccagtacccatggtgggttttctgttccccgtcgagcagctgagaaagtgttccctccactggagttgatggcaacagatcttcatggcaatgagtggaaattccgtcacatatttcgtggtcagccaaagcggcatcttctaactacaggctggagtgtctttgtaagtgcaaagagactcgttgctggtgactctgtcctttttatctggaatgacaataaccagcttctgcttggaattcgtcgggcaaatcggccacaaacagtcatgccatcttcagtcttatcaagtgatagcatgcatattggtcttcttgctgcagctgctcatgctgcttcgacaaatagccggtttacaattttctacaacccaagggcaagcccttcagagtttgtcataccgcttgcaaagtatgttaaggctgtgtatcatacccgtatatctgtggggatgcgcttcaggatgctttttgagacagaagagtctagtgttaggagatacatggggactattaccggaatcagtgatcttgattctgttcggtggccaaattcacactggcgttctgttaaggttggctgggatgaatcaactgctggcgatagacagccaagggtgtcactatgggagattgagcccctgacaactttcccaacgtatacatctccttttccgctcaggctcaagcgtccatggccaacaggcttgccttctctgcatggtgggaaggatgatgacctggctaactctctcatgtggcttcgagataccacaaatcctggtttccagtcgttaaattttggtggacttggtatgaactcttggatgcagccaaggctggatacttccttacttggtctgcagcctgacatgtatcaggcgatggccacaggtgctttccaggatccaacaaagcaggcatcacccacaatgctgcagttccagcagccacagaacatagctggccgggctgcgccactttcaagtcagattttgcagcaagcacatcctcaatttcagcagcagccgtacatccaaaacatctctgagagcacaatccaagcgcagggtcagtctgagttcctcaaacagcagatccaacgcagccagtcattcaatgagcagaagccccagctgcaaccccagcaagaatcacagcagcagcagcaatcacagtgtctgcaagcccctcagcatcaacaaatacaacagaacatagccaactaccagtctgtatccaatgcattatcggcgttttctcagctgtcgtcagcctctcagtctacacctatggcactgcaaactatattaccgttctcacaggcacagagctttacagacacgagtgcaagctcattgtctccatccaacaccaacacaatgcaaaatacgcttcggccattctcatcagaagcagtttctcacctcagtatgccgaggcccactgcgatacctgttcccgacgcatggtcatcgaagcgagctgcggtggagtctttgcttccttctcggccccaagattcgtctcaaatgcaacagttggactctacaccagctagtatacctcatagctctgcgttggcaccacttcctgggagaggatgcttggtggatcaagacgcgaaccctgatcctcaaaaccatctcttgtttggtgtcagtatagattcgcagtcactgctaatggagggaggcatccatggtctccaaaatggcaatgattcgaccgctataccttattccacctccaatttcctgagcccttcccagaacgattttcctttggatcatactctgaattcttcaggctgcttagatgattcagggtacgtcccgccatgttcggataattctgaccaagtgaaccgaccaccagcaacctttgtgaaggtttacaaatctggaacctacggaaggtcgcttgatatcaccaggtttagtagctatcacgagctccgtagggaactagggcgcctatttggccttgagggccagttggaagaccctctgagatcaggctggcagcttgtattcgtcgaccgcgaggaggacgtccttctcgtgggcgacgacccttggcagtaagttaccatgaccgtccatcagtcttggtgatacatcctcaacaaatttcatgtgtttcttcccc

SEQ ID NO: 206573 - DNA, 2911 bp, Zea Mays
gtgcttcatgagtccgtttctcagttttggtggcaggattctttgttattattagcttgtgaggaatgaggtgaccactcatcaaacttttccacttcatgaaccaaacaaaaaaaaagtgaggaatgagtagagagtagataatgaactaactcattcctcttaccaaacaccccaagttaataatacccttcttgattctcaattttatccgcttagaatttatttttgtgccatccactttctgatttttttttgttggcatatgcatgtcaccagttcattctcccatgatatctcgttccataagaaacttgcagattgcagtattgagttatcaaaacaaaacaaatacttctgccgttacagatgtggaggagcacaagtgtctgaactcggagttgtggcatgcctgtgccggcccgcttgtctccttgccagcggtgggtagccgggttgtgtacttccctcagggccacagcgagcaggtagcagcatcaacaaacaaggaaatggagtctcagatccccagttatcctaatctgccgccacagcttatatgccaactgcataatgtgacgatgcaagctgatgcagagacagaagaggtatatgcacagatgacattacaaccactcaacccgcaagaactgaaggatccatatttacctgcagaattaggtttggtcagtaaacagccaacaaactatttctgcaaaacattaacagcaagtgataccagtacccatggtgggttttctgttccccgtcgagcagctgagaaagtgttccctccactggatttcacccagcagcctccatgccaggagttgatggcaacagatcttcatggcaatgagtggaaattccgtcacatatttcgtgccaaagcggcatcttctaactacaggctggagtgtctttgtaagtgcaaagagactcgttgctggtgactctgtcctttttatctggaatgacaataaccagcttctgcttggaattcgtcgggcaaatcggccacaaacagtcatgccatcttcagtcttatcaagtgatagcatgcatattggtcttcttgctgcagctgctcatgctgcttcgacaaatagccggtttacaattttctacaacccaagggcaagcccttcagagtttgtcataccgcttgcaaagtatgttaaggctgtgtatcatacccgtatatctgtggggatgcgcttcaggatgctttttgagacagaagagtctagtgttaggagatacatggggactattaccggaatcagtgatcttgattctgttcggtggccaaattcacactggcgttctgttaaggttggctgggatgaatcaactgctggcgatagacagccaagggtgtcactatgggagattgagcccctgacaactttcccaacgtatacatctccttttccgctcaggctcaagcgtccatggccaacaggcttgccttctctgcatggtgggaaggatgatgacctggctaactctctcatgtggcttcgagataccacaaatcctggtttccagtcgttaaattttggtggacttggtatgaactcttggatgcagccaaggctggatacttccttacttggtctgcagcctgacatgtatcaggcgatggccacaggtgctttccaggatccaacaaagcaggcatcacccacaatgctgcagttccagcagccacagaacatagctggccgggctgcgccactttcaagtcagattttgcagcaagcacatcctcaatttcagcagcagccgtacatccaaaacatctctgagagcacaatccaagcgcagggtcagtctgagttcctcaaacagcagatccaacgcagccagtcattcaatgagcagaagccccagctgcaaccccagcaagaatcacagcagcagcagcaatcacagtgtctgcaagcccctcagcatcaacaaatacaacagaacatagccaactaccagtctgtatccaatgcattatcggcgttttctcagctgtcgtcagcctctcagtctacacctatggcactgcaaactatattaccgttctcacaggcacagagctttacagacacgagtgcaagctcattgtctccatccaacaccaacacaatgcaaaatacgcttcggccattctcatcagaagcagtttctcacctcagtatgccgaggcccactgcgatacctgttcccgacgcatggtcatcgaagcgagctgcggtggagtctttgcttccttctcggccccaagattcgtctcaaatgcaacagttggactctacaccagctagtatacctcatagctctgcgttggcaccacttcctgggagaggatgcttggtggatcaagacgcgaaccctgatcctcaaaaccatctcttgtttggtgtcagtatagattcgcagtcactgctaatggagggaggcatccatggtctccaaaatggcaatgattcgaccgctataccttattccacctccaatttcctgagcccttcccagaacgattttcctttggatcatactctgaattcttcaggctgcttagatgattcagggtacgtcccgccatgttcggataattctgaccaagtgaaccgaccaccagcaacctttgtgaaggtttacaaatctggaacctacggaaggtcgcttgatatcaccaggtttagtagctatcacgagctccgtagggaactagggcgcctatttggccttgagggccagttggaagaccctctgagatcaggctggcagcttgtattcgtcgaccgcgaggaggacgtccttctcgtgggcgacgacccttggcagtaagttaccatgaccgtccatcagtcttggtgatacatcctcaacaaatttcatgtgtttcttcccc

SEQ ID NO: 206574 - DNA, 2885 bp, Zea Mays
gtgcttcatgagtccgtttctcagttttggtggcaggattctttgttattattagcttgtgaggaatgaggtgaccactcatcaaacttttccacttcatgaaccaaacaaaaaaaaagtgaggaatgagtagagagtagataatgaactaactcattcctcttaccaaacaccccaagttaataatacccttcttgattctcaattttatccgcttagaatttatttttgtgccatccactttctgatttttttttgttggcatatgcatgtcaccagttcattctcccatgatatctcgttccataagaaacttgcagattgcagtattgagttatcaaaacaaaacaaatacttctgccgttacagatgtggaggagcacaagtgtctgaactcggagttgtggcatgcctgtgccggcccgcttgtctccttgccagcggtgggtagccgggttgtgtacttccctcagggccacagcgagcaggtagcagcatcaacaaacaaggaaatggagtctcagatccccagttatcctaatctgccgccacagcttatatgccaactgcataatgtgacgatgcaagctgatgcagagacagaagaggtatatgcacagatgacattacaaccactcaacccgaattaggtttggtcagtaaacagccaacaaactatttctgcaaaacattaacagcaagtgataccagtacccatggtgggttttctgttccccgtcgagcagctgagaaagtgttccctccactggatttcacccagcagcctccatgccaggagttgatggcaacagatcttcatggcaatgagtggaaattccgtcacatatttcgtggtcagccaaagcggcatcttctaactacaggctggagtgtctttgtaagtgcaaagagactcgttgctggtgactctgtcctttttatctggaatgacaataaccagcttctgcttggaattcgtcgggcaaatcggccacaaacagtcatgccatcttcagtcttatcaagtgatagcatgcatattggtcttcttgctgcagctgctcatgctgcttcgacaaatagccggtttacaattttctacaacccaagggcaagcccttcagagtttgtcataccgcttgcaaagtatgttaaggctgtgtatcatacccgtatatctgtggggatgcgcttcaggatgctttttgagacagaagagtctagtgttaggagatacatggggactattaccggaatcagtgatcttgattctgttcggtggccaaattcacactggcgttctgttaaggttggctgggatgaatcaactgctggcgatagacagccaagggtgtcactatgggagattgagcccctgacaactttcccaacgtatacatctccttttccgctcaggctcaagcgtccatggccaacaggcttgccttctctgcatggtgggaaggatgatgacctggctaactctctcatgtggcttcgagataccacaaatcctggtttccagtcgttaaattttggtggacttggtatgaactcttggatgcagccaaggctggatacttccttacttggtctgcagcctgacatgtatcaggcgatggccacaggtgctttccaggatccaacaaagcaggcatcacccacaatgctgcagttccagcagccacagaacatagctggccgggctgcgccactttcaagtcagattttgcagcaagcacatcctcaatttcagcagcagccgtacatccaaaacatctctgagagcacaatccaagcgcagggtcagtctgagttcctcaaacagcagatccaacgcagccagtcattcaatgagcagaagccccagctgcaaccccagcaagaatcacagcagcagcagcaatcacagtgtctgcaagcccctcagcatcaacaaatacaacagaacatagccaactaccagtctgtatccaatgcattatcggcgttttctcagctgtcgtcagcctctcagtctacacctatggcactgcaaactatattaccgttctcacaggcacagagctttacagacacgagtgcaagctcattgtctccatccaacaccaacacaatgcaaaatacgcttcggccattctcatcagaagcagtttctcacctcagtatgccgaggcccactgcgatacctgttcccgacgcatggtcatcgaagcgagctgcggtggagtctttgcttccttctcggccccaagattcgtctcaaatgcaacagttggactctacaccagctagtatacctcatagctctgcgttggcaccacttcctgggagaggatgcttggtggatcaagacgcgaaccctgatcctcaaaaccatctcttgtttggtgtcagtatagattcgcagtcactgctaatggagggaggcatccatggtctccaaaatggcaatgattcgaccgctataccttattccacctccaatttcctgagcccttcccagaacgattttcctttggatcatactctgaattcttcaggctgcttagatgattcagggtacgtcccgccatgttcggataattctgaccaagtgaaccgaccaccagcaacctttgtgaaggtttacaaatctggaacctacggaaggtcgcttgatatcaccaggtttagtagctatcacgagctccgtagggaactagggcgcctatttggccttgagggccagttggaagaccctctgagatcaggctggcagcttgtattcgtcgaccgcgaggaggacgtccttctcgtgggcgacgacccttggcagtaagttaccatgaccgtccatcagtcttggtgatacatcctcaacaaatttcatgtgtttcttcccc

SEQ ID NO: 206575 - DNA, 1937 bp, Zea Mays
tgacaataaccagcttctgcttggaattcgtcgggcaaatcggccacaaacagtcatgccatcttcagtcttatcaagtgatagcatgcatattggtcttcttgctgcagctgctcatgctgcttcgacaaatagccggtttacaattttctacaacccaagggcaagcccttcagagtttgtcataccgcttgcaaagtatgttaaggctgtgtatcatacccgtatatctgtggggatgcgcttcaggatgctttttgagacagaagagtctagtgttaggagatacatggggactattaccggaatcagtgatcttgattctgttcggtggccaaattcacactggcgttctgttaaggttggctgggatgaatcaactgctggcgatagacagccaagggtgtcactatgggagattgagcccctgacaactttcccaacgtatacatctccttttccgctcaggctcaagcgtccatggccaacaggcttgccttctctgcatggtgggaaggatgatgacctggctaactctctcatgtggcttcgagataccacaaatcctggtttccagtcgttaaattttggtggacttggtatgaactcttggatgcagccaaggctggatacttccttacttggtctgcagcctgacatgtatcaggcgatggccacaggtgctttccaggatccaacaaagcaggcatcacccacaatgctgcagttccagcagccacagaacatagctggccgggctgcgccactttcaagtcagattttgcagcaagcacatcctcaatttcagcagcagccgtacatccaaaacatctctgagagcacaatccaagcgcagggtcagtctgagttcctcaaacagcagatccaacgcagccagtcattcaatgagcagaagccccagctgcaaccccagcaagaatcacagcagcagcagcaatcacagtgtctgcaagcccctcagcatcaacaaatacaacagaacatagccaactaccagtctgtatccaatgcattatcggcgttttctcagctgtcgtcagcctctcagtctacacctatggcactgcaaactatattaccgttctcacaggcacagagctttacagacacgagtgcaagctcattgtctccatccaacaccaacacaatgcaaaatacgcttcggccattctcatcagaagcagtttctcacctcagtatgccgaggcccactgcgatacctgttcccgacgcatggtcatcgaagcgagctgcggtggagtctttgcttccttctcggccccaagattcgtctcaaatgcaacagttggactctacaccagctagtatacctcatagctctgcgttggcaccacttcctgggagaggatgcttggtggatcaagacgcgaaccctgatcctcaaaaccatctcttgtttggtgtcagtatagattcgcagtcactgctaatggagggaggcatccatggtctccaaaatggcaatgattcgaccgctataccttattccacctccaatttcctgagcccttcccagaacgattttcctttggatcatactctgaattcttcaggctgcttagatgattcagggtacgtcccgccatgttcggataattctgaccaagtgaaccgaccaccagcaacctttgtgaaggtttacaaatctggaacctacggaaggtcgcttgatatcaccaggtttagtagctatcacgagctccgtagggaactagggcgcctatttggccttgagggccagttggaagaccctctgagatcaggctggcagcttgtattcgtcgaccgcgaggaggacgtccttctcgtgggcgacgacccttggcagtaagttaccatgaccgtccatcagtcttggtgatacatcctcaacaaatttcatgtgtttcttcccc

SEQ ID NO: 206576 - DNA, 2208 bp, Zea Mays
aagcagacggatcaacacgcttcctcagcgccatacgcacacacaggggacagaggtcctctcgctgccatttctctaatcgcatgcacatcacgttctcgcgtggaggatatgtcttgccttgcattcgccattgcggattgcaggcagagggaggcagctgaggattaattcaggctgcctctggctgctcgtctgctcgctcgcctgtccgcttcaaaattgacgcccgtgacctttggtaaaagcgagagctttcttcttagcattatccgctgggaaataaagagagtgcgggagacagttggaggccgttcggttgctggatcgtttgacaaggcctagctagctaggcgagggcggccaatgggttcctgcgtgtcgtcgacgaggcaccggcggcggccgaggaagctgtcggtcgcggcgaggaagatccggcggaaggtgtgcacggcgatcgccgacgcgcccatcatctgcggcgcggcgagctgcctcgcccggcacggggtcgtccacgtggaggcgccggactccagcgtcaccctgcacctcaccaagctgcagtggcagcgcagccagacggacgccgggaacgtgatttgcgaggaagcatggtacgattctgtcagcatcctggagtcaccggactccgacgacgatctcgacaacgatttcgctagcgtcagcggagaccctctccctgatgtcaccggcggctcaaatgcacaacagtgcaaggacgcggcgtgcttcttggacaccatgcagctcctcaggagcattgcaaacgcggaagcctgtgaccgaagggaacagcctgacaagagcgatgactcgaacggcgaggagtgctgcagtagcagcacactgaaggagcttcaggccgcaatgtcgccgcggccgttcccggcgtcgattccgagcaacaaggtccagccgatgccgatcgctggtgccagcccgcaccagcagcagcagaagaagaaaacggccgtggtcaggctctcgttcaggacaaggtcatacgagggcgacgagatgaccgaaacgagtggttctgcgaattacttgtaccgcccaagggcaggtttcacggtgccgtgttgttccacgggcgagaagctgtcggaaggttgctggtcggttcttgagccatcgacgttcagggtccgaggggagagcttcttcaaagacaagaggaaatacccggccccagactgctccccttacacccccattggagcagacatgttcgcctacacgagaaagattcatcacattgcgcagcacctctcgcttccgtctctcaagacacacgaagcctttcctaccctcctcattgtgaacattcagctgcccacataccctgctacagtgtttggcgacaacgacggcgacgggataagcctagttctgtatttcaagttatctgacagttttgacaaggagatctctcctcaattgcaggacagcatcaagaggcttatgaatgatgagatggaaaaggtgaagggatttgcagtagacagcattgtgccctacacagagaggctgaaaatcctggctggtctggcaaaccctgaagacctgcagctgagcacggcagagaggaagctcgtgcagacttacaatcagaagcctgtgctatctcgcccacaacacaaattctacaagggcccaaattactttgagatcgatctcgatgtgcatcggttcagcttcatatcgcggaaagggctcgagacattacgggagcggctcaggcatggcgttcttgatcttggtctaactattcaggcacaaaaggctgaggagctgccagagcatgtcttgtgctgcatgaggctgaacaagatcgacttcgccgacaacgggcatataccgacgctgataactgcagctgacgagtaaatctgtcgtgttactgtagggcactaactttcaggaaaaagcaaaagagactagagtgtggttcgtagatgttcttgagatgctgttgtatagagcggcagatagttgtaggaactaactcaagtttgagatgctgttgtatagagcggcaaatacttgttgatcgttgctccaaaagaggaggggggaaaaagacattgcagcaggctgcattctgaactctgaagaagtgaagatgtatatgcatgcctgtgttttcttttcttttttttgaaacggaatacatgtctg

SEQ ID NO: 206577 - DNA, 2250 bp, Zea Mays
aagcagacggatcaacacgcttcctcagcgccatacgcacacacaggggacagaggtcctctcgctgccatttctctaatcgcatgcacatcacgttctcgcgtggaggatatgtcttgccttgcattcgccattgcggattgcaggcagagggaggcagctgaggattaattcaggctgcctctggctgctcgtctgctcgctcgcctgtccgcttcaaaattgacgcccgtgacctttggtaaaagcgagagctttcttcttagcattatccgctgggaaataaagagagtgcgggagacagttggaggccgttcggttgctggatcgtttgacaagggttgctgattctgcaaggtgcgactcgaattttcttgcgcagcctagctagctaggcgagggcggccaatgggttcctgcgtgtcgtcgacgaggcaccggcggcggccgaggaagctgtcggtcgcggcgaggaagatccggcggaaggtgtgcacggcgatcgccgacgcgcccatcatctgcggcgcggcgagctgcctcgcccggcacggggtcgtccacgtggaggcgccggactccagcgtcaccctgcacctcaccaagctgcagtggcagcgcagccagacggacgccgggaacgtgatttgcgaggaagcatggtacgattctgtcagcatcctggagtcaccggactccgacgacgatctcgacaacgatttcgctagcgtcagcggagaccctctccctgatgtcaccggcggctcaaatgcacaacagtgcaaggacgcggcgtgcttcttggacaccatgcagctcctcaggagcattgcaaacgcggaagcctgtgaccgaagggaacagcctgacaagagcgatgactcgaacggcgaggagtgctgcagtagcagcacactgaaggagcttcaggccgcaatgtcgccgcggccgttcccggcgtcgattccgagcaacaaggtccagccgatgccgatcgctggtgccagcccgcaccagcagcagcagaagaagaaaacggccgtggtcaggctctcgttcaggacaaggtcatacgagggcgacgagatgaccgaaacgagtggttctgcgaattacttgtaccgcccaagggcaggtttcacggtgccgtgttgttccacgggcgagaagctgtcggaaggttgctggtcggttcttgagccatcgacgttcagggtccgaggggagagcttcttcaaagacaagaggaaatacccggccccagactgctccccttacacccccattggagcagacatgttcgcctacacgagaaagattcatcacattgcgcagcacctctcgcttccgtctctcaagacacacgaagcctttcctaccctcctcattgtgaacattcagctgcccacataccctgctacagtgtttggcgacaacgacggcgacgggataagcctagttctgtatttcaagttatctgacagttttgacaaggagatctctcctcaattgcaggacagcatcaagaggcttatgaatgatgagatggaaaaggtgaagggatttgcagtagacagcattgtgccctacacagagaggctgaaaatcctggctggtctggcaaaccctgaagacctgcagctgagcacggcagagaggaagctcgtgcagacttacaatcagaagcctgtgctatctcgcccacaacacaaattctacaagggcccaaattactttgagatcgatctcgatgtgcatcggttcagcttcatatcgcggaaagggctcgagacattacgggagcggctcaggcatggcgttcttgatcttggtctaactattcaggcacaaaaggctgaggagctgccagagcatgtcttgtgctgcatgaggctgaacaagatcgacttcgccgacaacgggcatataccgacgctgataactgcagctgacgagtaaatctgtcgtgttactgtagggcactaactttcaggaaaaagcaaaagagactagagtgtggttcgtagatgttcttgagatgctgttgtatagagcggcagatagttgtaggaactaactcaagtttgagatgctgttgtatagagcggcaaatacttgttgatcgttgctccaaaagaggaggggggaaaaagacattgcagcaggctgcattctgaactctgaagaagtgaagatgtatatgcatgcctgtgttttcttttcttttttttgaaacggaatacatgtctg

SEQ ID NO: 206578 - DNA, 2134 bp, Zea Mays
aaagacctcaggttcccagacgagagaccatcagatcacggctccagatccgccgtacgcataagccccagctgccctacctgcgcactcgcctccgcctccatctccttcgccaccagacctcaagcgcgccacacgccgccgcacgggagccgcgcgccgcacccgccgccgcttctcctcaaaaccagaggtctccccacgtcccccgatccagcgtctccatggccgcgccgcagcctgtcgcccccgcctccgaggcgccgccgtctgcgcaaatggtgggcaacgcgttcgtgcagcagtactacctcgtgctgcaccagtcgccggatctggtgtaccgcttctaccaggaggccagccgcctcgctcgccccgcatccgccgccggagccgccggcatggactcggtcaccaccatggaggcgatcagcgagaagataatggagatggacgtgtccaaagcggagatcaggacggtggactcgcaggagtctttaggcggcggcgtcgctgtgctcgtcacaggtcacctcaccggccgtgatggagtgcgccgcgagttctcgcaatccttcttcctcgcgccgcaggagatgggctacttcgtgctcaacgacatcttccgcttcgtcggggacatccctgcctctaccgccgttgaggcgcagccagaggcggttgctgtagtcccgcctgtggctgctccacttgccaacggcacagctactcctgctgtggagcctgccactcctgatgatcatggtgccgtgccacagcaggaacatcatgttgtggaccgatcactgcctcaacctgaagaggacgaggctgaggtttacaatccgccgcaagaggaagtagtggatgaggaacagcctgttgctgaagtgataaatgaagttccaaacaatgtggcacctgtggtggcaactacagttgcctcagtgttgcaggaggaggcaccaaagaagtcatacgcctcaattgtcaaaatcatgaaagaagttccattgcctgctcctgcgcctcctactaggccttcaccacccaaactagagaagcagtctcctcctcctgctactcctgtcacagatgtaccgcctttcagttctaaccccgagaacatcaatatccaagagcctgaagttgatgcacatgcaatatatgtgaggaatttacctttaaatgccactgaaactcaactggaggatgagttcaagaagtttggtaccattaagcaaaatggcattcaagtcagaagcaataagattcaagggttctgttatggattcgttgaattcgaggattctacttctgtccagagtgctatagaggcttcccctgtagcaattggcggtcgtcaatgttacgttgaggaaaagagagcacctggttcacgagcagaggcggcaggttcgcaccaggcaggggcaacagtttcagaagtgaaggtaccagagggcgtggtaactacggtggaggaaggggctacgggaggggtgaatttagttacaggtctgattacggggtcagaagtggtggcagaggtggctcattacgtggagctgatgttggctaccagagggttgaccatgctggatatgctggtggtcgtggtagccgcacagcagctgctggcgcaccttcaaaatgaggggcaccatagctgttgcgcgtcttttgggagtgttgttcggtggctctaagattattttgaagttggcatagaggctcatcaattggttcagtgcgggattacaagagaagcctggatacaaattatgagggttcctgtccttgatcattatttttgcaggcagcaaaaatggttactaattgagtaattgtagattagacacctattcagatgtagttctagtttcggtcgtcgactgatgtgccttgttgtcttttttgcaacgcatcatctaggtttttgttactgctggtattcatttattctgttgaattgaggttaatagcttttttagacttggaataagtgacagtttagggaagttaatagtggctagggtaaggatttaaatgtttctttgcaatgtgtcgacgccaaaagattctcttagtatttattatactgacaatattggtctttttttgaattcag

SEQ ID NO: 206579 - DNA, 2066 bp, Zea Mays
gattcacactgaaacataaaaatggtaacaatggtgactctgaagagatcactgtttatgattacttcgtaaagcagcgtggcatagtgctgcaatactctggtgatcttccttgcatcaatgtgggaaaactaaagcggccaacatattttccaattgagttatgcagtcttgtgcctttacaaagatacactaaagctttgaacacacttcagaggtcatcactcgtggagaaatctaggcagaaaccgcaggaaaggatgtctgttttatctgatgtgctgcaaagaagcaactatgatgcagagcccatgttgaaggcatgcgggattacaattgctagaaatttcacagaagttgatggcacaaatcttgaatctgtcttctcgttcatcttacagctgggaatggtgaagacatttttacacgcaatggtagatggaacttcaacaataagaggctcattagagcttgtagtgtcgagaaatgggcggtggtaaacttttctgcacgatgcaatgtcagggatcttgtccgggatctcatcaagtgtggaggcatgaagggcattatggttgatgctccttttgctgtatttgatgagaatccttcaatgagacggtcacctgctataagaagggttgaagacatgtttgaacaagtgaaaactaagcttcctggagcaccaaagtttcttttgtgtgttctagctgaaaggaagaattctgatatttatgggccttggaagaagaaatgccttgctgaatttgggatcgttacacaatgtgtggcaccaactagagtgaacgaccagtatcttacaaatgtcctacttaagataaatgcaaagctgggtggcatgaattcgttgctccaaattgaaacatccccagcaattcctcttgtatccaaggtcccaactataatcttgggaatggatgtgtcacacggttctcctggacattctgatgtaccatctattgctgctgttgttagttctcgtgaatggcctcttatctcgaaatacagagcttctgtccgcacccaatcacctaaaatggaaatgattgactcattgtttaagccacgggaagctgaagatgatggtctgatccgggagtgtctgattgacttctacaccagttctgggaagagaaagcctgaccaagttatcatattcagggacggtgttagcgaaagtcagtttaatcaggtgctgaacattgagttgcaacaaatcatcgaggcttgcaaatttcttgatgagaaatggaatcccaagttcacgttgattattgcccagaagaatcatcacactaaatttttcattcctggaaagccagataatgtcccaccaggaactgtggtggacaacaaagtctgccatccaaagaacttcgatttctacatgtgtgcgcatgctggaatgatcgggactacgaggccaactcactaccacatcctgcatgatgagataggcttcagtcctgatgatctgcaggagctggtgcattcgctctcttatgtgtaccaaaggagcacaacagccatatcagtcgttgctcccatctgctacgcacatctggcagctgctcaggttggccagttcataaagttcgatgagatgtcggagacgtcctccagtcatggcgggcatacttcggcgggcagcgttccggtccaggagctgccgcgcctgcatgagaaagaaggctcgagctggtacgatgttaaatgttagttttttaagcgtcgctgcggctatgttggtgcctcaggaagacttggaacctggttaggatgtcgttaaatctaccccttatcgttcctggttcgttgggctgttgttcttattgtccgtcctggtgtctgatttctgctttgttgcatgcaagtgtgaggcccagcttgatattgaaaagtttggcgtacatgtcgttcatttggcactctggactactgggtgggttttgctgtttttgatgacctgcagtagccaggacgcgcctctggtggtttctactgctcagtatttatgcgagtcgaccacctctgtttgcttccta

SEQ ID NO: 206580 - DNA, 1538 bp, Zea Mays
ggcggtggcacgttagcctgccgctaggaaactccgggttctctgttctctctttccttccgactttcccactgccgtgacgattttcacagcgaattctccggccggcgccgccccgtccgtccgtccgtccgtccgttcattccgataccgaactcgccagtcgccacagcgatctctctcgctcgctccgccgacgcagcgctcggcttcagctcgagaggaggaaatggccagcagcggctacgaagggatcctcctgggaatggggaaccccctcctcgacatctccgctgtcgtcgacgagggcttcctcgccaagtatgatgtgaagccgggcaatgccattcttgcagaggacaagcatttgccaatgtatgacgaattggctagcaagagcaatgttgaatacattgctggaggagccactcaaaactctatcagggttgcccaatggatgcttcaaattcctggtgcatcaagttacattggttgcatcgggaaggataagtttggtgaggagatgaaaaaaaatgcacaagctgctggtattaatgcccattatcatgaggatgagaatgctccaacgggcacatgtgctgtttgtgttgttggtggagaaagttgagaaggcaaaatatatttacattgctggatttttccttacggtatccccggattctattcaacttgttgctgagcatgccgctgcaactaacaaggtgtttatgatgaacctttctgctccctttatatgcgaggttttccgtgatgcccaagagaaagctcttccgtacgtggattacatctttggaaatgaaactgaggcgaggacctttgctaaagttcgcggttgggagaccgagaatgttgaggagatcgctttgaagatctcccaattaccgaaggcttcaggaacacacaagaagattactgttatcactcaaggttgcgatccggtagttgtggccgatgatggaaaggtgaaaactttccctgtgatcctcttgcctaaggagaagcttgttgacaccaatggtgcaggtgatgcgttcgttggtggcttcctgtcccagttggtacaagagaagaacatcgatgagtgtgtcagagctgcctgttacgccgccaatgttgtcatccaacgttctggctgcacttaccctgagaagcctgacttcaactagagccatttcagaatttagaatctattggcatctggtctgtataattagtcgggttcgccttggtctgtttgcggcacattctagtgccaccgtacaggtcaaatgttcatgcgtgtaaggcgtgtcatggcactctacaaaagtgcattcgtgcgtcacctcttgcaagggaaaccagctggttgtaagttcagccatgggcacactcttgaggccacaatatgtgccagaaatggcagtgtaccccggcctgccccggcactcggatgcgtgcatgcctctcccggttacggactctttacagttgcatctaaaacaattcaaagcaccttgcggtgcatccttgaaaag

SEQ ID NO: 206581 - DNA, 1561 bp, Zea Mays
ggcggtggcacgttagcctgccgctaggaaactccgggttctctgttctctctttccttccgactttcccactgccgtgacgattttcacagcgaattctccggccggcgccgccccgtccgtccgtccgtccgtccgttcattccgataccgaactcgccagtcgccacagcgatctctctcgctcgctccgccgacgcagcgctcggcttcagctcgagaggaggaaatggccagcagcggctacgaagggatcctcctgggaatggggaaccccctcctcgacatctccgctgtcgtcgacgagggcttcctcgccaagtatgacgaattggctagcaagagcaatgttgaatacattgctggaggagccactcaaaactctatcagggttgcccaatggatgcttcaaattcctggtgcatcaagttacattggttgcatcgggaaggataagtttggtgaggagatgaaaaaaaatgcacaagctgctggtattaatgcccattatcatgaggatgagaatgctccaacgggcacatgtgctgtttgtgttgttggtggagaaaggtcacttattgctaacttgtctgcggcaaactgctataagtctgaacatctgaagaaacctgagaattgggcacttgttgagaaggcaaaatatatttacattgctggatttttccttacggtatccccggattctattcaacttgttgctgagcatgccgctgcaactaacaaggtgtttatgatgaacctttctgctccctttatatgcgaggttttccgtgatgcccaagagaaagctcttccgtacgtggattacatctttggaaatgaaactgaggcgaggacctttgctaaagttcgcggttgggagaccgagaatgttgaggagatcgctttgaagatctcccaattaccgaaggcttcaggaacacacaagaagattactgttatcactcaaggttgcgatccggtagttgtggccgatgatggaaaggtgaaaactttccctgtgatcctcttgcctaaggagaagcttgttgacaccaatggtgcaggtgatgcgttcgttggtggcttcctgtcccagttggtacaagagaagaacatcgatgagtgtgtcagagctgcctgttacgccgccaatgttgtcatccaacgttctggctgcacttaccctgagaagcctgacttcaactagagccatttcagaatttagaatctattggcatctggtctgtataattagtcgggttcgccttggtctgtttgcggcacattctagtgccaccgtacaggtcaaatgttcatgcgtgtaaggcgtgtcatggcactctacaaaagtgcattcgtgcgtcacctcttgcaagggaaaccagctggttgtaagttcagccatgggcacactcttgaggccacaatatgtgccagaaatggcagtgtaccccggcctgccccggcactcggatgcgtgcatgcctctcccggttacggactctttacagttgcatctaaaacaattcaaagcaccttgcggtgcatccttgaaaag

SEQ ID NO: 206582 - DNA, 1615 bp, Zea Mays
ggcggtggcacgttagcctgccgctaggaaactccgggttctctgttctctctttccttccgactttcccactgccgtgacgattttcacagcgaattctccggccggcgccgccccgtccgtccgtccgtccgtccgttcattccgataccgaactcgccagtcgccacagcgatctctctcgctcgctccgccgacgcagcgctcggcttcagctcgagaggaggaaatggccagcagcggctacgaagggatcctcctgggaatggggaaccccctcctcgacatctccgctgtcgtcgacgagggcttcctcgccaagtatgatgtgaagccgggcaatgccattcttgcagaggacaagcatttgccaatgtatgacgaattggctagcaagagcaatgttgaatacattgctggaggagccactcaaaactctatcagggttgcccaatggatgcttcaaattcctggtgcatcaagttacattggttgcatcgggaaggataagtttggtgaggagatgaaaaaaaatgcacaagctgctggtattaatgcccattatcatgaggatgagaatgctccaacgggcacatgtgctgtttgtgttgttggtggagaaaggtcacttattgctaacttgtctgcggcaaactgctataagtctgaacatctgaagaaacctgagaattgggcacttgttgagaaggcaaaatatatttacattgctggatttttccttacggtatccccggattctattcaacttgttgctgagcatgccgctgcaactaacaaggtgtttatgatgaacctttctgctccctttatatgcgaggttttccgtgatgcccaagagaaagctcttccgtacgtggattacatctttggaaatgaaactgaggcgaggacctttgctaaagttcgcggttgggagaccgagaatgttgaggagatcgctttgaagatctcccaattaccgaaggcttcaggaacacacaagaagattactgttatcactcaaggttgcgatccggtagttgtggccgatgatggaaaggtgaaaactttccctgtgatcctcttgcctaaggagaagcttgttgacaccaatggtgcaggtgatgcgttcgttggtggcttcctgtcccagttggtacaagagaagaacatcgatgagtgtgtcagagctgcctgttacgccgccaatgttgtcatccaacgttctggctgcacttaccctgagaagcctgacttcaactagagccatttcagaatttagaatctattggcatctggtctgtataattagtcgggttcgccttggtctgtttgcggcacattctagtgccaccgtacaggtcaaatgttcatgcgtgtaaggcgtgtcatggcactctacaaaagtgcattcgtgcgtcacctcttgcaagggaaaccagctggttgtaagttcagccatgggcacactcttgaggccacaatatgtgccagaaatggcagtgtaccccggcctgccccggcactcggatgcgtgcatgcctctcccggttacggactctttacagttgcatctaaaacaattcaaagcaccttgcggtgcatccttgaaaag

SEQ ID NO: 206583 - DNA, 1618 bp, Zea Mays
ggcggtggcacgttagcctgccgctaggaaactccgggttctctgttctctctttccttccgactttcccactgccgtgacgattttcacagcgaattctccggccggcgccgccccgtccgtccgtccgtccgtccgttcattccgataccgaactcgccagtcgccacagcgatctctctcgctcgctccgccgacgcagcgctcggcttcagctcgagaggaggaaatggccagcagcggctacgaagggatcctcctgggaatggggaaccccctcctcgacatctccgctgtcgtcgacgagggcttcctcgccaagtatgatgtgaagccgggcaatgccattcttgcagaggacaagcatttgccaatgtagtatgacgaattggctagcaagagcaatgttgaatacattgctggaggagccactcaaaactctatcagggttgcccaatggatgcttcaaattcctggtgcatcaagttacattggttgcatcgggaaggataagtttggtgaggagatgaaaaaaaatgcacaagctgctggtattaatgcccattatcatgaggatgagaatgctccaacgggcacatgtgctgtttgtgttgttggtggagaaaggtcacttattgctaacttgtctgcggcaaactgctataagtctgaacatctgaagaaacctgagaattgggcacttgttgagaaggcaaaatatatttacattgctggatttttccttacggtatccccggattctattcaacttgttgctgagcatgccgctgcaactaacaaggtgtttatgatgaacctttctgctccctttatatgcgaggttttccgtgatgcccaagagaaagctcttccgtacgtggattacatctttggaaatgaaactgaggcgaggacctttgctaaagttcgcggttgggagaccgagaatgttgaggagatcgctttgaagatctcccaattaccgaaggcttcaggaacacacaagaagattactgttatcactcaaggttgcgatccggtagttgtggccgatgatggaaaggtgaaaactttccctgtgatcctcttgcctaaggagaagcttgttgacaccaatggtgcaggtgatgcgttcgttggtggcttcctgtcccagttggtacaagagaagaacatcgatgagtgtgtcagagctgcctgttacgccgccaatgttgtcatccaacgttctggctgcacttaccctgagaagcctgacttcaactagagccatttcagaatttagaatctattggcatctggtctgtataattagtcgggttcgccttggtctgtttgcggcacattctagtgccaccgtacaggtcaaatgttcatgcgtgtaaggcgtgtcatggcactctacaaaagtgcattcgtgcgtcacctcttgcaagggaaaccagctggttgtaagttcagccatgggcacactcttgaggccacaatatgtgccagaaatggcagtgtaccccggcctgccccggcactcggatgcgtgcatgcctctcccggttacggactctttacagttgcatctaaaacaattcaaagcaccttgcggtgcatccttgaaaag

SEQ ID NO: 206584 - DNA, 1620 bp, Zea Mays
ggcggtggcacgttagcctgccgctaggaaactccgggttctctgttctctctttccttccgactttcccactgccgtgacgattttcacagcgaattctccggccggcgccgccccgtccgtccgtccgtccgtccgttcattccgataccgaactcgccagtcgccacagcgatctctctcgctcgctccgccgacgcagcgctcggcttcagctcgagaggaggaaatggccagcagcggctacgaagggatcctcctgggaatggggaaccccctcctcgacatctccgctgtcgtcgacgagggcttcctcgccaagtatgatgtgaagccgggcaatgccattcttgcagaggacaagcatttgccaatgtaagtctcgttgcccctttagctcccattgcggtttgaaatgttggttatcgatactagcttgtcctgaacggagaatgggaaacaaattcttgatgttgtcacattaagcacccatgagacggggagaaacgtagtggactcctaatttttatggccaggtatgacgaattggctagcaagagcaatgttgaatacattgctggaggagccactcaaaactctatcagggttgcccaatggatgcttcaaattcctggtgcatcaagttacattggttgcatcgggaaggataagtttggtgaggagatgaaaaaaaatgcacaagctgctggtattaatgcccattatcatgaggatgagaatgctccaacgggcacatgtgctgtttgtgttgttggtggagaaaggtcacttattgctaacttgtctgcggcaaactgctataagtctgaacatctgaagaaacctgagaattgggcacttgttgagaaggcaaaatatatttacattgctggatttttccttacggtatccccggattctattcaacttgttgctgagcatgccgctgcaactaacaaggtgtttatgatgaacctttctgctccctttatatgcgaggttttccgtgatgcccaagagaaagctcttccgtacgtggattacatctttggaaatgaaactgaggcgaggacctttgctaaagttcgcggttgggagaccgagaatgttgaggagatcgctttgaagatctcccaattaccgaaggcttcaggaacacacaagaagattactgttatcactcaaggttgcgatccggtagttgtggccgatgatggaaaggtgaaaactttccctgtgatcctcttgcctaaggagaagcttgttgacaccaatggtgcaggtgatgcgttcgttggtggcttcctgtcccagttggtacaagagaagaacatcgatgagtgtgtcagagctgcctgttacgccgccaatgttgtcatccaacgttctggctgcacttaccctgagaagcctgacttcaactagagccatttcagaatttagaatctattggcatctggtctgtataattagtcgggttcgccttggtctgtttgcggcacattctagtgccaccgtacaggtcaaatgttcatgcgtgtaaggcgtgtcatggcactctacaaaagtgcattcgtgcgtcacctcttgcaagggaaaccagctggttctaaaaaaaaa

SEQ ID NO: 206585 - DNA, 1277 bp, Zea Mays
ggagaaacctagctccgtataccatgttgtttttctggtatgacgaattggctagcaagagcaatgttgaatacattgctggaggagccactcaaaactctatcagggttgcccaatggatgcttcaaattcctggtgcatcaagttacattggttgcatcgggaaggataagtttggtgaggagatgaaaaaaaatgcacaagctgctggtattaatgcccattatcatgaggatgagaatgctccaacgggcacatgtgctgtttgtgttgttggtggagaaaggtcacttattgctaacttgtctgcggcaaactgctataagtctgaacatctgaagaaacctgagaattgggcacttgttgagaaggcaaaatatatttacattgctggatttttccttacggtatccccggattctattcaacttgttgctgagcatgccgctgcaactaacaaggtgtttatgatgaacctttctgctccctttatatgcgaggttttccgtgatgcccaagagaaagctcttccgtacgtggattacatctttggaaatgaaactgaggcgaggacctttgctaaagttcgcggttgggagaccgagaatgttgaggagatcgctttgaagatctcccaattaccgaaggcttcaggaacacacaagaagattactgttatcactcaaggttgcgatccggtagttgtggccgatgatggaaaggtgaaaactttccctgtgatcctcttgcctaaggagaagcttgttgacaccaatggtgcaggtgatgcgttcgttggtggcttcctgtcccagttggtacaagagaagaacatcgatgagtgtgtcagagctgcctgttacgccgccaatgttgtcatccaacgttctggctgcacttaccctgagaagcctgacttcaactagagccatttcagaatttagaatctattggcatctggtctgtataattagtcgggttcgccttggtctgtttgcggcacattctagtgccaccgtacaggtcaaatgttcatgcgtgtaaggcgtgtcatggcactctacaaaagtgcattcgtgcgtcacctcttgcaagggaaaccagctggttgtaagttcagccatgggcacactcttgaggccacaatatgtgccagaaatggcagtgtaccccggcctgccccggcactcggatgcgtgcatgcctctcccggttacggactctttacagttgcatctaaaacaattcaaagcaccttgcggtgcatccttgaaaag

SEQ ID NO: 206586 - DNA, 1398 bp, Zea Mays
gttaatctcccacagcaccctcactcttttccattatactttaccactttacaaatagacccttcaacttgttcataatacaccaacagttagtaattagtggagtatctgaaactgcccattcctgatgtcataacaaaaaaaatccctatatgaatatgactgtaagctgaaatcgaataacaaaagtagctcaaatatacaaatggtgacctgtattttcatgttctgctaggtatgacgaattggctagcaagagcaatgttgaatacattgctggaggagccactcaaaactctatcagggttgcccaatggatgcttcaaattcctggtgcatcaagttacattggttgcatcgggaaggataagtttggtgaggagatgaaaaaaaatgcacaagctgctggtattaatgcccattatcatgaggatgagaatgctccaacgggcacatgtgctgtttgtgttgttggtggagaaagttgagaaggcaaaatatatttacattgctggatttttccttacggtatccccggattctattcaacttgttgctgagcatgccgctgcaactaacaaggtgtttatgatgaacctttctgctccctttatatgcgaggttttccgtgatgcccaagagaaagctcttccgtacgtggattacatctttggaaatgaaactgaggcgaggacctttgctaaagttcgcggttgggagaccgagaatgttgaggagatcgctttgaagatctcccaattaccgaaggcttcaggaacacacaagaagattactgttatcactcaaggttgcgatccggtagttgtggccgatgatggaaaggtgaaaactttccctgtgatcctcttgcctaaggagaagcttgttgacaccaatggtgcaggtgatgcgttcgttggtggcttcctgtcccagttggtacaagagaagaacatcgatgagtgtgtcagagctgcctgttacgccgccaatgttgtcatccaacgttctggctgcacttaccctgagaagcctgacttcaactagagccatttcagaatttagaatctattggcatctggtctgtataattagtcgggttcgccttggtctgtttgcggcacattctagtgccaccgtacaggtcaaatgttcatgcgtgtaaggcgtgtcatggcactctacaaaagtgcattcgtgcgtcacctcttgcaagggaaaccagctggttgtaagttcagccatgggcacactcttgaggccacaatatgtgccagaaatggcagtgtaccccggcctgccccggcactcggatgcgtgcatgcctctcccggttacggactctttacagttgcatctaaaacaattcaaagcaccttgcggtgcatccttgaaaag

SEQ ID NO: 206587 - DNA, 1365 bp, Zea Mays
ctgaaaccgaatccgaaaccaggacggatgcccggctcgcgaacaacggcctgcccgtggagatgcagagactgcggtgtcgcgtcaactacaatgccctgagatttacccctgaaatcgaggatctgggcagacgcctggttcgagctcttcgccggaacgggccctttgtggtccttcacttgcggtatgagatggacatgcttgccttctccggatgcacgcacggttgcagcagcatggaggctcaagagctcacgaagatgaggtagagctacatcgtcctcgtgacgtccccctccccaagatttccccaggatatgcctacccatggtggaaggagaaagtgatcgactcggacgccaagaggaaagacgggctgtgtccgttaacgccggaggagaccgcgctggtgctgcaggcgctcggcattgaccgcggctaccagatctacattgccgcaggcgaaatatacggcgggcagagaagaatggctgcgctcacctcggcttatcccaacgtggttagaaaggagacgctgttgccttgggaagtcggcctgttccagaaccactcctcccagatggctgcgctggactacatggtgtccctggagagcgatgtcttcatacccacctacgacggcaacatggccaaggtcgtagaaggccatcgcaggtaggtactgtgtgagactgagactcagactgaggtgccacggcatagctctcgataaaaaaacggtgctgctgacgggaacacacgcacgtcctgttcttgcgagcgcaggtacctggggtttcggaagacggtgctgctggaccggaggcgtatcgtcgagctcgtcgacgagtacaggaacggcacgttgcgctggaccgacttctcgtctgccgtcatggcgtcgcacaccagccgcatgggcgaaccgtccaggaggcagacggttcctgacagacccaaggaagaggactacttctacgcgaacccgcacgagtgcctgcaccagccggaagatgtctccgccttgtgatacccgcgctcccgcggtacaatacagtacagtggatgatgcgcgggctttcggagtccagaaccacatgtatatgtaatagactaatagcgcattcgacagcgttgcgttggcagagggtaaacgtaaacggacgaggagggcctcgcgttcggtccggttgaacgagcatgtgagttaggattcggtacacagattcatggaacggtggttcgccgattcttttttctgttcagaataagcagaccctttcgttgttgttcttgtgtacagcagacgaagtcgtgaagataataacaacagcagcagaatcgtcgtgaaaaagtcgttgg

SEQ ID NO: 206588 - DNA, 1605 bp, Zea Mays
tggtcaggaatttcttggttctgtccttcccctttgagaactttcggtgaatctacaggaacaacggctatctgatggtctcctgcaacggcgggcttaaccagatgcgagcagcaatttgtgacatggtaaccatcgcaaggtatctgaacgttactctcatcgtaccggagttggataaggcttcattttgggctgatcccagcgatttccaagacatatttgacgtggactacttcatagcgtcgctgagagacgaggtccggatcctgaagcagctgcctccgaggctcaagagaagagtggagatgggatccctccggtccctgccaccagtcagctggtccgacatcggctactaccgccgtcaggttcggtcgcgtcctccttaacatcgcgagctgaaaccgaatccgaaaccaggacggatgcccggctcgcgaacaacggcctgcccgtggagatgcagagactgcggtgtcgcgtcaactacaatgccctgagatttacccctgaaatcgaggatctgggcagacgcctggttcgagctcttcgccggaacgggccctttgtggtccttcacttgcggtatgagatggacatgcttgccttctccggatgcacgcacggttgcagcagcatggaggctcaagagctcacgaagatgagatatgcctacccatggtggaaggagaaagtgatcgactcggacgccaagaggaaagacgggctgtgtccgttaacgccggaggagaccgcgctggtgctgcaggcgctcggcattgaccgcggctaccagatctacattgccgcaggcgaaatatacggcgggcagagaagaatggctgcgctcacctcggcttatcccaacgtggttagaaaggagacgctgttgccttgggaagtcggcctgttccagaaccactcctcccagatggctgcgctggactacatggtgtccctggagagcgatgtcttcatacccacctacgacggcaacatggccaaggtcgtagaaggccatcgcaggtacctggggtttcggaagacggtgctgctggaccggaggcgtatcgtcgagctcgtcgacgagtacaggaacggcacgttgcgctggaccgacttctcgtctgccgtcatggcgtcgcacaccagccgcatgggcgaaccgtccaggaggcagacggttcctgacagacccaaggaagaggactacttctacgcgaacccgcacgagtgcctgcaccagccggaagatgtctccgccttgtgatacccgcgctcccgcggtacaatacagtacagtggatgatgcgcgggctttcggagtccagaaccacatgtatatgtaatagactaatagcgcattcgacagcgttgcgttggcagagggtaaacgtaaacggacgaggagggcctcgcgttcggtccggttgaacgagcatgtgagttaggattcggtacacagattcatggaacggtggttcgccgattcttttttctgttcagaataagcagaccctttcgttgttgttcttgtgtacagcagacgaagtcgtgaagataataacaacagcagcagaatcgtcgtgaaaaagtcgttgg

SEQ ID NO: 206589 - DNA, 1607 bp, Zea Mays
cttcttggttcatgttttttttttgtttttggaatcaagcttctcttcttccattggtcaggaatttcttggttctgtccttcccctttgagaactttcggtgaatctacaggaacaacggctatctgatggtctcctgcaacggcgggcttaaccagatgcgagcagcaatttgtgacatggtaaccatcgcaaggtatctgaacgttactctcatcgtaccggagttggataaggcttcattttgggctgatcccagcgatttccaagacatatttgacgtggactacttcatagcgtcgctgagagacgaggtccggatcctgaagcagctgcctccgaggctcaagagaagagtggagatgggatccctccggtccctgccaccagtcagctggtccgacatcggctactaccgccgtcaggacggatgcccggctcgcgaacaacggcctgcccgtggagatgcagagactgcggtgtcgcgtcaactacaatgccctgagatttacccctgaaatcgaggatctgggcagacgcctggttcgagctcttcgccggaacgggccctttgtggtccttcacttgcggtatgagatggacatgcttgccttctccggatgcacgcacggttgcagcagcatggaggctcaagagctcacgaagatgagatatgcctacccatggtggaaggagaaagtgatcgactcggacgccaagaggaaagacgggctgtgtccgttaacgccggaggagaccgcgctggtgctgcaggcgctcggcattgaccgcggctaccagatctacattgccgcaggcgaaatatacggcgggcagagaagaatggctgcgctcacctcggcttatcccaacgtggttagaaaggagacgctgttgccttgggaagtcggcctgttccagaaccactcctcccagatggctgcgctggactacatggtgtccctggagagcgatgtcttcatacccacctacgacggcaacatggccaaggtcgtagaaggccatcgcaggtacctggggtttcggaagacggtgctgctggaccggaggcgtatcgtcgagctcgtcgacgagtacaggaacggcacgttgcgctggaccgacttctcgtctgccgtcatggcgtcgcacaccagccgcatgggcgaaccgtccaggaggcagacggttcctgacagacccaaggaagaggactacttctacgcgaacccgcacgagtgcctgcaccagccggaagatgtctccgccttgtgatacccgcgctcccgcggtacaatacagtacagtggatgatgcgcgggctttcggagtccagaaccacatgtatatgtaatagactaatagcgcattcgacagcgttgcgttggcagagggtaaacgtaaacggacgaggagggcctcgcgttcggtccggttgaacgagcatgtgagttaggattcggtacacagattcatggaacggtggttcgccgattcttttttctgttcagaataagcagaccctttcgttgttgttcttgtgtacagcagacgaagtcgtgaagataataacaacagcagcagaatcgtcgtgaaaaagtcgttgg

SEQ ID NO: 206590 - DNA, 2991 bp, Zea Mays
gcaaaatccacggcctcaaaacggcctacccgcatagctagggtttcttctctgccccctccggcaactcaggagagagcgcggctcctacccggcggcggtgaagccgcgacgatccaacggagcagaggcgccatggctgctcccgaagcgcccgcatgctacgtcgggatcgcgcggcagtccgccgccttccgccttatgaaacaaatgggatgggaagaaggtgaaggccttggcaaagacaagcaaggcataaagggtcatgttagggtgaaaaacaagcaggacacactaggtgttggtgtagatagccctcataacaaatgggtatacgataccacccaatttgacaacatattgaagaaactgaaagtgcaatcagctaatcctgttcaagaagaggttgcagctgtagaaagtgattcacctgacatcacacccaagaaagacaaatcagcaaaacatgaagttactaaagttactcgacctcaaggaagatacaagaaaagagagagggggaaaagtgtgaactcttattcagcaacagatcttcaaggcatactcgtacgcaaaaatgaagataattccaaagtggatcagaaacttgaaccgacatgcttggatgaacctgatcccatcatctgtttggatgcagtatcccaagctgatgatgtgaactggtgggggcacaagtttggatttttatcaggagggtttctaggagcaaaatcccgtaaaaataaatcttcacaaaaagatcttgctaatgtccgccagacatttgcagaggaagatcaagaaaatttgtacaatcttgttcaggataaagctacttctggaaagcagggtcttggcatcaaaggcctgccaatgaaagttgctggccaacgttggaagggaaacaaaacttcgtttgttgatagtgatgatgataattcagcccagtccgatgagtattcagaaatcgaagagaatggcgatgaggaagaacatatcagtgcttctgaatcaatagacacagataagaatgcagacaaagaattgcttgtggatgctagacccaaaaccaaggtcaagaaactttgcaaaagaatacttcgtcaggccccatctcagtcaatgaaattgaaggatcttaaggtcgccgttgaggaacactcaaatgttgtattttccagcttctctggtagacgcgaagccctgttgtttttgaagaaaaagatttgcgagtgcatcacttcgggcccatcccatgccatagatgtcacaagggaggctataaaggatggggttgatgccgtgatagctgttggaggtgatggtacacttcatgaggtggtcaatggtttcttttgggaaggaagtccagtgtgtgctctggatcgagggcctgatcattcgacggcgctgggtctcattccacttggaactggctcagattttgctcggacatttggctggacaaatgatccccatgacgcgattgatcgaattgtgagaggagtaaaatcaaaactagacgtaggcgtgatggagggtccaaacagagaaccacacttctttgttaatgttgctgatatccatttgagtgctaaggcaggttattttgcttctatgtataagagttttggtaacttatgctatgtatttggagctttaagagccttttggggacataataatcaagatatgagaataaaggtaaatgggggagaatggagaactgttcataacgtcacagccctgtgcatagggaatgccaaatacttcggtggtggtatgaagataactccaacagctgatccgtttagtggcaaccttgaggttgttattcttcaagatttcaaatggtacgactttattctgaagctacacaggctctatggaggtacacatctatcagtgaatggtgtttcgtcaatgagggtccaatcaattgaagtagcagaggtggcggctagcggtggcgtctttgtgcaatctgacggagagcatttcggctttctgccgaccaagttttcagtccttccccgtgcagttgatttcttctgctagatcagcaagtgggctgcattcatcccctgcgcatgagacaagttctgccgtgctgtagcactccgccatgtaactataatttagccctgtcatatcgaatgtttgaacctccattccgggtattaaatgtagtcgaattataaaactaatttctcagccgaagattaaaagacgagacaaatctagtccagttggttgggtctatatttcatacttctatttaaaagtcaaatgcttgatgtgacccggattaaactttagtccctacaactaaacaccccctaatgcagcacgatgcatctagtctagcaagagaactgcagcacgggtgctttagtcactgctgttcgtagggtagccgtaaaatttggtgaggacaggtataccgtatagtatacggacgtatttaaccgttacattattctggcagcaaatgtcccaacaacaataaatgcactggaccgtagctagctatatgtagtttatgcgtataagctaatgcgttcccaacttgcagtaatcgatacgtcggtctgctctcaggttgtctttactctttatgtgaagatggactacggactatagattttaaacttgtattagttctttttctttttttttttttgaaaggagaagttgaaaagagcaagtaagtttactccacaataaattgacgagatagaacaagaaatggacgagtagtggctaaacggactacacaattcgggaaggagggactacccagcaggaacgtagctttttggcccatttggtcacactcacaatgggcaaacggctgtctcaaaacggcgttttttttattgcgactcaaaacgacaatacacccaattaatggtcactctcttgtgtagagagaatatctcctaattgagattatagttacctaatgaaatctttctagaagaaataaaa

SEQ ID NO: 206591 - DNA, 2809 bp, Zea Mays
tccacggcctcaaaacggcctacccgcatagctagggtttcttctctgccccctccggcaactcaggagagagcgcggctcctacccggcggcggtgaagccgcgacgatccaacggagcagaggcgccatggctgctcccgaagcgcccgcatgctacgtcgggatcgcgcggcagtccgccgccttccgccttatgaaacaaatggtgttggtgtagatagccctcataacaaatgggtatacgataccacccaatttgacaacatattgaagaaactgaaagtgcaatcagctaatcctgttcaagaagaggttgcagctgtagaaagtgattcacctgacatcacacccaagaaagacaaatcagcaaaacatgaagttactaaagttactcgacctcaaggaagatacaagaaaagagagagggggaaaagtgtgaactcttattcagcaacagatcttcaaggcatactctatcccaagctgatgatgtgaactggtgggggcacaagtttggatttttatcaggagggtttctaggagcaaaatcccgtaaaaataaatcttcacaaaaagatcttgctaatgtccgccagacatttgcagaggaagatcaagaaaatttgtacaatcttgttcaggataaagctacttctggaaagcagggtcttggcatcaaaggcctgccaatgaaagttgctggccaacgttggaagggaaacaaaacttcgtttgttgatagtgatgatgataattcagcccagtccgatgagtattcagaaatcgaagagaatggcgatgaggaagaacatatcagtgcttctgaatcaatagacacagataagaatgcagacaaagaattgcttgtggatgctagacccaaaaccaaggtcaagaaactttgcaaaagaatacttcgtcaggccccatctcagtcaatgaaattgaaggatcttaaggtcgccgttgaggaacactcaaatgttgtattttccagcttctctggtagacgcgaagccctgttgtttttgaagaaaaagatttgcgagtgcatcacttcgggcccatcccatgccatagatgtcacaagggaggctataaaggatggggttgatgccgtgatagctgttggaggtgatggtacacttcatgaggtggtcaatggtttcttttgggaaggaagtccagtgtgtgctctggatcgagggcctgatcattcgacggcgctgggtctcattccacttggaactggctcagattttgctcggacatttggctggacaaatgatccccatgacgcgattgatcgaattgtgagaggagtaaaatcaaaactagacgtaggcgtgatggagggtccaaacagagaaccacacttctttgttaatgttgctgatatccatttgagtgctaaggcaggttattttgcttctatgtataagagttttggtaacttatgctatgtatttggagctttaagagccttttggggacataataatcaagatatgagaataaaggtaaatgggggagaatggagaactgttcataacgtcacagccctgtgcatagggaatgccaaatacttcggtggtggtatgaagataactccaacagctgatccgtttagtggcaaccttgaggttgttattcttcaagatttcaaatggtacgactttattctgaagctacacaggctctatggaggtacacatctatcagtgaatggtgtttcgtcaatgagggtccaatcaattgaagtagcagaggtggcggctagcggtggcgtctttgtgcaatctgacggagagcatttcggctttctgccgaccaagttttcagtccttccccgtgcagttgatttcttctgctagatcagcaagtgggctgcattcatcccctgcgcatgagacaagttctgccgtgctgtagcactccgccatgtaactataatttagccctgtcatatcgaatgtttgaacctccattccgggtattaaatgtagtcgaattataaaactaatttctcagccgaagattaaaagacgagacaaatctagtccagttggttgggtctatatttcatacttctatttaaaagtcaaatgcttgatgtgacccggattaaactttagtccctacaactaaacaccccctaatgcagcacgatgcatctagtctagcaagagaactgcagcacgggtgctttagtcactgctgttcgtagggtagccgtaaaatttggtgaggacaggtataccgtatagtatacggacgtatttaaccgttacattattctggcagcaaatgtcccaacaacaataaatgcactggaccgtagctagctatatgtagtttatgcgtataagctaatgcgttcccaacttgcagtaatcgatacgtcggtctgctctcaggttgtctttactctttatgtgaagatggactacggactatagattttaaacttgtattagttctttttctttttttttttttgaaaggagaagttgaaaagagcaagtaagtttactccacaataaattgacgagatagaacaagaaatggacgagtagtggctaaacggactacacaattcgggaaggagggactacccagcaggaacgtagctttttggcccatttggtcacactcacaatgggcaaacggctgtctcaaaacggcgttttttttattgcgactcaaaacgacaatacacccaattaatggtcactctcttgtgtagagagaatatctcctaattgagattatagttacctaatgaaatctttctagaagaaataaaa

SEQ ID NO: 206592 - DNA, 1479 bp, Zea Mays
cgcgccccagcctcccacctagaactccgcgcccagcgctttccgtaaccaccaccaccacagcgggcacagtgacaggttgaggagacggccgccatgggagaggagaagaagacgggcaagggcggcggcggcggcggcggcgacaagaagaaggacgccggcgctggggccgcgccgcagcccatcgtgttgaaggtcgacttgcattgcgccggctgcgccaacaaggtccgcaaggccatcaaagcgcgcaccaggcgtggagtcggtgacgccggacatggcggcgggcaaggtggtcgtgaccggtccggcggacgcggtgcagctcaaggagcgcatcgaggctagggccaagaagcccgtgcagatcgtctccgccggcgccggttcgcccaagaaggacaaggagaagaaagctgacggcggcgagaaaaatgcggccaaagagaagggcggcggcgatgcagagaagaagaaggccgacaagaagaagggaggcggtgatggaggagagaaaaatgccgacaagaagaagggcggcggcggcggcgataagaaggccgacaaggagaagggcactggcaaacccaaggaggaagaggaggaggaggagaagcccaaggaacccaaggaggagacggttacgctcaagatccaactgcactgcgacggctgcatggaccgcatcaagcgccgcatctgcaagatcaaaggtgtgaaggatgtggcgttcgacgccgccaaggacctggtgaaggtgacgggcaccatggacgccgccgttctgccggcgtacctcagggagaagctcagccgggacgtcgaagtcgtcgcgcccggcaagaaggacggcggcggcggcggcgacaagaagggcaagggcgcaggagacggggcagagaagaagaacaagaagaaggacggtggggccgaggggaagaacgatagagccgcggccgcggccgcggccgccgcctccgcatcggtggcgccgattcccttggccgacgccggcggcatgtacctgatgcccccgcactacgggtacatgccgtacccgccggctcccggcggctactacggcgccgctccaccgcccaaccacgccggcttctacgccaacgccggtgtccattacccgcccccgacagcctacggctacggccccgcccacctccacgcgccccagatgttcagcgacgagaaccccaacgcctgctccgtcatgtgatctctcgttcgttcgctcgctccgccggtttgccatcggcgccccttcttccgtcattgtgtcagaccaagaatcgtggcttgggttttaacagtcggtttaattaattatcagttagtgttagccagtttaatcattgctccgagttcattaccagcagacctgtgtaaatgacagcagcgagtctcgctccgccccgttgtaatgcagcgtcatgtgtactttagccggacccgacaaaa

SEQ ID NO: 206593 - DNA, 1070 bp, Zea Mays
atccaacggagtagccagcccactcactacccatgcccagttctccctgtccaccggccgccgccgccgctgccgtgcgcttaatcctacccctgtctgtctcctcatccagtgcaaggagcgcccaccgctgcctgtgtcgtttggtcaccggagatggatggggatgaggagaacgtcgggccgttccgccggactagcgcgcgcacgcgccgcatggccacgcgcatggcgtccgcgctcgccagctcggacaatcgcgcccaggctgcattagctcgccttgaagctcttgagagcgataatggtggggtcgaggtggtagatcttaatgatgatgagtacggatccacggatgaagaagaccctgttctcatgcaaaaaaaacagtccaagatcatgaaacgtaaaacaaggcaagggaaagctttggagaagagggcagcaagatcactcatggatgtgctacaagaagcaaatttggagtccgttcctcctcatgtgccaacatattcaagggctgctgtgggtccaccgagcacttcatctcgacgccactactgctcagtttgcggtagctctgcaacctacacatgcgtgaggtgtgggacgcggttctgttcatgccgctgtcaagtcatacacaatgatacacgctgcctgaagtttgtggcttgatcggctggatatgtataagctacatttgatgtgggggtttggtaagttgtagaaaaccattttctcagtagtgtactgcagttgcaccgaccacttttgtttttttttcccagaaatgttgtgcgagctcgcagttatgcagtagagctgaaagtagctcttggttccaagatatctgaatggtaatttgagtgcttggcagtgtttcttgatggactaaactctggtattagatatgaactagtatgttaatatcacaattgaccagcttatgatatcaacaaacgtcaataaaatagtactgcaaatgatgtaatgcataatataatgttgaaacagtatagtatatatttcatttcgaggattggcacagactacagtgctgtaatgga

SEQ ID NO: 206594 - DNA, 2233 bp, Zea Mays
ctgctgcttatctcgtggccgatccgcgctcgccccgtccccgcatctcgccgccgcgccccggtcagtgtgcgcttgagacatcgcccacacgagacatcgtgtgtgatgcccgcccccaacccttccccggtgtgatgcccgccgttgacgtctcttctctcgcccccatcctcctcaacctcggcgccgcccctgcccctgtcctcgatggcaaggaaacttcccccgggcataaatctcactgctcacgcgccattagcgccatacccgctacctcctctggcatgccacacgccgccatccccctagcccatcgtgtgtcacgcgcccagatctcctatttttacgcccccacgcaacataggccatcccaccatggagcaagaaaccctagcgtagccaccaaccactgctgccccacatggcatcctgactgtggctgcatccatctcggcgcctcgcccaccacgttgcaccaccaccgccgctcctcctccccaccgcgctgtcgccctgagtaccaccgccaccgccaccgtgcatgtcgctagggccgcatctctcgatgttagggcccaaccgaacatcgtcgtcgcctccacctctgcgtctgggccaccgcaagagtttagggctcctccggggttcgagatcatgtccgaccagcagagcagcatcctcagcaccatgctcgacaaccccctccacctcggtactggcgtcttcgccctcgggttgtctgcgctcttctcttagggatcgagaatcgcagggaggttcctcgcttctataagaaagatgtgcttttttatttcattttccttgtggagttgtagttcagttcagtttgtcttcatgcatggggagtgcttggttcgattgttcatagccataggtgctacagattcgtctatggccaagacagaagtttttgttttcatgatgttttcatggaagaagatggcgagaagctctctgcccttctcatagttaactcttttgattaagtgattaaccaatttagtaacacatatttaatgtttcagcttgtttggtttagacatggtccctcagtaaattttttatttttttattatctttatccataaactaagttggtatgtagtgacgggtaagaaatactgtggtggtttggacctcagttattggccagatgaagggcgaaggccattatcagatcctcgtccacctttgggctattgctgacaagtggacgagtgtcgtacacctctccaattccccccttcaatgtggtcagtgttgaatcatctacgtcatacagtgagcaagggcatactgatgagggaagggatgacatggatttttctcgttcgagcatcaggttttgtgcgttgattatggtgtgctcgttggtgagactgcgacgtcctcgttcaagtcagctgataatcgtgtcctccaagagcaactactacagaagaatgtggaaatcaacgatttataagaaaaagtttttcacgttgagcaataactctcagcaaaagtggatatatcctctgagaaggaagctgattgtgcacatcaggagactattgatttgaaatctaaacttcagtccaaggttcttttactgataatgttctttcactttgtgtatttgagccccttgtgtagtgcatattcttcaacatacaatattcatggtttggttactgacctttcaccaaattttctgttatgtccttcctgtaattctacttgatagaaatagtatgcatgttcattagatggctatatgcaaactgcttgtattttatgctttccttgttgatatttaagccaaccaactttgatgatgtactttggtaggaagctaaaattgaaaagatgaaatatgagcatctggcgagggaggctgctttggtagaggatcttcttgaagaggagtacaagaaaaagtttgatgaggcaaacaaggaactatctcttgagaatgatctagcaagcatgtgggttcttgttgctaagttgaaaagaggggctttagacacatctgatttgaatgttgatgatcgaactaaagtgtaagggcgtagagatcgccacactgttgtctcataattggtgttaataaaaaataacatggtgctgcacggaatctctactttgtcttgtaagcaggattgttctgtcggtataatttgatttgtatgtataatgtcttcatgctttacttgcccttttatga

SEQ ID NO: 206595 - DNA, 1615 bp, Zea Mays
cgcgcgcgcgctcgctcgctcaacaaccgcaacgcaccctaacgtctccagtcgcgctcaatcgccggccgactgggctctcgacctctcgtctcgtcacacaccatccgaaagccaccgggcaaccaaccaggccgccgtgtgatcccgatcgcgtactgcgcgcacgcagtacagctcgcgcgcgcaccagacagacgccttctccctctcccgcagtacagggtacagctcgcgctcacacaagacaccatctccctgcctgcgatccgatgcgtccaacgttttcagccggggtacggtcctaccaccgctgtgcctaataattggcggctagctagctagctagctgcagctgctgcgatcctggatcggcacagccggttcttgatgtggagggagcggcggcgggcgctgctcctgctggtggccggcgcggcgctgggactgatcggtgccgcgctcgcgagcgcgccgccggaggccgcgctgaaggtcgggttctaccatgcgacgtgccccatcgcggaggacgtggtcctcgccgagatgaggctcatcctcatggaggacgccacggtcgcgccgtccctgctccggatgcactaccacgactgcttcgtgcagggctgcgacgggtcgatcatgctccagtcgaggaagaaggggaaggcggagcgggacgcgctgcccaaccgtagcatgcgagggttcgacgccatcgagcggatcaaggcccggctcgagaccgtctgcccgctcaccgtctcctgcgccgacatcatcgccatggcggcgagggacgccgtctacctgagccacgggccgtggtacgacgtggagaccgggcggcgcgacggcaacgtcaccgtggccgagtacgtcgacaacgacctgccgccgccggactccaacattgtcgacgtgaagaccttcttcagcgtcaagtcgcttaactcgaaggacatcgccgtcctcttcgggtgccacagcatcgggacctcccactgcggcccgatccagaagcggctctacaacttcaccggcaacatggacggccaggacccgtcgctggacccggcctacgccgccgagctcaggaagctctgcccgcctcccagacccggcgacgatgctaggaaggtcaaggtgcctttggaccccggcagcaactacaccttcgacctgagctactaccgccacgtgctcgccacgggcgggctgttccagtccgacggcagcctcctgcacgaccccgtcaccagaggctacgtcgagaaggtggccaaggcgtcgtcgcccgacgagtactacgcggacttcgccgcggcgatggtcaagatgggccgcaccgacgtgcttgtcggcgatcatggggagatcaggccaacgtgtggcatttttgttgactaggttcaggattgggttgaagatgcgaagataatctgtacgggtttctgtcaacgtgtactgtgcgtgctgttagatcagaaagagcacggtcgctgttaactgtgtatccgggaatgctgttctgttcacacacggtcgtcactgatctactgaattgtcagccatgatgtaattatttatctacgtattagttgtaaataaa

SEQ ID NO: 206596 - DNA, 1317 bp, Zea Mays
cagattcattaacatgcctatcctaccactataaaggtacacaaagcttccgaagggaagaagctcttgagaagatactgcaatgatggctcctctgtctcctagactggtagtgcccgtagacgtgaagaagctgccgcgggagcaaaaggtccctctccacaaccgctggcacccggatatccctcctgttgctgatgtaaccgaaggggaattgttccgcgttgagatggtcgattggagtggagggcgggttagggatgataactctgcagatgatctgaaattcatggatttcacaattgctcattatcttagtgggcccctaagaatagttgattctgaaggggttccagcttcaccaggtgatcttctcgcggtagaaatctgcaaccttggcccacttcctggcgacgagtggggttacaccgcaatacttgaaagggagaatggaggtggattcttaactgaccacttccctagcgcaagaaaagccatctggtatttcgaaggaatttacgcatgctccccgcagataccaggtgttcgttttccaggattgactcatcctggtgttgtgggaactgcaccgtcacttgagctcctaaatatatggaatgaaagagagaaaagtttgtctgagacaagcctagagactattaaactgtgtgaagttctacaccagaggccccttgctcatttaccgacccctgaaaattgcttacttgggaaggtccaagaagggactgctgaatggcacataattgcaaacgaagcggccagaactattgctggaagggaaaatggcgggaattgcgacataaagaacctaagcagaggctccagaatttatctaccagtgtttgtcgaaggagcaaacctcagcactggtgacatgcacttctcccagggggacggcgagatttcgctgtgtggagcaattgaaatgagcgggttccttgagctcaagtgtgagatcataagaggtgggatgaaggaatacttgactccagttggtccaacaccactccatgtgagccccatctttgagataggtcctgtggagccacgtttctcggagtggttagtgtttgagggcatcagcgtagatgagtctgggaagcaacattttcttgacgcatctgtggcctacaagcgtgcagttctgaacgccattgagtacctttccaagttcgggtactctaaggagcagtctggattggggtaaaaaccccgtggaccaaatccgcttggatgaaatcccggcccacacgatagcagcgttcgtttaatcccgctcgggcctcgaccccggcc

SEQ ID NO: 206597 - DNA, 2496 bp, Zea Mays
cagattcattaacatgcctatcctaccactataaaggtacacaaagcttccgaagggaagaagctcttgagaagatactgcaatgatggctcctctgtctcctagactggtagtgcccgtagacgtgaagaagctgccgcgggagcaaaaggtccctctccacaaccgctggcacccggatatccctcctgttgctgatgtaaccgaaggggaattgttccgcgttgagatggtcgattggagtggagggcgggttagggatgataactctgcagatgatctgaaattcatggatttcacaattgctcattatcttagtgggcccctaagaatagttgattctgaaggggttccagcttcaccaggtgatcttctcgcggtagaaatctgcaaccttggcccacttcctggcgacgagtggggttacaccgcaatacttgaaagggagaatggaggtggattcttaactgaccacttccctagcgcaagaaaagccatctggtatttcgaaggaatttacgcatgctccccgcagataccaggtgttcgttttccaggattgactcatcctggtgttgtgggaactgcaccgtcacttgagctcctaaatatatggaatgaaagagagaaaagtttgtctgagacaagcctagagactattaaactgtgtgaagttctacaccagaggccccttgctcatttaccgacccctgaaaattgcttacttgggaaggtccaagaagggactgctgaatggcacataattgcaaacgaagcggccagaactattgctggaagggaaaatggcgggaattgcgacataaagaacctaagcagaggctccagaatttatctaccagtgtttgtcgaaggagcaaacctcagcactggtgacatgcacttctcccagggggacggcgagatttcgctgtgtggagcaattgaaatgagcgggttccttgagctcaagtgtgagatcataagaggtgggatgaaggaatacttgactccagttggtccaacaccactccatgtgagccccatctttgagataggtcctgtggagccacgtttctcggagtggttagtgtttgagggcatcagcgtagatgagtctgggaagcaacattttcttgacgcatctgtggcctacaagcgtgcagttctgaacgccattgagtacctttccaagttcgggtactctaaggagcaggtgtatcttttactatcatgctgcccatgcgagggtaggatatctggaatagtggactctcctaatgctgtaacaactcttgccatccctacagcgatatttgatcaggtatgctgccaagagtccagcccatcgcaattttctttggtcttttttactgtcatatgcactgtatcgttgctgctccttttaagtgtaaagtgttcatcaacagattagttaaacagttttcctttagtctgatactctgatgtttgatccaagtgtctgatatatgctgctggtacttcatgtgttatgtctgaagaaacaaaagttactgcctgcatatcgtgaactcatgagcaggccgtacaaacaaaccacacaattttgatgctgattaacgtgagctgggcaaggttcagggttcaccaagactagatttatatcaccctctccattttattgaaagtatcttatgtgagtaagcctggttcatttgatcagcggcatgcatcacctaactgtttcttgtgataatgtgatccggtcaatataaaagcgacccaaatattatagaatatacttttccgctgacagttactattaggcaaagtgtaagaacaacttgtatgaagaagtgacaatgaccagcggtcagcggagaagaaacatgttattattttcagcacaaggctataggcagattgaaattgcttacttcgatactaaaaaaaatatattgatctgtaccagtttgtttttgggcctttgggcattttgatcgtcgttcccttttaaaactaaaatgcataacatttcgatttccaacgtaggatataaagccaaaacgcgtgaaggggagaccacttggaggaccacagttgagaagacttccagatcttctaagctgctcaaatcatggacgccttcctgccacccaagacagaagtggtacaagcgcgccctagtatatggaaacagatgcagtatcaatcgacatgcaactgtgccaaggctataatcaagaatgcgtttgtctttttttttttattttcttcgtctaataaaaattacgataaagcttttgccgttctttagaaaaaaataatcaagaattatcctcgattcatcaggttgtcatcgtgaatgagagtgagccttttggttttataccagccaggctctttttaaatggtactgcataaattctcaaatatttatcgtccgctagtttatttttaaactaaaccgtaataaagaaaaaagaacggagggagtatatgcatgcagaccatgat

SEQ ID NO: 206598 - DNA, 1498 bp, Zea Mays
cagattcattaacatgcctatcctaccactataaaggtacacaaagcttccgaagggaagaagctcttgagaagatactgcaatgatggctcctctgtctcctagactggtagtgcccgtagacgtgaagaagctgccgcgggagcaaaaggtccctctccacaaccgctggcacccggatatccctcctgttgctgatgtaaccgaaggggaattgttccgcgttgagatggtcgattggagtggagggcgggttagggatgataactctgcagatgatctgaaattcatggatttcacaattgctcattatcttagtgggcccctaagaatagttgattctgaaggggttccagcttcaccaggtgatcttctcgcggtagaaatctgcaaccttggcccacttcctggcgacgagtggggttacaccgcaatacttgaaagggagaatggaggtggattcttaactgaccacttccctagcgcaagaaaagccatctggtatttcgaaggaatttacgcatgctccccgcagataccaggtgttcgttttccaggattgactcatcctggtgttgtgggaactgcaccgtcacttgagctcctaaatatatggaatgaaagagagaaaagtttgtctgagacaagcctagagactattaaactgtgtgaagttctacaccagaggccccttgctcatttaccgacccctgaaaattgcttacttgggaaggtccaagaagggactgctgaatggcacataattgcaaacgaagcggccagaactattgctggaagggaaaatggcgggaattgcgacataaagaacctaagcagaggctccagaatttatctaccagtgtttgtcgaaggagcaaacctcagcactggtgacatgcacttctcccagggggacggcgagatttcgctgtgtggagcaattgaaatgagcgggttccttgagctcaagtgtgagatcataagaggtgggatgaaggaatacttgactccagttggtccaacaccactccatgatataaagccaaaacgcgtgaaggggagaccacttggaggaccacagttgagaagacttccagatcttctaagctgctcaaatcatggacgccttcctgccacccaagacagaagtggtacaagcgcgccctagtatatggaaacagatgcagtatcaatcgacatgcaactgtgccaaggctataatcaagaatgcgtttgtctttttttttttattttcttcgtctaataaaaattacgataaagcttttgccgttctttagaaaaaaataatcaagaattatcctcgattcatcaggttgtcatcgtgaatgagagtgagccttttggttttataccagccaggctctttttaaatggtactgcataaattctcaaatatttatcgtccgctagtttatttttaaactaaaccgtaataaagaaaaaagaacggagggagtatatgcatgcagaccatgat

SEQ ID NO: 206599 - DNA, 1434 bp, Zea Mays
cagattcattaacatgcctatcctaccactataaaggtacacaaagcttccgaagggaagaagctcttgagaagatactgcaatgatggctcctctgtctcctagactggtagtgcccgtagacgtgaagaagctgccgcgggagcaaaaggtccctctccacaaccgctggcacccggatatccctcctgttgctgatgtaaccgaaggggaattgttccgcgttgagatggtcgattggagtggagggcgggttagggatgataactctgcagatgatctgaaattcatggatttcacaattgctcattatcttagtgggcccctaagaatagttgattctgaaggggttccagcttcaccaggtgatcttctcgcggtagaaatctgcaaccttggcccacttcctggcgacgagtggggttacaccgcaatacttgaaagggagaatggaggtggattcttaactgaccacttccctagcgcaagaaaagccatctggtatttcgaaggaatttacgcatgctccccgcagataccaggtgttcgttttccaggattgactcatcctggtgttgtgggaactgcaccgtcacttgagctcctaaatatatggaatgaaagagagaaaagtttgtctgagacaagcctagagactattaaactgtgtgaagttctacaccagaggccccttgctcatttaccgacccctgaaaattgcttacttgggaaggtccaagaagggactgctgaatggcacataattgcaaacgaagcggccagaactattgctggaagggaaaatggcgggaattgcgacataaagaacctaagcagaggctccagaatttatctaccagtgtttgtcgaaggagcaaacctcagcactggtgacatgcacttctcccagggggacggcgagatttcgctgtgtggagcaattgaaatgagcgggttccttgagctcaagatataaagccaaaacgcgtgaaggggagaccacttggaggaccacagttgagaagacttccagatcttctaagctgctcaaatcatggacgccttcctgccacccaagacagaagtggtacaagcgcgccctagtatatggaaacagatgcagtatcaatcgacatgcaactgtgccaaggctataatcaagaatgcgtttgtctttttttttttattttcttcgtctaataaaaattacgataaagcttttgccgttctttagaaaaaaataatcaagaattatcctcgattcatcaggttgtcatcgtgaatgagagtgagccttttggttttataccagccaggctctttttaaatggtactgcataaattctcaaatatttatcgtccgctagtttatttttaaactaaaccgtaataaagaaaaaagaacggagggagtatatgcatgcagaccatgat

SEQ ID NO: 206600 - DNA, 1678 bp, Zea Mays
cagattcattaacatgcctatcctaccactataaaggtacacaaagcttccgaagggaagaagctcttgagaagatactgcaatgatggctcctctgtctcctagactggtagtgcccgtagacgtgaagaagctgccgcgggagcaaaaggtccctctccacaaccgctggcacccggatatccctcctgttgctgatgtaaccgaaggggaattgttccgcgttgagatggtcgattggagtggagggcgggttagggatgataactctgcagatgatctgaaattcatggatttcacaattgctcattatcttagtgggcccctaagaatagttgattctgaaggggttccagcttcaccaggtgatcttctcgcggtagaaatctgcaaccttggcccacttcctggcgacgagtggggttacaccgcaatacttgaaagggagaatggaggtggattcttaactgaccacttccctagcgcaagaaaagccatctggtatttcgaaggaatttacgcatgctccccgcagataccaggtgttcgttttccaggattgactcatcctggtgttgtgggaactgcaccgtcacttgagctcctaaatatatggaatgaaagagagaaaagtttgtctgagacaagcctagagactattaaactgtgtgaagttctacaccagaggccccttgctcatttaccgacccctgaaaattgcttacttgggaaggtccaagaagggactgctgaatggcacataattgcaaacgaagcggccagaactattgctggaagggaaaatggcgggaattgcgacataaagaacctaagcagaggctccagaatttatctaccagtgtttgtcgaaggagcaaacctcagcactggtgacatgcacttctcccagggggacggcgagatttcgctgtgtggagcaattgaaatgagcgggttccttgagctcaagtgtgagatcataagaggtgggatgaaggaatacttgactccagttggtccaacaccactccatgtgagccccatctttgagataggtcctgtggagccacgtttctcggagtggttagtgtttgagggcatcagcgtagatgagtctgggaagcaacattttcttgacgcatctgtggcctacaagcgtgcagttctgaacgccattgagtacctttccaagttcgggtactctaaggagcaggatataaagccaaaacgcgtgaaggggagaccacttggaggaccacagttgagaagacttccagatcttctaagctgctcaaatcatggacgccttcctgccacccaagacagaagtggtacaagcgcgccctagtatatggaaacagatgcagtatcaatcgacatgcaactgtgccaaggctataatcaagaatgcgtttgtctttttttttttattttcttcgtctaataaaaattacgataaagcttttgccgttctttagaaaaaaataatcaagaattatcctcgattcatcaggttgtcatcgtgaatgagagtgagccttttggttttataccagccaggctctttttaaatggtactgcataaattctcaaatatttatcgtccgctagtttatttttaaactaaaccgtaataaagaaaaaagaacggagggagtatatgcatgcagaccatgat

SEQ ID NO: 206601 - DNA, 553 bp, Zea Mays
tgacaccggctggccagcgtccacgaggggaatggcaattgactgaccgacgctatccctatggtgtttgcttctcatccatactcaggatataaagccaaaacgcgtgaaggggagaccacttggaggaccacagttgagaagacttccagatcttctaagctgctcaaatcatggacgccttcctgccacccaagacagaagtggtacaagcgcgccctagtatatggaaacagatgcagtatcaatcgacatgcaactgtgccaaggctataatcaagaatgcgtttgtctttttttttttattttcttcgtctaataaaaattacgataaagcttttgccgttctttagaaaaaaataatcaagaattatcctcgattcatcaggttgtcatcgtgaatgagagtgagccttttggttttataccagccaggctctttttaaatggtactgcataaattctcaaatatttatcgtccgctagtttatttttaaactaaaccgtaataaagaaaaaagaacggagggagtatatgcatgcagaccatgat

SEQ ID NO: 206602 - DNA, 615 bp, Zea Mays
ccgacgctatccctatggtgtttgcttctcatccatactcaggtgtatcttttactatcatgctgcccatgcgagggtaggatatctggaatagtggactctcctaatgctgtaacaactcttgccatccctacagcgatatttgatcaggatataaagccaaaacgcgtgaaggggagaccacttggaggaccacagttgagaagacttccagatcttctaagctgctcaaatcatggacgccttcctgccacccaagacagaagtggtacaagcgcgccctagtatatggaaacagatgcagtatcaatcgacatgcaactgtgccaaggctataatcaagaatgcgtttgtctttttttttttattttcttcgtctaataaaaattacgataaagcttttgccgttctttagaaaaaaataatcaagaattatcctcgattcatcaggttgtcatcgtgaatgagagtgagccttttggttttataccagccaggctctttttaaatggtactgcataaattctcaaatatttatcgtccgctagtttatttttaaactaaaccgtaataaagaaaaaagaacggagggagtatatgcatgcagaccatgat

SEQ ID NO: 206603 - DNA, 2054 bp, Zea Mays
ttttcttgttcttcggtagtagttttgttctttggatttttgtcggctgtctgagctttgacgtgaggtttgcaaaccctttactttgtctgcaaaatgttaaggaaacaagcatgttaagaatccttctgattacaaatttaagctattttgcaaaatgttaaagcaacaagcatatttagaatccttctgatttcaaatttaagctattctgcaaaatgttaaggcaacaagcatatttagaatccttctgattacaaatttaagctattctgaatcaaatgacagcaaacgcagatctgctatgagaataaggaataaactaaaactggagctgtgatatcgacaacaataaaattgtttagtgttttaacaaacaatttatatataactaagagaaagggacatttgtatttgcggcagatttagctgtaagtctgtaacccatcccatcttcagggaaaatcagtctttcgttcttgtttctatatttttttttagaaatgtgattggatttgaaaaaagtcagaactaaaaatgtttttataattgggatcaaatttaaaagagcctagacttgaaatagaatcagaatatgtggatatatagaaacgagacatgatttaatattctcaattactcatatgtaaaggcacacggtaatttaggatcaaggtatcattggtttccctaacagagaccagtagctctaaaccccagaaaagaggaagcttagtttgtttttttactcttgattcagtcaggtggcatatactaaattgtagatttggttctaccatgagatacttgttttagtcagtatgttgattatttttaaagcaaaacactgaatattcacctcgcttaaatagctttatatctttgaagtaaaggggtcaagtgcatgcatgaagtagttgtagtcttcagaggaggaatgtcttctctatttatattgtctaagtgtcattctaattagtgtattgaagaccttttctcactggttgttacgtgcttgttctatcaaaaagatagatgcatcattatctggatccatgatctcgtcatgtttagtttacaggagatgtagtgtttagcaacttatcagttttaacaaaccatgagattgttgtgtttgttgtttgaaaagacgttgtaataaggttgccttcgccgtaacaaaaatttagactgggttgagcttttagattatcccacagcgcagccgttatcagttctggacgccttttggttacgtggccattcagaacacaaagtgcatgtctccctggattaaccgaacaatattttggagttagggattacagccttgaaggggattatacccccaaggggttcaagtgataggaggggattaacttaatccctccctggaacgtatccctctctggaatgaatccctgtgaaccgaacaagccctgagtggtatcttaacctcgggggttggggattttatacaggtgtatcttttactatcatgctgcccatgcgagggtaggatatctggaatagtggactctcctaatgctgtaacaactcttgccatccctacagcgatatttgatcaggatataaagccaaaacgcgtgaaggggagaccacttggaggaccacagttgagaagacttccagatcttctaagctgctcaaatcatggacgccttcctgccacccaagacagaagtggtacaagcgcgccctagtatatggaaacagatgcagtatcaatcgacatgcaactgtgccaaggctataatcaagaatgcgtttgtctttttttttttattttcttcgtctaataaaaattacgataaagcttttgccgttctttagaaaaaaataatcaagaattatcctcgattcatcaggttgtcatcgtgaatgagagtgagccttttggttttataccagccaggctctttttaaatggtactgcataaattctcaaatatttatcgtccgctagtttatttttaaactaaaccgtaataaagaaaaaagaacggagggagtatatgcatgcagaccatgat

SEQ ID NO: 206604 - DNA, 3965 bp, Zea Mays
gcaaaagagcaaactgccaagtgcaaagcgaaaccatcaaaccggtgccgatgctctgccggcgcccgtgccccggcgtgttcctccgcctcttcgccacttcctgccgccgcagctccctccacccctcgcagccgcacctccggacagctacagctctcccgacgctgcctgtggcgaagaaggtccccttcaatgtgtcggcgcacgggaggtcgtggagtgacccgtaccactggatgcgcgacacctccgacccggacctcgcggtcctcctcgccgctgagaacgcgtacgccgacgcgttcgtaggatcggcaggtggcggcggcctccgcgcgcacctcgccgcggagatgcgcgcccggctgcccgcttctactgccacaccgcctcagctctggggaccttggttgtattatcagtatgttccagagggaaaggagtaccctgttttatctaggaagctgaggccctctagtggtctggtaggaactctgcttgattacctttctggttctgagaaggagcaagtgttgcttgattggaacgaggttgcagaaaaaaatggtttttgtaattgaatctgataatctaagagaaggattatggcctatacggaaacgtgttgacaaagttcagtactttttggagcaccacaacgggttcttttacattcttaccaatgctcctgtaaatgataccgaaacgacaactgaaggctactatctggccaggtgtagggctgaaaagtcactggtggatagatggcagattgtgacggtacctgactcggactgcaccattcaggatatggacatttttcatgataatttagttctctttcttcgaaagaatggtactcctcttttttgctccatcagtatgccaattgatgttgatgttcaggagccaaaggaacttgatgatctcaacccatggttttttcccataccgtcagagttatgcagcattgttgctggatccaacaatgatttcatgtcatctacttatcagctagttatttcatcacctgtgataccggacttaactgtggactatgatttgagaaaaaagactttcaccatccttcatcaagaggaagtaactaccatctctgcaaatctaggcggcctgggctttcaatccaatgtttcaagcatccaacaaaacatgcagcttgttaaaacctcacaaaattggagtgatctttccaagctattctcatgtgaaagggttgaagttatatcacatgatggtgtttcaatacctttagtgatcctgtattcatggggagcacattgtcatggagaatcacctgggatcttatacggttatggagcttatggagaggatttggacaaaagctggtgttctgagaggttaagcctcctctctcgaggttgggttcttgcatttgcagatgttaggggtggaggggatttatcatggcatatggcaggaaccaaagctaataaaatgcattcaattcaagattttgctgcatgcggcaggcatctcataaagcaaggctttgttcaccaaaatcgcctttgtgctataggctgtagtgctggtggtctgttggtgggtgccgtcattaatatgcttccagacttattttctgctgcagttctcaaggtcccctttcttgatatctgcaacacaatgttggatcctactttacctctcactgtcttggactatgaagaatttggtgaccctaatagcccagatgagtttgaggcgatcagcagttattctccttatgataacttagcacctgatgtgtgctatcctccagtcctggtgactgcctcgtttaatgatacaagggtaggagtttgggaagctgctaagtgggttgcaaaagtaagagatgtcgcgtgcccatcctgttcccagtcagttattctcaaaactaatatgcaaagtggccattttggtgagggtgggcgtttcacgcactgtgatgaaacagcctttgagtatgcatttctcatgaaggccttgggtttggatgacgtagctatgatgtagcgtactcatgcctgaggattttcacggaacagatttttttgtggctctggaagcaaaaactgagataattaccttttgtgatatgctcagggataagattgtatcctcataattattgattaaaagagctcgcaatggaaggtgatgcacccttgaggtgtgttctgtttggcattggcttttaatagtcaagctgtggatttctacatgcatattatcaacttatgctttcaaaaatagcacacttggatgctgctcatcaacagtgcaaaggtggcagatgagatccttattatggtgttcgatatggggcttttgaccaaaggataaatggttgatcatggatgttgattttgacttctacttcatacggcaggaatctacaggaacaacggctatctgatggtctcctgcaacggcgggcttaaccagatgcgagcagcaatttgtgacatggtaaccatcgcaaggtatctgaacgttactctcatcgtaccggagttggataaggcttcattttgggctgatcccagcgatttccaagacatatttgacgtggactacttcatagcgtcgctgagagacgaggtccggatcctgaagcagctgcctccgaggctcaagagaagagtggagatgggatccctccggtccctgccaccagtcagctggtccgacatcggctactaccgccgtcagattctgcctctggtaaagaagtacaaggtcgttcacctgaacaggacggatgcccggctcgcgaacaacggcctgcccgtggagatgcagagactgcggtgtcgcgtcaactacaatgccctgagatttacccctgaaatcgaggatctgggcagacgcctggttcgagctcttcgccggaacgggccctttgtggtccttcacttgcggtatgagatggacatgcttgccttctccggatgcacgcacggttgcagcagcatggaggctcaagagctcacgaagatgagatatgcctacccatggtggaaggagaaagtgatcgactcggacgccaagaggaaagacgggctgtgtccgttaacgccggaggagaccgcgctggtgctgcaggcgctcggcattgaccgcggctaccagatctacattgccgcaggcgaaatatacggcgggcagagaagaatggctgcgctcacctcggcttatcccaacgtggttagaaaggagacgctgttgccttgggaagtcggcctgttccagaaccactcctcccagatggctgcgctggactacatggtgtccctggagagcgatgtcttcatacccacctacgacggcaacatggccaaggtcgtagaaggccatcgcaggtacctggggtttcggaagacggtgctgctggaccggaggcgtatcgtcgagctcgtcgacgagtacaggaacggcacgttgcgctggaccgacttctcgtctgccgtcatggcgtcgcacaccagccgcatgggcgaaccgtccaggaggcagacggttcctgacagacccaaggaagaggactacttctacgcgaacccgcacgagtgcctgcaccagccggaagatgtctccgccttgtgatacccgcgctcccgcggtacaatacagtacagtggatgatgcgcgggctttcggagtccagaaccacatgtatatgtaatagactaatagcgcattcgacagcgttgcgttggcagagggtaaacgtaaacggacgaggagggcctcgcgttcggtccggttgaacgagcatgtgagttaggattcggtacacagattcatggaacggtggttcgccgattcttttttctgttcagaataagcagaccctttcgttgttgttcttgtgtacagcagacgaagtcgtgaagataataacaacagcagcagaatcgtcgtgaaaaagtcgttgg

SEQ ID NO: 206605 - DNA, 4357 bp, Zea Mays
ccagcccactcggccaccccttccgcagcaaaagagcaaactgccaagtgcaaagcgaaaccatcaaaccggtgccgatgctctgccggcgcccgtgccccggcgtgttcctccgcctcttcgccacttcctgccgccgcagctccctccacccctcgcagccgcacctccggacagctacagctctcccgacgctgcctgtggcgaagaaggtccccttcaatgtgtcggcgcacgggaggtcgtggagtgacccgtaccactggatgcgcgacacctccgacccggacctcgcggtcctcctcgccgctgagaacgcgtacgccgacgcgttcgtaggatcggcaggtggcggcggcctccgcgcgcacctcgccgcggagatgcgcgcccggctgcccgcttctactgccacaccgcctcagctctggggaccttggttgtattatcagtatgttccagagggaaaggagtaccctgttttatctaggaagctgaggccctctagtggtctggtaggaactctgcttgattacctttctggttctgagaaggagcaagtgttgcttgattggaacgaggttgcagaaaaaaatggttatgtccacattgggagttgtcgaatctctccagatcataggtttcttgcatatacagttgatacatctgggggtgaactattttcccttgaagtgaaagatctgctgtctgagcatgtcatctttagttcaccagacaagggagtagttagtttagcatggtctggcaacaatgaaagtttattttacactgtctgtgatgagactctacgtcctaaccaggttttctgtaaaaagttgcaatcggatgaagcagggtttctagttttcacggagaaagatgtaaactgttgtgtggatattacaagcacaaaagattttaagtatatgactgtcaattctaacactaggacatcatctgaggtttttgtaattgaatctgataatctaagagaaggattatggcctatacggaaacgtgttgacaaagttcagtactttttggagcaccacaacgggttcttttacattcttaccaatgctcctgtaaatgataccgaaacgacaactgaaggctactatctggccaggtgtagggctgaaaagtcactggtggatagatggcagattgtgacggtacctgactcggactgcaccattcaggatatggacatttttcatgataatttagttctctttcttcgaaagaatggtactcctcttttttgctccatcagtatgccaattgatgttgatgttcaggagccaaaggaacttgatgatctcaacccatggttttttcccataccgtcagagttatgcagcattgttgctggatccaacaatgatttcatgtcatctacttatcagctagttatttcatcacctgtgataccggacttaactgtggactatgatttgagaaaaaagactttcaccatccttcatcaagaggaagtaactaccatctctgcaaatctaggcggcctgggctttcaatccaatgtttcaagcatccaacaaaacatgcagcttgttaaaacctcacaaaattggagtgatctttccaagctattctcatgtgaaagggttgaagttatatcacatgatggtgtttcaatacctttagtgatcctgtattcatggggagcacattgtcatggagaatcacctgggatcttatacggttatggagcttatggagaggatttggacaaaagctggtgttctgagaggttaagcctcctctctcgaggttgggttcttgcatttgcagatgttaggggtggaggggatttatcatggcatatggcaggaaccaaagctaataaaatgcattcaattcaagattttgctgcatgcggcaggcatctcataaagcaaggctttgttcaccaaaatcgcctttgtgctataggctgtagtgctggtggtctgttggtgggtgccgtcattaatatgcttccagacttattttctgctgcagttctcaaggtcccctttcttgatatctgcaacacaatgttggatcctactttacctctcactgtcttggactatgaagaatttggtgaccctaatagcccagatgagtttgaggcgatcagcagttattctccttatgataacttagcacctgatgtgtgctatcctccagtcctggtgactgcctcgtttaatgatacaagggtaggagtttgggaagctgctaagtgggttgcaaaagtaagagatgtcgcgtgcccatcctgttcccagtcagttattctcaaaactaatatgcaaagtggccattttggtgagggtgggcgtttcacgcactgtgatgaaacagcctttgagtatgcatttctcatgaaggccttgggtttggatgacgtagctatgatgtagcgtactcatgcctgaggattttcacggaacagatttttttgtggctctggaagcaaaaactgagataattaccttttgtgatatgctcagggataagattgtatcctcataattattgattaaaagagctcgcaatggaaggtgatgcacccttgaggtgtgttctgtttggcattggcttttaatagtcaagctgtggatttctacatgcatattatcaacttatgctttcaaaaatagcacacttggatgctgctcatcaacagtgcaaaggtggcagatgagatccttattatggtgttcgatatggggcttttgaccaaaggataaatggttgatcatggatgttgattttgacttctacttcatacggcaggaatctacaggaacaacggctatctgatggtctcctgcaacggcgggcttaaccagatgcgagcagcaatttgtgacatggtaaccatcgcaaggtatctgaacgttactctcatcgtaccggagttggataaggcttcattttgggctgatcccagcgatttccaagacatatttgacgtggactacttcatagcgtcgctgagagacgaggtccggatcctgaagcagctgcctccgaggctcaagagaagagtggagatgggatccctccggtccctgccaccagtcagctggtccgacatcggctactaccgccgtcagattctgcctctggtaaagaagtacaaggtcgttcacctgaacaggacggatgcccggctcgcgaacaacggcctgcccgtggagatgcagagactgcggtgtcgcgtcaactacaatgccctgagatttacccctgaaatcgaggatctgggcagacgcctggttcgagctcttcgccggaacgggccctttgtggtccttcacttgcggtatgagatggacatgcttgccttctccggatgcacgcacggttgcagcagcatggaggctcaagagctcacgaagatgagatatgcctacccatggtggaaggagaaagtgatcgactcggacgccaagaggaaagacgggctgtgtccgttaacgccggaggagaccgcgctggtgctgcaggcgctcggcattgaccgcggctaccagatctacattgccgcaggcgaaatatacggcgggcagagaagaatggctgcgctcacctcggcttatcccaacgtggttagaaaggagacgctgttgccttgggaagtcggcctgttccagaaccactcctcccagatggctgcgctggactacatggtgtccctggagagcgatgtcttcatacccacctacgacggcaacatggccaaggtcgtagaaggccatcgcaggtacctggggtttcggaagacggtgctgctggaccggaggcgtatcgtcgagctcgtcgacgagtacaggaacggcacgttgcgctggaccgacttctcgtctgccgtcatggcgtcgcacaccagccgcatgggcgaaccgtccaggaggcagacggttcctgacagacccaaggaagaggactacttctacgcgaacccgcacgagtgcctgcaccagccggaagatgtctccgccttgtgatacccgcgctcccgcggtacaatacagtacagtggatgatgcgcgggctttcggagtccagaaccacatgtatatgtaatagactaatagcgcattcgacagcgttgcgttggcagagggtaaacgtaaacggacgaggagggcctcgcgttcggtccggttgaacgagcatgtgagttaggattcggtacacagattcatggaacggtggttcgccgattcttttttctgttcagaataagcagaccctttcgttgttgttcttgtgtacagcagacgaagtcgtgaagataataacaacagcagcagaatcgtcgtgaaaaagtcgttgg

SEQ ID NO: 206606 - DNA, 2817 bp, Zea Mays
cagcaaaagagcaaactgccaagtgcaaagcgaaaccatcaaaccggtgccgatgctctgccggcgcccgtgccccggcgtgttcctccgcctcttcgccacttcctgccgccgcagctccctccacccctcgcagccgcacctccggacagctacagctctcccgacgctgcctgtggcgaagaaggtccccttcaatgtgtcggcgcacgggaggtcgtggagtgacccgtaccactggatgcgcgacacctccgacccggacctcgcggtcctcctcgccgctgagaacgcgtacgccgacgcgttcgtaggatcggcaggtggcggcggcctccgcgcgcacctcgccgcggagatgcgcgcccggctgcccgcttctactgccacaccgcctcagctctggggaccttggttgtattatcagtatgttccagagggaaaggagtaccctgttttatctaggaagctgaggccctctagtggtctggtaggaactctgcttgattacctttctggttctgagaaggagcaagtgttgcttgattggaacgaggttgcagaaaaaaatggttatgtccacattgggagttgtcgaatctctccagatcataggtttcttgcatatacagttgatacatctgggggtgaactattttcccttgaagtgaaagatctgctgtctgagcatgtcatctttagttcaccagacaagggagtagttagtttagcatggtctggcaacaatgaaagtttattttacactgtctgtgatgagactctacgtcctaaccaggttttctgtaaaaagttgcaatcggatgaagcagggtttctagttttcacggagaaagatgtaaactgttgtgtggatattacaagcacaaaagattttaagtatatgactgtcaattctaacactaggacatcatctgaggtttttgtaattgaatctgataatctaagagaaggattatggcctatacggaaacgtgttgacaaagttcagtactttttggagcaccacaacgggttcttttacattcttaccaatgctcctgtaaatgataccgaaacgacaactgaaggctactatctggccaggtgtagggctgaaaagtcactggtggatagatggcagattgtgacggtacctgactcggactgcaccattcaggatatggacatttttcatgataatttagttctctttcttcgaaagaatggtactcctcttttttgctccatcagtatgccaattgatgttgatgttcaggagccaaaggaacttgatgatctcaacccatggttttttcccataccgtcagagttatgcagcattgttgctggatccaacaatgatttcatgtcatctacttatcagctagttatttcatcacctgtgataccggacttaactgtggactatgatttgagaaaaaagactttcaccatccttcatcaagaggaagtaactaccatctctgcaaatctaggcggcctgggctttcaatccaatgtttcaagcatccaacaaaacatgcagcttgttaaaacctcacaaaattggagtgatctttccaagctattctcatgtgaaagggttgaagttatatcacatgatggtgtttcaatacctttagtgatcctgtattcatggggagcacattgtcatggagaatcacctgggatcttatacggttatggagcttatggagaggatttggacaaaagctggtgttctgagaggttaagcctcctctctcgaggttgggttcttgcatttgcagatgttaggggtggaggggatttatcatggcatatggcaggaaccaaagctaataaaatgcattcaattcaagattttgctgcatgcggcaggcatctcataaagcaaggctttgttcaccaaaatcgcctttgtgctataggctgtagtgctggtggtctgttggtgggtgccgtcattaatatgcttccagacttattttctgctgcagttctcaaggtcccctttcttgatatctgcaacacaatgttggatcctactttacctctcactgtcttggactatgaagaatttggtgaccctaatagcccagatgagtttgaggcgatcagcagttattctccttatgataacttagcacctgatgtgtgctatcctccagtcctggtgactgcctcgtttaatgatacaagggtaggagtttgggaagctgctaagtgggttgcaaaagtaagagatgtcgcgtgcccatcctgttcccagtcagttattctcaaaactaatatgcaaagtggccattttggtgagggtgggcgtttcacgcactgtgatgaaacagcctttgagtatgcatttctcatgaaggccttgggtttggatgacgtagctatgatgtagcgtactcatgcctgaggattttcacggaacagatttttttgtggctctggaagcaaaaactgagataattaccttttgtgatatgctcagggataagattgtatcctcataattattgattaaaagagctcgcaatggaaggtgatgcacccttgaggtgtgttctgtttggcattggcttttaatagtcaagctgtggatttctacatgcatattatcaacttatgctttcaaaaatagcacacttggatgctgctcatcaacagtgcaaaggtggcagatgagatccttattatggtgttcgatatggggcttttgaccaaaggataaatggttgatcatggatgttgattttgacttctacttcatacggcaggacatgccaagatggcctcgggacgttggtggtg

SEQ ID NO: 206607 - DNA, 914 bp, Zea Mays
attttgttgagtggtggattttggctgttttcttggagctctgtatgagcagggttgcaattttgacaccacaaaaccttcaggttcctactatgaatgaaatgattgacatgtggaagaaaaataagatgaacacttttggaattatctacagctggtttcttgcaaaggttgctagccaacttgaggtgttacctggagctgagttccgggtggcatttgaggaagcaatgagctacggtggcaaagttatcctaggagaccgccctgtccagatcactttgaggaggacctgggggaaaatgtcactatggcacagggcaaaatttctgtactacatcattttccagtctgtatttttaccaagcccagaggaactgaataagatgttaaaggacatggatgatgttgacatgctaacacttgttattcaagagatgagcaaggcatttcctagtttgatggacacacttctacatgagcgagatgtatatgtcttcaacgttgttgaagtcggccagggaatattcttcagtggttgcagttgtgggaaaggggcatgtttctggaataaagaaaaattggcaacagccaattcaggtaaactgcttattagaattacctgatgctaaccaaggtccttcaaagctgaagattttggcatccattggagcattaaccggagtaataatagcatccggaatatatgtatggggtagaaagtaacagacgtgagtgcaatgtgttcaatgagcctttaaatctcgaaaaaaagtatttagtttatttacctataatctgtttcatttgttctaaatataaatagatgtaatttctgaaattgaaattaaacaaatgaaaggacaggtgcagcagataaatgaaacatgttttttcctctcatggtatgcctt

SEQ ID NO: 206608 - DNA, 595 bp, Zea Mays
tgcgctgctctcgtcgtcgacggggttagtggccggctcattgcttgtggcgtcgctgtggccacctacaacgacggggcaacggatttcagagacacgcctgcttacaaggaatcccaatcacaggagttccctgaggagtcggaatcatcgagcgctgatgtgttcgaaggcaacccgactgaggtagcaccagctcttgagtaggactagcaaggaggcacgggggagaaaactcgtctctctattcaagctttagcctatagggagggcttcgcgtttgctgtatagatataaaaggtttggttaaaatctgatgctacgaaaattggctggtataattattttgtactggattttcccttagaatcaaatatagatggatggctagtgcctggtggtgatgggattcaactgtgttattccaaaaaagtgggggatgggggaaagaaacagagcatcagagcaagcattactgtcttttcctgtattttgtattcatcctggaaagtgtgtaactcaaataaaatttcacaaatacatcatgtaccggcacaatccataattaatgaacatgtggcttctcagattcggt

SEQ ID NO: 206609 - DNA, 1643 bp, Zea Mays
gcaaaatccacggcctcaaaacggcctacccgcatagctagggtttcttctctgccccctccggcaactcaggagagagcgcggctcctacccggcggcggtgaagccgcgacgatccaacggagcagaggcgccatggctgctcccgaagcgcccgcatgctacgtcgggatcgcgcggcagtccgccgccttccgccttatgaaacaaatgggatgggaagaaggtgaaggccttggcaaagacaagcaaggcataaagggtcatgttagggtgaaaaacaagcaggacacactaggtgttggtgtagatagccctcataacaaatgggtatacgataccacccaatttgacaacatattgaagaaactgaaagtgcaatcagctaatcctgttcaagaagaggttgcagctgtagaaagtgattcacctgacatcacacccaagaaagacaaatcagcaaaacatgaagttactaaagttactcgacctcaaggaagatacaagaaaagagagagggggaaaagtgtgaactcttattcagcaacagatcttcaaggcatactcgtacgcaaaaatgaagataattccaaagtggatcagaaacttgaaccgacatgcttggatgaacctgatcccatcatctgtttggatgcagtatcccaagctgatgatgtgaactggtgggggcacaagtttggatttttatcaggagggtttctaggagcaaaatcccgtaaaaataaatcttcacaaaaagatcttgctaatgtccgccagacatttgcagaggaagatcaagaaaatttgtacaatcttgttcaggataaagctacttctggaaagcagggtcttggcatcaaaggcctgccaatgaaagttgctggccaacgttggaagggaaacaaaacttcgtttgttgatagtgatgatgataattcagcccagtccgatgagtattcagaaatcgaagagaatggcgatgaggaagaacatatcagtgcttctgaatcaatagacacagataagaatgcagacaaagaattgcttgtggatgctagacccaaaaccaaggtcaagaaactttgcaaaagaatacttcgtcagtcaatgaaattgaaggatcttaaggtcgccgttgaggaacactcaaatgttgtattttccagcttctctggtagacgcgaagccctgttgtttttgaagaaaaagcttcaaggaagcaggaaattcaatgtggacggcaagaaagttcagctcgtgtcatgaaagccaagcaaataggaattctttacgttgttggtgtccagcactcgtatttgttgttgctcgaggttccaaacagatgtaggagcacattgagctatgtagtactagtactggtatagataaatagtcaaaacctatcgcagatgcggaggtaaaattttgcaaattttcgtgaggggcagagttcctaatttgtgtgcggcgcattcgatgtaaccgtggcttatttgttttgcatgagatgtgcaaactgcaatgctatgtattgctcgtaaattatgtctatggattcacataattggagtattaaggcatgtaaaatctaattaaacgaggggtctttagggggctaattataaaaaatcaagaggcaa

SEQ ID NO: 206610 - DNA, 2254 bp, Zea Mays
gaaaaaaactgtccctgcctctgtactcgagtgggcgcagtgaataccctctctcggtccctccaaccgcgctcgtcttatcctcaactcgtcacccacttcccgccatctgccgtccctgcactgcgcttataccctgcaggcaacagcagcgatggcggcgagggtaccggcggccgatctcaaccagcacctctcctcgccgttcatcgcacggcgctgccacggcccaggtgaagccgccctcgaggcgcctctcagcgtacgcatcaaatccagaacgccgcggcgacgcgcggaatccacgaccacgaggatcctctgcaggggcgcagaggcgcagccgggctctggaggagggaggaggagggagccgctgcggcgcggggccgtcagcgcgcgcctcccggtgccggaccacatacgccggccgccctacgtcggcacggccgccgtcccggaggtgtgccccgaccggcaggtgcacgacggcgagagcatcatgcggatgctggacgcctgcgagctcgccgctcgggtgctgcaccatgccggggcgatggtcaagccctcggtgacgacggacgagatcgacagggctgtgcaccagatgatcgttgacgccggcgcctacccctcccctctcggatacggcgggttccccaagagcgtgtgcacgtcggtgaacgagtgcacctgccacggcatccccgactcacgcgagctacaggatggcgacattatcaacatcgacgttactgtctacttaaacggataccatggggacacctcgaggacgtacctgtgcggagaagtcgacgacgcaactaagcagctcgtgaaggtcactgaagagtgcatgatgcgcggcatatcagcctgcaggcacggcgccagtttcaaggaaatcggccagagaataagtgagcacgcggagaagtacggatacggcatcgaccccttcgtggggcacggcgttgggaggatgttccactgcgagcccatcatatggcatacctcctcctggacggcagcaatcacatcaccatctcggccggcggcagcgccaggttgaggtccagccgcaggcccacgggcggcgccgcgtcgaacactacagacgacgacgacgaggacagcgacgatgacccagagtagctctgctgctcctcgctcttgggcggcaagaagtgcagcagcgccggcgtcacggcggccgccgccgccgggtccgcgaacagctggtacggctctgcggccgccgccgcagccggcagcgccaggctgaggtccagcgacggggccgccagcggcagggagcacgacgacgccgacgccgacgccgacgacgactcgtacaccacggcgctcccgctcccgctcgccgctggagcctccgccaacgcctccgccgtcggctccggggcggggtagttggtggcggcgccgggcccgcggagcttgcgcgcggcggcgtcgtacgcccgcgccgcctgctccggcgtgtcgaaggtgcccagccacacgcgcgccttccgcaccgggtcgcggatctccgccgcgtaccggccccacggccgcttccgcacgccgcgcagcctcggctgctccgccgccgccgccgccgacactggtctcttgggcgccatggacggaccgaccagcaacacaactgcctctgccttgcttgctttctctcgctgctgcttgtctgccgaggagcttcggaggatggatggacgggtgggaatgggaatgccgctgccgctggcgaggcgcgggaatatatatacacagacgggacaggaccaagggagggcggcggacggtgacaggcagggtgaggtggagtgtgggaggaggagagcagacgcacggaaggtgaggtctgatctgtctgtggaccgggcttgggcgtacgtgggggcagtgggggcccggggcgccgcccccaaccaagcgcgtttcggcggccgtttcttcgtttcttgtgcgtcggcgcgtgaggcgcgtgagctaccgtgtctgctccgccgctggttcgctcggatccgtctcgtggctcacgtgggacgcgcccgcgtacttcgttgcccgcccacgcccagccgtcggatccgtgattgatgcttcatgatccgtgctgtgctgttgtctgaaaggttgaggtcgccgcaggttcgtctccaagtccagtggcggatatttataaataacctgggctaatatatatatatatatatatatatatata

SEQ ID NO: 206611 - DNA, 2337 bp, Zea Mays
gaaaaaaactgtccctgcctctgtactcgagtgggcgcagtgaataccctctctcggtccctccaaccgcgctcgtcttatcctcaactcgtcacccacttcccgccatctgccgtccctgcactgcgcttataccctgcaggcaacagcagcgatggcggcgagggtaccggcggccgatctcaaccagcacctctcctcgccgttcatcgcacggcgctgccacggcccaggtgaagccgccctcgaggcgcctctcagcgtacgcatcaaatccagaacgccgcggcgacgcgcggaatccacgaccacgaggatcctctgcaggggcgcagaggcgcagccgggctctggaggagggaggaggagggagccgctgcggcgcggggccgtcagcgcgcgcctcccggtgccggaccacatacgccggccgccctacgtcggcacggccgccgtcccggaggtgtgccccgaccggcaggtgcacgacggcgagagcatcatgcggatgctggacgcctgcgagctcgccgctcgggtgctgcaccatgccggggcgatggtcaagccctcggtgacgacggacgagatcgacagggctgtgcaccagatgatcgttgacgccggcgcctacccctcccctctcggatacggcgggttccccaagagcgtgtgcacgtcggtgaacgagtgcacctgccacggcatccccgactcacgcgagctacaggtatatatgtaattgctgaacctgcttgatttttgagctgaacggttctgcttcctcccaatggccttgcaggatggcgacattatcaacatcgacgttactgtctacttaaacggataccatggggacacctcgaggacgtacctgtgcggagaagtcgacgacgcaactaagcagctcgtgaaggtcactgaagagtgcatgatgcgcggcatatcagcctgcaggcacggcgccagtttcaaggaaatcggccagagaataaggtctcggtctctcgatcttatcgaacatacaagcgtttcttttttaaaaaaaaagcagcttatttcagtcaatagaacttgattgttaagaacgccgacagatcgcaccgcgcggattgttttccattgctgtgaactggctctgctttggttgttttgttccagtgagcacgcggagaagtacggatacggcatcgaccccttcgtggggcacggcgttgggaggatgttccactgcgagcccatcatatggcatacctacgattacgagcccgggttcatggtcgcaggccagacattcaccgtagggaatggtcacgtgctgagaacccgtgcgatgcagagccgacgctgtcgatggggagcacgcagtgcgtggtgtgggacgacgggtggacggccgtggcggcggacggcagcctcagcgcgcagttcgagcacaccgtgctggtcaccggcgacggcgcggaggtcctgaccgggttcccgtagctgcctgcacgcatcacgtgagcggtgagcctgggtgggccactgcgtcggcgagggacggaactgcaggagcaggcatgcagctatgcgcacgctgacaattttattaaaaatctatgttggacggttgccgtatcacccgggccccggcccggcagcacacgagcgctcgcggcggccgcgggtccaacagccacactacgctacgccacgcgccgtggggccgatgagcggtggagctcctgccaccagctctgctctggcctccggcctccgtgggtagttgcctgctggagtttccccgaaagcgacgcgcgcgtgcatcccctgctggcgtctgccatctgtggaggtgggaggtggaacgggcaaccggatcgccacgccacgcaaatgtcgtcagtcaggtctgggcggtgccgcgtctgccgcgcgcgcgcccggcgcccctccccaccgcccgccgtaccaataataaatttatttattcctccctgccgacatggggcgcacgcacctgcagcgaaacctcaccgtgcttgcccagccgcccagcgacgcgttcaggcggcggcggcgctcccagtctattgatcgatgcttctgcgatgcccatgtgggccatgtggctgtagctgctctacggtatccatccatccattcgtgctgtcgtcggcgtccccgtgcctgcgtctgcgaactccacgctgcgtgacacgttacggttcagctctcagaccttgagaggtttcagaagcgggtcgagtaaaaaataaaacgagagctcagaagtgaatccagggaataaaatgagagccgctggggcataattatccctctccctctctc

SEQ ID NO: 206612 - DNA, 1629 bp, Zea Mays
gcaactactagatgtacagatttctcgttagattttacatgaggatgggtttcaaagcagttcatgaggttgatggatcatcaatcagtgatcttggtcacatgttggtgtggggaggtaggggtactagaatggatgctgatattgaagagcttcttattaagtggggaaacagattcagactacaagactaaaaggtggatggtaatactgatatgttttgtcgagacatgcagtttttgcagcatgccgcatacaaatcttgtttggatgcaataaggtacaagccttgcttcaacctttcttaacatacaattactgtacatcaagatcttgctatgtttcagttcttcagtatatccaattgaatttgttatgaagttatgtgaacacataaggttatttccttatattctaaaatagtggttagctattgcttgattgggaagtgtgattacattttccaacaagggctggccattttatcttgattgaaatggtggagtgaataaatttcctcagggaattttaggattctgaaggaggtcggcccaaaattttcccatttaaatagagctacgaggttatgagaagggtgtattaaatttttaattacccttcatctcttatacaactaatgagttgacatgtcatatttaaagtcaattcatgcacaagggaaatagtgtagtagttcctggttaaacatcctatgacatttatggactaacaattgttaggtgtgtaatggcatgacctagtgaattttttgataatagaacaaaattttagcctctaccatcagggatggtagacaggtgagcgtcaacgacaaagccaagccataaggctcaattcttacaacctaacagggaatagaaaagcaaaaagcaacataggttacatagatcggagtgctgtatgtgttccatttagtttctgttgtctcctctgttttttgactgcattcatgagtactcatatgcaatcctttgatggtgacatgaaactgacccaattgtcatattgtccgatggaaatcgcagcttatctaggatggatctatttttacccctggtgctttgacaatgtgatcgctgctaggagcatatatggatttgtacttgtatcttagacaaaatgacactctggtccttttttcatttgaagcaataaatctttgtgctggtggtgtcagctgccaacaatgattcttgtcatgaaactctgcgataatagccacttggaagagcagtctatacttaagtttttttttgatattggggatactctccggcctctgcagcaagcactgacacgatgattgtttattttcttatgttggactttgacctctgaacttcattatcatgctactgtaagtgtaaggtaacaatttagtatttttgttatgagcaaaaagttttgttgtccgtcaaggtgaattgaatgcatatacatttgctaagcaaaataatatatccgttgctatgtatcatgatatgatgatgaggtgtccgacaagacaatcttggctctaaagaatattgagaaaggtaaatcttgtggtgcctaggtgtaagatttagcgtgaaaatccatagtaccacttgggacgaagagcaacaa

SEQ ID NO: 206613 - DNA, 1644 bp, Zea Mays
caaataccgtgcgtccctctccgtaatcttctcccacacgtctgtgtgtccctctccatgcgttcctcttctcacgcagcctctcctcgcgccaccacctaccatcgcgccaccacttgccatcgcgccgccaccttccctctccctctcaccgctccacggtgacgagccccgccaccccgcgcctaccgccgacgagcagtgccactccgtgctaggtctattcaacaacaggcagaacagacacctctccaacaccccagatcttctattcaagaacttgctccaggctagaggtaatctactcgtatccgtctgatctattaaacaaaatacctgcagtgtgcatccatacagattatcagttttgtctgtgcgagctgtgaacaaataattatcagttttgtctgggcgagctattgtttacacgagtacagtagggactagggagccgatgaacagctagtataattatcagaacaactagtataattatcagaatacctactgataatagtataattatcagaacagctagtataattatcacatttgtaagtttagtcactagtttgatttttctaatatgatttttctacactatccttgaacaacagtatgacccatcttcctttatctacacgaacgcggaagagaaatttgacacttagaaatgtaacatttgccattatgcttatgtattattatatcttggctttattagtattatcacataagtggaagagttggaagatagaaaggaggataaagattaaagaacttagaagtcaatgtatgtaccatctaatctgtgagagcaatgttaagtgtataaatgaccttcgcatcgataggaaaatatttcatatattgtgtgagatgcttagagatgttggtggtttgaggggtacaagaaatgcaccattggaatagatagtagccgcattcttacacacactggctcatcatgtgaagaatagaacaatagggggtttcttcttaaggagtggtgagacagtgagcagaaacttcaatgcatgcctcctagcagtattgaagcttcaccaattgctccttaagaaaccagaacctatacctgagggctgcacagactttaggtggaagcacttcaaggtaccaaacttgtcaatagaaatctatctactagattatactaataggtgaaaaatattaatactatttgttatttggattataatagagttgcttgggtgcattggatggcacacatgtaaaggtgattgtcccaactaagctgaaggggagatataggtcaagaaaaagagaaattgtgacaaatgtgttgggtgtttgtgcacctggcatgtagtttatatatgtcttacctggttgggagggttctgcacatgacaggcgtgtgcttcgagatgccatctcgacaccggatggattacgtgtccctcaaggcgaggtctgtcccttcatattgaaaaaaaacaattatttacacatagttattggtgttaaacttatactttcttttttccatgttaaggttgctattatcttgttgatgctggttacacaaatgcaaatggtttcttagcaccatatcgaggacagaggtgtctcaacatctaatgaatggactgatttccgcaa

SEQ ID NO: 206614 - DNA, 992 bp, Zea Mays
cacctatcgcctctcccgcgcggcccgcccacccccatggagtcgtggcggaggcggacgctgctcaaggtcatcgtcctcggcgacagcggatacgtgagcaagaagttcagccagcagtacaaggcgacgatcggtgccgatttcctcaccaaggaggtgctcattggcgacaggctcgtcaccttgcagatatgggacacggcgggacaggagaggttccagagtcttggcgtggcgttctacaggggtgccgattgctgtgtgctggtttatgatgtcaatgtcaagagaagctttaatacgctcgatacctggcatgatgagttcctcaatcaagctggcccatcggatcctcagcgctttccgttcattttggtcgggaacaagattgatttagatggcgggagcaaacggatggttccggagaagaaagcgagggaatggtgcgcctccaagggcgatattccatacttcgagacctctgcgaaggaggaccacaacgtcgacactgctttcctatgcatcgccaggctcgccttggagcatgagcatgaccaagacatttacttcaagacagttgcggaacaagtcccggacactgaacagacaagcggatgtgcttgctaggagtcagccatttcctggaaggctggaactacgtggatgttactgtatacaataagctcacagacctgatgacagctgtttaacaagcttttgtgtaattgtgtagccattcttaattttaattatggcatcaggggctgtgctattcgtctgatacctagaacacagatggggggcgtttgcaagctctgcttgcgccttctctcctagcatggacaataagaaccacacctggccttgcagaacagaacatatatatacttctgggtaaagacatgtgtagtgatggaactccatgtcggttgtgatctacaaatccatgcttaaacattcagttaagtactctaaagcctaaacacggc

SEQ ID NO: 206615 - DNA, 1137 bp, Zea Mays
gcctctcccgcgcggcccgcccacccccatggagtcgtggcggaggcggacgctgctcaaggtcatcgtcctcggcgacagcggggtcggcaagacgtcgctgatgaatcacaagaagttcagccagcagtacaaggcgacgatcggtgccgatttcctcaccaaggaggtgctcattggcgacaggctcgtcaccttgcaggtgctcgtcttggcctgattttcggctaactcgttcctgcacttgcaccggccaccaatgaggaaacgggccatgcatgcggcggtcgtcctagtatagtgttatgctatgcccctacccctactgtgtatgcagatatgggacacggcgggacaggagaggttccagagtcttggcgtggcgttctacaggggtgccgattgctgtgtgctggtttatgatgtcaatgtcaagagaagctttaatacgctcgatacctggcatgatgagttcctcaatcaagctggcccatcggatcctcagcgctttccgttcattttggtcgggaacaagattgatttagatggcgggagcaaacggatggttccggagaagaaagcgagggaatggtgcgcctccaagggcgatattccatacttcgagacctctgcgaaggaggaccacaacgtcgacactgctttcctatgcatcgccaggctcgccttggagcatgagcatgaccaagacatttacttcaagacagttgcggaacaagtcccggacactgaacagacaagcggatgtgcttgctaggagtcagccatttcctggaaggctggaactacgtggatgttactgtatacaataagctcacagacctgatgacagctgtttaacaagcttttgtgtaattgtgtagccattcttaattttaattatggcatcaggggctgtgctattcgtctgatacctagaacacagatggggggcgtttgcaagctctgcttgcgccttctctcctagcatggacaataagaaccacacctggccttgcagaacagaacatatatatacttctgggtaaagacatgtgtagtgatggaactccatgtcggttgtgatctacaaatccatgcttaaacattcagttaagtactctaaagcctaaacacggc

SEQ ID NO: 206616 - DNA, 1309 bp, Zea Mays
aaatgatctatgcaaacacaaactgaacttgcatcatatataccttttaggaatgtatgcgctcatgtgctactaaaaaatgatataacattgatgcatattgttattctttgccaaggcgtccaagattatcttctcattttcattttcagtttgttttcccggtgcaaatcaagtttaaggcatggatttagcacttggcggcttaacctcagagcacctgaccacctctcgctagaagaatctatatagaaagaagcatgttacggttaattgcatcctatcttctagatgctcaaagtggaatgagcgtgtcccctagagttcctgcccaggatatgaaagaaagccaagaagttaaagaagcactgagagcgcagatggaagtccaaagaagactgcatgaacaagtggaggtccaaaagcgcgtgcagatcagaatggaagcgtttcagaagtacatcgacagtatcctggagagcgcgtgcaagatggtcaccgaacagttcgcttcaagtggcttcagcatctctgaccctgatctcccggagatatcccctggaggggtggtcatgtgtggcggccccacggacacgttgagctcgtcggtgttcaaccagctttccgtcagctccatcggctcgcacagtccaggaggcaaaccttccccttccccatcaggcatggaatgtccgccgctgctcctccacaagtcgcatgagctcaagcggaggtcctcttgaactgacaaatcggcgaagcctgagggcgcggtgatggctgtctttgctagtgttgtcggatatggtggtactggtggtgacaagggaaattggtggtccagtcttgtggtagctgactttctccaggtagcaagatattgctgtgtttgtttgatcagtcaaagcatcaaacagacagacctacgttcatgtgaactgcctcatgcatgtgctagattgaaaaaaaaagttatcatattttgtcatgagattatgattctactagctagcatccttagcacacttgagatgttgttgactcgtgtcctagtgtcctctgtgttgatccatgtatgcacagcgattcatgttgggagttgggactgggacatgttaacaccagatgtttcaagcttcgtactttgcctcagttgtccatgcatgcagcaggcatcccagtacttcacctgctgttgaacttgaagactagtgtattcagcttatgaaagattcatgctgagtttgtacccccacaaattgctagttgcaactttgaactatattttccttttcttcgttttgaaaag

SEQ ID NO: 206617 - DNA, 2373 bp, Zea Mays
cggctcccagccccagaccgctgcatccgctgaacatgccgctgcctcagccgctgctcggcggcgcctcgcccgctccggcgcgagcggcctcatccttcctccacccccttctccacacgcgccaccgcgtctccactgcacctgccgctgcctcctccttcgtgcctgcatctcactcctcccacgcgaacgacgccatgctcctccgccgtgccgccgacgtggccgaccgttctgcgggactcacctccccgcacccgaacttcgggtgcgtcatcgcacggccccagcttaataccgacagcgctgattcctgggtggtcggcgaagggttcctctatgcgcaggggacgccctgcgccgagctcctcgcctcacaggaggccggtgagcacgcgcgcggcggcacggcatacctcaatctcgagcctggggactgctttggtgacaacacagccgtcggatccctcgtccaggcaggaattacaagagttgtggtgggtcttagacatcccttgaagcacttgagagggaaggcaattcaagcattacgaaatgaaggcattcaagttgatgttgtgggggaggatctgcagagtaaattgttcaaggaagctctgaagtcatgcctcactgtaaatgctccattgctttacagagctgcctttcatgtccctttttcggtcctgaagtatgctatgacagcagatggaaaaatagcagcaagtagtggacatgcttcttggataagtggcaaagcatcaagagggcgtgtatttgaattgcgtggcagaagtgacgctgttattgttggtggaaatacaatcctcgattaactgcaaggcatgttaaaggacatgttccagtgcgtatagtgatgtcacagtctcttaaccttccagaggaagcaaatttatggaatcttaacgatgcctatacgattgttgcgactcagagaggtgctcggcgagattttcaaaggaagcttgctatgaagggtgttgaagtagtagagtttgacatgctgaatccaagagctgttatgtcatattgttatgatcgtggttatcttgctgtattatgggaatgtggtggaacactagctgcttctgctatatctgcgagtgttatccataaggtctatgcattctgggctccgaaaataattgggggattaaatgcacctacgccagttggtgaactggggatgagtcaaatgactcaggcaataaatttaattgatgtctcgtacgagcagattgacagggacatgctcatgagtggattcatcgaacccattcctgatctttcacctgttataccatccgtggaagaaataccttccattgatccagaagtatctccatatgaaacaaatattatttccttttacaagacttgggatatttttggggctttctcaaacttttctcctcattcaattcaaatgcctgatgaaaatggagattatttcacatggccaacagtggaacactattaccaggctcataagtttgttggtgttgacaatcctcaagcaagagacattgttcaagaaataaagctagcaaagagtcctgaagaggctgctagaataggaaggacccgacaaaaagggttccctgaactggtaagaacagattgggagagtacaaaaatagatgtgatgtatagagctatcaaatgcaagttttcaacttatccccatctgactaatatgttgctgtcaactgctggctctgttctcgttgaggcatcgcctcacgatttattttggggcggtgggagggagggagaaggcctgaattacttgggtaggttgttgatgcagttgagatcagagattctggggacagtcccagcaagcgctgaagtaggggaggcagattgatcctgaagcgagcaaatcttgtttagcaggagtgttgattgcaagaccagacgttaaggtgtggctgggtcccgattgctacagtggatggtgctagtgaaacgaagcgcaaatgagattggttaaattatctgtatgcctgtgaagaacaaacataccatgggtcttgctcttttgtcgaacaatttcatctggccctcggggtataggaattatgaaatacaaaggaggaacaccaacagtcatgcatagaatgtggtagtcctggtagatgaatgtgtttgataaggtgataaggactaatacattggaccagaagtagaagacgtgcttgttcagtaatggttgtttagtaaaaaggagggcgaattatttaataaaattaaatgcatcattgcaccatgaagtcttttgcctttgtttcacttaggcccatcaacagggagagtaggtttttgggtacatgtttgatgcatctc

SEQ ID NO: 206618 - DNA, 2389 bp, Zea Mays
gccgccacggctcccagccccagaccgctgcatccgctgaacatgccgctgcctcagccgctgctcggcggcgcctcgcccgctccggcgcgagcggcctcatccttcctccacccccttctccacacgcgccaccgcgtctccactgcacctgccgctgcctcctccttcgtgcctgcatctcactcctcccacgcgaacgacgccatgctcctccgccgtgccgccgacgtggccgaccgttctgcgggactcacctccccgcacccgaacttcgggtgcgtcatcgcacggccccagcttaataccgacagcgctgattcctgggtggtcggcgaagggttcctctatgcgcaggggacgccctgcgccgagctcctcgcctcacaggaggccggtgagcacgcgcgcggcggcacggcatacctcaatctcgagcctggggactgctttggtgacaacacagccgtcggatccctcgtccaggaattacaagagttgtggtgggtcttagacatcccttgaagcacttgagagggaaggcaattcaagcattacgaaatgaaggcattcaagttgatgttgtgggggaggatctgcagagtaaattgttcaaggaagctctgaagtcatgcctcactgtaaatgctccattgctttacagagctgcctttcatgtccctttttcggtcctgaagtatgctatgacagcagatggaaaaatagcagcaagtagtggacatgcttcttggataagtggcaaagcatcaagagggcgtgtatttgaattgcgtggcagaagtgacgctgttattgttggtggaaatacagtgcgttttgacgatcctcgattaactgcaaggcatgttaaaggacatgttccagtgcgtatagtgatgtcacagtctcttaaccttccagaggaagcaaatttatggaatcttaacgatgcctatacgattgttgcgactcagagaggtgctcggcgagattttcaaaggaagcttgctatgaagggtgttgaagtagtagagtttgacatgctgaatccaagagctgttatgtcatattgttatgatcgtggttatcttgctgtattatgggaatgtggtggaacactagctgcttctgctatatctgcgagtgttatccataaggtctatgcattctgggctccgaaaataattgggggattaaatgcacctacgccagttggtgaactggggatgagtcaaatgactcaggcaataaatttaattgatgtctcgtacgagcagattgacagggacatgctcatgagtggattcatcgaacccattcctgatctttcacctgttataccatccgtggaagaaataccttccattgatccagaagtatctccatatgaaacaaatattatttccttttacaagacttgggatatttttggggctttctcaaacttttctcctcattcaattcaaatgcctgatgaaaatggagattatttcacatggccaacagtggaacactattaccaggctcataagtttgttggtgttgacaatcctcaagcaagagacattgttcaagaaataaagctagcaaagagtcctgaagaggctgctagaataggaaggacccgacaaaaagggttccctgaactggtaagaacagattgggagagtacaaaaatagatgtgatgtatagagctatcaaatgcaagttttcaacttatccccatctgactaatatgttgctgtcaactgctggctctgttctcgttgaggcatcgcctcacgatttattttggggcggtgggagggagggagaaggcctgaattacttgggtaggttgttgatgcagttgagatcagagattctggggacagtcccagcaagcgctgaagtaggggaggcagattgatcctgaagcgagcaaatcttgtttagcaggagtgttgattgcaagaccagacgttaaggtgtggctgggtcccgattgctacagtggatggtgctagtgaaacgaagcgcaaatgagattggttaaattatctgtatgcctgtgaagaacaaacataccatgggtcttgctcttttgtcgaacaatttcatctggccctcggggtataggaattatgaaatacaaaggaggaacaccaacagtcatgcatagaatgtggtagtcctggtagatgaatgtgtttgataaggtgataaggactaatacattggaccagaagtagaagacgtgcttgttcagtaatggttgtttagtaaaaaggagggcgaattatttaataaaattaaatgcatcattgcaccatgaagtcttttgcctttgtttcacttaggcccatcaacagggagagtaggtttttgggtacatgtttgatgcatctc

SEQ ID NO: 206619 - DNA, 3520 bp, Zea Mays
ccccccttctgctctagccttcacgactaaatccaccaccactcccgcacacctcacctgcccgcgtcgcctcctcccctgtcctccgcgcgcgttgggcgggcagccagctcccccaccaaaccctaatcactccggcgccgcgccgcgccgcgcggccctgcctcgatccgctccagcggccgcccgccgaggcggctgtgcggtggttgcgcttgcgcttacgcgcgcaggtccccgtgggtctctgcgcgcagcgggacccgtccacggcggcgaggcgcgggcttcaaggcgggcgcaggcggaggggcggaattgctcgggcgatgacacggaggctcgcggccgcggcgtcgcgtccgaggccgtgaatgggagtggcggggcgctgcgggcggcggctgcgtacatggaggccggggcaccgccccgcggctggcgctgtggggtgctctggctcgtcagcgtcgagattgtgttggttctagtctgcactcgcggagctggtgcggattctggtgaaagcaaaggatcgtttctgcaagactctgaagctggagaaaaggatgtctaccttagccactcctgcatccacgacgagatactacatcaacggcgacgagctgggaggaaggagtactctgtcatgccacaagtgtaccatgagtctcgggaggatgcggagcgtgtaagaggacgacacttgttgggcatgtcatcttggcgtgctccgcacgagaatgccaggaagccaatacgaatatacctcaattatgatgccgtcgggcattcgcccgaccgtgattgtaaaaatgttggcgacatcgtgaagcttggcgaacctcctgtatcatcagcaccaggaacacctatatgcgatcctcatggtgatccaccactggtgggagactgctggtacaattgcacccttgaggacatagctgggaaagacaagaggcaacgtctccgtaaggcactggggcaaacagtagagtggtttagaaaagctctagctgttgaacctgtcaaggggaacctacggctcagtgggtactcagcttgtggtcaggatggaggtgtacaactacctcatgcgtatgttgaagatggtgttgctaatgctgatttagtcctcttagtaacaactagaccaacaacaggtaacacccttgcatgggctgtggcctgtgaacgtgaccagtggggtcgggccattgcaggacatgttaatgtggcccctcgtcatttgacagctgaagctgaaacattactttcagctactctaatacacgaggttatgcatgttctagggtttgatcctcatgccttcacacattttcgtgatgaaaggaaaaggagacgtggtcaggttactgctcaaagtttggataaaaagcttggaagaatggttactcgtgttgtcctaccacgagttgtcatgcacgcgagacatcattatggagcattttcccaaaacttcactgggttagaattggaagacgggggaggccggggcacctcaggttcacattgggagaagaggctcttaatgaatgagatcatgactgggtcagtggatacgagatctgtggtttcaagaatgactttagcattactggaggacagtggatggtatcaagctaattacagcatggctgaacatttagattggggtcagaatcagggaacagagtttgttatatctccttgcaactcatggaaaggggcataccattgcaatacaactcaattatcaggatgcacatataatagggaggcagaaggttactgccctatagtaaactatagtggggacttgcccaagtgggctcaatattttccccaagccaataaaggttgctgttgatgggatctggaagtcatgtccacaatctggtgggcctgttcagtttccaggattcaacggggaattaatttgcccgatgtatcatgagttgtgtactactgtaccagttccaatgattggccaatgtccaaagtcatgcagttttaacggtgactgcattgatggaacctgtcactgctttcctggttttcatggccatgactgcagcagaagatcttgcccagacaagtgcagtaaccatggtacatgcaaagctaatgggatctgtgaatgtcaaagtggatggacagggattgactgctctacagcggtttgcgatgaacaatgtagtttacatggaggggtttgtgataatggtaaatgtgaattccgttgttcagattatgcaggctacacatgtcagaagggttctgcaatactgccaagtctgtcaatgtgtcatgatgtacttgttagagattcagatgggcagcattgtgcgccaagtgaactcagtatactacagcagcttgaaactgtagttctcgtgccaaattacaatagattgatgccaagtgggcggaccttccttaacttcttcaacaatgccaactgtgcagcagctgcaaagcggctagcctgctggatctcaattcaacggtgtgacgaggatggggacaacaggctcagggtatgctactctgcatgcgaattgtacaatacagcttgtggagcgggtctggattgttcagaccagaccctttttagcaaaagggaagaagaagagaagggtgttccgtgcacaggatatggcgagaagaagtctttctggctataacatctctgaagcttcttccgttatggctctggtagaagctcagcgtttgtgtaaagtattttccaccccaaattattttctcttttttccccatttcatccactacttcccaattgtaggatacgggaagtaagcgtccgtttcacctaggcacccgaagatgggctgccctggtgtacaagctatgttggagtgggctctttgttagaaggttagtctgacatgaaaaggggagtggaccggtgagagttggatggtagatttttcgttttcaccgcttcagaattagtgattggaatgaatgtaaagattgatgtgtcttgtacacactctttacagaatcatttcaatgggagcccgtgttgtgttctttgctccacgcggccatgccccttgccccatttcttaagctgtcgttggcttttatgatatttgattgacgcatccttggccaacacagtggcagtggcttcgcttatgttcaactggaattcgttataacatagatgatgacgcttgtgggtgattacttcgcttagcggctgccgtggaactagatcctgtattgctgatccctgatggcttgatacgagtgttggagccgtcacatgacatttagcacaagtatgtcacaatataaacagcagtaacgaagtgtcaaggacagtagttatatgagcagctttcgttgttggaaaaagtatatattactgtgatggaatagtcattttggccgctcaactattgcctaaggcgcaaattagtccctgactgtacttcgaaaatatttgcttcaatcatcaacctttactttgtctaatatcataactatc

SEQ ID NO: 206620 - DNA, 2333 bp, Zea Mays
ctcatcccaactgaccgactaccatggccggcggcggcggcggctctctgtctagcccctccgcctccttcctttccagtcccaccccaacaccgccccctcgtctcctccgcaggtgtagcacgaagtctgcctcacgagatagccccatcctcagaccaaaaaagccgcctccactcttctgcgcggcggcagccactcccacccccgctcccgcggccgcgtccaagtcggctgggtcatggagggacctgtgcagtctcaacgcctgggtggtgcgagactaccgccgccttgtcgactccgtcggcgcgctcgagccggcgcttcggaggctctctgaggaacagttgaaggcgaagacggccgagttccgcagccgcctaacgcgcggggagacgctcgccgacgtccaggccgatgcgtttgctgtggtacgtgaggcggctaggaggacgcttgggatgcggcatttcgacgtccagagatgaagacaggcgaggggaagacgcttgtttccacacttgcggcttatctaaatgcccttacagggaaaggggttcatgtggtgactgtaaatgattatttggcacagcgtgatgctgaatggatgggtcgtgttcatcgctttctcggtcttactgttggtctgattcaggcgggtatgaagtcagatgagagaagagctagctacagatgtgacattacatacactaacaactcggaacttggatttgactatcttcgtgacaacctatctcgaaacaaagaacaactagttatgagatggccaaggccattccattttgctattgtggacgaagtggactcagtacttatagatgagggaaggaatccattattaataagtggagaggataatagagatgcagttcggtatccaattgctgctaaagtcgcagaacttcttatggagggtgttcattacaccgttgaactaaagggcaataatatagatctgacagaggacggtgtagcacatgctgagattattcttgggacagatgatctatgggatgagaatgatccatgggcaaggtttgtgatgaatgctttgaaggcaaaagtgttctaccgaagggatgtccagtatattgtcagggatgggaaagctattataattaatgagttaaccggccgagttgaacccaagagaagatggtctgatggtatccaccaagcagtagaagcaaaagaaggcctaaaaatccaggcagactcggtaattgtggctcaaatcacatatcagtcattgtttaagctttatcctaaactttctgggatgacaggaactgctaagacagaggaaaaggagttttcaaagatgttcaagatgcctgttattgaagtacctacgaatctgccaaatatacgggtggacttgcctatccaagcttttgcgactgcaagaggcaaatggcaatatgtacgggctgaagtagagtctatgttccaattaggtcgccctgttttagttggaactacaagtgtcgagagttctgaatacttgtcagagctacttaaagttcacaagattccacacaatgtccttaatgcaaggccaaagtatgctgcaagagaagccgaaataattgcccaagctggaagaaaacatgctattacaatatctactaatatggctggcagaggaactgacattattttaggtggtaatccaaaaatgcttgcaaaagaaatagtagaagataacatacttccatttttgacccatgaacctcctaatattgacatggaaggggaatccacatcccacaagggtctctcaaatgtagaacttagtccatcatcagtaggtctgcttgccaaagctgcaatcatgtcaaaatatattcacaaaagcgagagaaatgaatggtctttgagtaaggcaaaatccactattgctgaatctatagaaatgggtcaaatgattgggatggagaaactgcaagagcgcatgactgaagagtctgagatgtaccctctttgtgatgcaataggacttgcttatctcagtgtcttaagggattgcgaagttcattgttcttttgaaggtgctgcagtgaagagattaggtgggcttcatgtagtaggaacctctttgcatgagtcacgccgaattgataaccaactgcgcggcagagcaggcagacagggtgatcctgggtcgacacggtttatggtgagcttacaagatgaaatattccagaaatttaatctggacactgaatgggccgtgaggctaatatcaaggataacgaatgatgaagacatagctatcgagagcaatgttgttgtgaaacaggtcggat

SEQ ID NO: 206621 - DNA, 2384 bp, Zea Mays
caaccctcttccggttcttctcatcccaactgaccgactaccatggccggcggcggcggcggctctctgtctagcccctccgcctccttcctttccagtcccaccccaacaccgccccctcgtctcctccgcaggtgtagcacgaagtctgcctcacgagatagccccatcctcagaccaaaaaagccgcctccactcttctgcgcggcggcagccactcccacccccgctcccgcggccgcgtccaagtcggctgggtcatggagggacctgtgcagtctcaacgcctgggtggtgcgagactaccgccgccttgtcgactccgtcggcgcgctcgagccggcgcttcggaggctctctgaggaacagttgaaggcgaagacggccgagttccgcagccgcctaacgcgcggggagacgctcgccgacgtccagatgcgtttgctgtggtacgtgaggcggctaggaggacgcttgggatgcggcatttcgacgtccagataattggcggtgctgtgctccatgacggctgcattgcagagatgaagacaggcgaggggaagacgcttgtttccacacttgcggcttatctaaatgcccttacagggaaaggggttcatgtggtgactgtaaatgattatttggcacagcgtgatgctgaatggatgggtcgtgttcatcgctttctcggtcttactgttggtctgattcaggcgggtatgaagtcagatgagagaagagctagctacagatgtgacattacatacactaacaactcggaacttggatttgactatcttcgtgacaacctatctcgaaacaaagaacaactagttatgagatggccaaggccattccattttgctattgtggacgaagtggactcagtacttatagatgagggaaggaatccattattaataagtggagaggataatagagatgcagttcggtatccaattgctgctaaagtcgcagaacttcttatggagggtgttcattacaccgttgaactaaagggcaataatatagatctgacagaggacggtgtagcacatgctgagattattcttgggacagatgatctatgggatgagaatgatccatgggcaaggtttgtgatgaatgctttgaaggcaaaagtgttctaccgaagggatgtccagtatattgtcagggatgggaaagctattataattaatgagttaaccggccgagttgaacccaagagaagatggtctgatggtatccaccaagcagtagaagcaaaagaaggcctaaaaatccagactcggtaattgtggctcaaatcacatatcagtcattgtttaagctttatcctaaactttctgggatgacaggaactgctaagacagaggaaaaggagttttcaaagatgttcaagatgcctgttattgaagtacctacgaatctgccaaatatacgggtggacttgcctatccaagcttttgcgactgcaagaggcaaatggcaatatgtacgggctgaagtagagtctatgttccaattaggtcgccctgttttagttggaactacaagtgtcgagagttctgaatacttgtcagagctacttaaagttcacaagattccacacaatgtccttaatgcaaggccaaagtatgctgcaagagaagccgaaataattgcccaagctggaagaaaacatgctattacaatatctactaatatggctggcagaggaactgacattattttaggtggtaatccaaaaatgcttgcaaaagaaatagtagaagataacatacttccatttttgacccatgaacctcctaatattgacatggaaggggaatccacatcccacaagggtctctcaaatgtagaacttagtccatcatcagtaggtctgcttgccaaagctgcaatcatgtcaaaatatattcacaaaagcgagagaaatgaatggtctttgagtaaggcaaaatccactattgctgaatctatagaaatgggtcaaatgattgggatggagaaactgcaagagcgcatgactgaagagtctgagatgtaccctctttgtgatgcaataggacttgcttatctcagtgtcttaagggattgcgaagttcattgttcttttgaaggtgctgcagtgaagagattaggtgggcttcatgtagtaggaacctctttgcatgagtcacgccgaattgataaccaactgcgcggcagagcaggcagacagggtgatcctgggtcgacacggtttatggtgagcttacaagatgaaatattccagaaatttaatctggacactgaatgggccgtgaggctaatatcaaggataacgaatgatgaagacatagctatcgagagcaatgttgttgtgaaacaggtcggat

SEQ ID NO: 206622 - DNA, 2356 bp, Zea Mays
attgcatctctaatcctccccaaccctcttccggttcttctcatcccaactgaccgactaccatggccggcggcggcggcggctctctgtctagcccctccgcctccttcctttccagtcccaccccaacaccgccccctcgtctcctccgcaggtgtagcacgaagtctgcctcacgagatagccccatcctcagaccaaaaaagccgcctccactcttctgcgcggcggcagccactcccacccccgctcccgcggccgcgtccaagtcggctgggtcatggagggacctgtgcagtctcaacgcctgggtggtgcgagactaccgccgccttgtcgactccgtcggcgcgctcgagccggcgcttcggaggctctctgaggaacagttgaaggcgaagacggccgagttccgcagccgcctaacgcgcggggagacgctcgccgacgtccaggccgatgcgtttgctgtggtacgtgaggcggctaggaggacgcttgggatgcggcatttcgacgtccagataattggcggtgctgtgctccatgacggctgcattgcagagatgaagacaggcgaggggaagacgcttgtttccacacttgcggcttatctaaatgcccttacagggaaaggggttcatgtggtgactgtaaatgattatttggcacagcgtgatgctgaatggatgggtcgtgttcatcgctttctcggtcttactgttggtctgattcaggcgggtatgaagtcagatgagagaagagctagctacagatgtgacattacatacactaacaactcggaacttggatttgactatcttcgtgacaacctatctcgaaacaaagaacaactagttatgagatggccaaggccattccattttgctattgtggacgaagtggactcagtacttatagatgagggaaggaatccattattaataagtggagaggataatagagatgcagttcggtatccaattgctgctaaagtcgcagaacttcttatggagggtgttcattacaccgttgaactaaagggcaataatatagatctgacagaggacggtgtagcacatgctgagattattcttgggacagatgatctatgggatgagaatgatccatgggcaaggtttgtgatgaatgctttgaaggcaaaagtgttctaccgaagggatgtccagtatattgtcagggatgggaaagctattataattaatgagttaaccggccgagttgaacccaagagaagatggtctgatggtatccaccaagcagtagaagcaaaagaaggcctaaaaatccaggcagactcggtaattgtggctcaaatcacatatcagtcattgtttaagctttatcctaaactttctgggatgacaggaactgctaagacagaggaaaaggagttttcaaagatgttcaagatgcctgttattgaagtacctacgaatctgccaaatatacgggtggacttgcctatccaagcttttgcgactgcaagaggcaaatggcaatatgtacgggctgaagtagagtctatgttccaattaggtcgccctgttttagttggaactacaagtgtcgagagttctgaatacttgtcagagctacttaaagttcacaagattccacacaatgtccttaatgcaaggccaaagtatgctgcaagagaagccgaaataattgcccaagctggaagaaaacatgctattacaatatctactaatatggctggcagaggaactgacattattttaggtggtaatccaaaaatgcttgcaaaagaaatagtagaagataacatacttccatttttgacccatgaacctcctaatattgacatggaaggggaatccacatcccacaagggtctctcaaatgtagaacttagtccatcatcagtaggtctgcttgccaaagctgcaatcatgtcaaaatatattcacaaaagcgagagaaatgaatggtctttgagtaaggcaaaatccactattgctgaatctatagaaatgggtcaaatgattgggatggagaaactgcaagagcgcatgactgaagagtctgagatgtaccctctttgtgatgcaataggacttgcttatctcagtgtcttaagggattgcgaagttcattgttcttttgaaggtgctgcagtgaagagattagctgcgcggcagagcaggcagacagggtgatcctgggtcgacacggtttatggtgagcttacaagatgaaatattccagaaatttaatctggacactgaatgggccgtgaggctaatatcaaggataacgaatgatgaagacatagctatcgagagcaatgttgttgtgaaacaggtcggat

SEQ ID NO: 206623 - DNA, 2326 bp, Zea Mays
attgcatctctaatcctccccaaccctcttccggttcttctcatcccaactgaccgactaccatggccggcggcggcggcggctctctgtctagcccctccgcctccttcctttccagtcccaccccaacaccgccccctcgtctcctccgcaggtgtagcacgaagtctgcctcacgagatagccccatcctcagaccaaaaaagccgcctccactcttctgcgcggcggcagccactcccacccccgctcccgcggccgcgtccaagtcggctgggtcatggagggacctgtgcagtctcaacgcctgggtggtgcgagactaccgccgccttgtcgactccgtcggcgcgctcgagccggcgcttcggaggctctctgaggaacagttgaaggcgaagacggccgagttccgcagccgcctaacgcgcggggagacgctcgccgacgtccaggccgatgcgtttgctgtggtacgtgaggcggctaggaggacgcttgggatgcggcatttcgacgtccagataattggcggtgctgtgctccatgacggctgcattgcagagatgaagacaggcgaggggaagacgcttgtttccacacttgcggcttatctaaatgcccttacagggaaaggggttcatgtggtgactgtaaatgattatttggcacagcgtgatgctgaatggatgggtcgtgttcatcgctttctcggtcttactgttggtctgattcaggcgggtatgaagtcagatgagagaagagctagctacagatgtgacattacatacactaacaactcggaacttggatttgactatcttcgtgacaacctatctcgaaacaaagaacaactagttatgagatggccaaggccattccattttgctattgtggacgaagtggactcagtacttatagatgagggaaggaatccattattaataagtggagaggataatagagatgcagttcggtatccaattgctgctaaagtcgcagaacttcttatggagggtgttcattacaccgttgaactaaagggcaataatatagatctgacagaggacggtgtagcacatgctgagattattcttgggacagatgatctatgggatgagaatgatccatgggcaaggtttgtgatgaatgctttgaaggcaaaagtgttctaccgaagggatgtccagtatattgtcagggatgggaaagctattataattaatgagttaaccggccgagttgaacccaagagaagatggtctgatggtatccaccaagcagtagaagcaaaagaaggcctaaaaatccaggcagactcggtaattgtggctcaaatcacatatcagtcattgtttaagctttatcctaaactttctgggatgacaggaactgctaagacagaggaaaaggagttttcaaagatgttcaagatgcctgttattgaagtacctacgaatctgccaaatatacgggtggacttgcctatccaagcttttgcgtgtcgagagttctgaatacttgtcagagctacttaaagttcacaagattccacacaatgtccttaatgcaaggccaaagtatgctgcaagagaagccgaaataattgcccaagctggaagaaaacatgctattacaatatctactaatatggctggcagaggaactgacattattttaggtggtaatccaaaaatgcttgcaaaagaaatagtagaagataacatacttccatttttgacccatgaacctcctaatattgacatggaaggggaatccacatcccacaagggtctctcaaatgtagaacttagtccatcatcagtaggtctgcttgccaaagctgcaatcatgtcaaaatatattcacaaaagcgagagaaatgaatggtctttgagtaaggcaaaatccactattgctgaatctatagaaatgggtcaaatgattgggatggagaaactgcaagagcgcatgactgaagagtctgagatgtaccctctttgtgatgcaataggacttgcttatctcagtgtcttaagggattgcgaagttcattgttcttttgaaggtgctgcagtgaagagattaggtgggcttcatgtagtaggaacctctttgcatgagtcacgccgaattgataaccaactgcgcggcagagcaggcagacagggtgatcctgggtcgacacggtttatggtgagcttacaagatgaaatattccagaaatttaatctggacactgaatgggccgtgaggctaatatcaaggataacgaatgatgaagacatagctatcgagagcaatgttgttgtgaaacaggtcggat

SEQ ID NO: 206624 - DNA, 2270 bp, Zea Mays
attgcatctctaatcctccccaaccctcttccggttcttctcatcccaactgaccgactaccatggccggcggcggcggcggctctctgtctagcccctccgcctccttcctttccagtcccaccccaacaccgccccctcgtctcctccgcaggtgtagcacgaagtctgcctcacgagatagccccatcctcagaccaaaaaagccgcctccactcttctgcgcggcggcagccactcccacccccgctcccgcggccgcgtccaagtcggctgggtcatggagggacctgtgcagtctcaacgcctgggtggtgcgagactaccgccgccttgtcgactccgtcggcgcgctcgagccggcgcttcggaggctctctgaggaacagttgaaggcgaagacggccgagttccgcagccgcctaacgcgcggggagacgctcgccgacgtccaggccgatgcgtttgctgtggtacgtgaggcggctaggaggacgcttgggatgcggcatttcgacgtccagataattggcggtgctgtgctccatgacggctgcattgcagagatgaagacaggcgaggggaagacgcttgtttccacacttgcggcttatctaaatgcccttacagggaaaggggttcatgtggtgactgtaaatgattatttggcacagcgtgatgctgaatggatgggtcgtgttcatcgctttctcggtcttactgttggtctgattcaggcgggtatgaagtcagatgagagaagagctagctacagatgtgacattacatacactaacaactcggaacttggatttgactatcttcgtgacaacctatctcgaaacaaagaacaactagttatgagatggccaaggccattccattttgctattgtggacgaagtggactcagtacttatagatgagggaaggaatccattattaataagtggagaggataatagagatgcagttcggtatccaattgctgctaaagtcgcagaacttcttatggagggtgttcattacaccgttgaactaaagggcaataatatagatctgacagaggacggtgtagcacatgctgagattattcttgggacagatgatctatgggatgagaatgatccatgggcaaggtttgtgatgaatgctttgaaggcaaaagtgttctaccgaagggatgtccagtatattgtcagggatgggaaagctattataattaatgagttaaccggccgagttgaacccaagagaagatggtctgatggtatccaccaagcagtagaagcaaaagaaggcctaaaaatccaggcagactcggtaattgtggctcaaatcacatatcagtcattgtttaagctttatcctaaactttctgggatgacaggaactgctaagacagaggaaaaggagttttcaaagatgttcaagatgcctgttattgaagtacctacgaatctgccaaatatacgggtggacttgcctatccaagcttttgcgtgtcgagagttctgaatacttgtcagagctacttaaagttcacaagattccacacaatgtccttaatgcaaggccaaagtatgctgcaagagaagccgaaataattgcccaagctggaagaaaacatgctattacaatatctactaatatggctggcagaggaactgacattattttaggtggtaatccaaaaatgcttgcaaaagaaatagtagaagataacatacttccatttttgacccatgaacctcctaatattgacatggaaggggaatccacatcccacaagggtctctcaaatgtagaacttagtccatcatcagtaggtctgcttgccaaagctgcaatcatgtcaaaatatattcacaaaagcgagagaaatgaatggtctttgagtaaggcaaaatccactattgctgaatctatagaaatgggtcaaatgattgggatggagaaactgcaagagcgcatgactgaagagtctgagatgtaccctctttgtgatgcaataggacttgcttatctcagtgtcttaagggattgcgaagttcattgttcttttgaaggtgctgcagtgaagagattagctgcgcggcagagcaggcagacagggtgatcctgggtcgacacggtttatggtgagcttacaagatgaaatattccagaaatttaatctggacactgaatgggccgtgaggctaatatcaaggataacgaatgatgaagacatagctatcgagagcaatgttgttgtgaaacaggtcggat

SEQ ID NO: 206625 - DNA, 2408 bp, Zea Mays
attgcatctctaatcctccccaaccctcttccggttcttctcatcccaactgaccgactaccatggccggcggcggcggcggctctctgtctagcccctccgcctccttcctttccagtcccaccccaacaccgccccctcgtctcctccgcaggtgtagcacgaagtctgcctcacgagatagccccatcctcagaccaaaaaagccgcctccactcttctgcgcggcggcagccactcccacccccgctcccgcggccgcgtccaagtcggctgggtcatggagggacctgtgcagtctcaacgcctgggtggtgcgagactaccgccgccttgtcgactccgtcggcgcgctcgagccggcgcttcggaggctctctgaggaacagttgaaggcgaagacggccgagttccgcagccgcctaacgcgcggggagacgctcgccgacgtccaggccgatgcgtttgctgtggtacgtgaggcggctaggaggacgcttgggatgcggcatttcgacgtccagataattggcggtgctgtgctccatgacggctgcattgcagagatgaagacaggcgaggggaagacgcttgtttccacacttgcggcttatctaaatgcccttacagggaaaggggttcatgtggtgactgtaaatgattatttggcacagcgtgatgctgaatggatgggtcgtgttcatcgctttctcggtcttactgttggtctgattcaggcgggtatgaagtcagatgagagaagagctagctacagatgtgacattacatacactaacaactcggaacttggatttgactatcttcgtgacaacctatctcgaaacaaagaacaactagttatgagatggccaaggccattccattttgctattgtggacgaagtggactcagtacttatagatgagggaaggaatccattattaataagtggagaggataatagagatgcagttcggtatccaattgctgctaaagtcgcagaacttcttatggagggtgttcattacaccgttgaactaaagggcaataatatagatctgacagaggacggtgtagcacatgctgagattattcttgggacagatgatctatgggatgagaatgatccatgggcaaggtttgtgatgaatgctttgaaggcaaaagtgttctaccgaagggatgtccagtatattgtcagggatgggaaagctattataattaatgagttaaccggccgagttgaacccaagagaagatggtctgatggtatccaccaagcagtagaagcaaaagaaggcctaaaaatccagactcggtaattgtggctcaaatcacatatcagtcattgtttaagctttatcctaaactttctgggatgacaggaactgctaagacagaggaaaaggagttttcaaagatgttcaagatgcctgttattgaagtacctacgaatctgccaaatatacgggtggacttgcctatccaagcttttgcgactgcaagaggcaaatggcaatatgtacgggctgaagtagagtctatgttccaattaggtcgccctgttttagttggaactacaagtgtcgagagttctgaatacttgtcagagctacttaaagttcacaagattccacacaatgtccttaatgcaaggccaaagtatgctgcaagagaagccgaaataattgcccaagctggaagaaaacatgctattacaatatctactaatatggctggcagaggaactgacattattttaggtggtaatccaaaaatgcttgcaaaagaaatagtagaagataacatacttccatttttgacccatgaacctcctaatattgacatggaaggggaatccacatcccacaagggtctctcaaatgtagaacttagtccatcatcagtaggtctgcttgccaaagctgcaatcatgtcaaaatatattcacaaaagcgagagaaatgaatggtctttgagtaaggcaaaatccactattgctgaatctatagaaatgggtcaaatgattgggatggagaaactgcaagagcgcatgactgaagagtctgagatgtaccctctttgtgatgcaataggacttgcttatctcagtgtcttaagggattgcgaagttcattgttcttttgaaggtgctgcagtgaagagattaggtgggcttcatgtagtaggaacctctttgcatgagtcacgccgaattgataaccaactgcgcggcagagcaggcagacagggtgatcctgggtcgacacggtttatggtgagcttacaagatgaaatattccagaaatttaatctggacactgaatgggccgtgaggctaatatcaaggataacgaatgatgaagacatagctatcgagagcaatgttgttgtgaaacaggtcggat

SEQ ID NO: 206626 - DNA, 2385 bp, Zea Mays
attgcatctctaatcctccccaaccctcttccggttcttctcatcccaactgaccgactaccatggccggcggcggcggcggctctctgtctagcccctccgcctccttcctttccagtcccaccccaacaccgccccctcgtctcctccgcaggtgtagcacgaagtctgcctcacgagatagccccatcctcagaccaaaaaagccgcctccactcttctgcgcggcggcagccactcccacccccgctcccgcggccgcgtccaagtcggctgggtcatggagggacctgtgcagtctcaacgcctgggtggtgcgagactaccgccgccttgtcgactccgtcggcgcgctcgagccggcgcttcggaggctctctgaggaacagttgaaggcgaagacggccgagttccgcagccgcctaacgcgcggggagacgctcgccgacgtccaggccgatgcgtttgctgtggtacgtgaggcggctaggaggacgcttgggatgcggcatttcgacgtccagataattggcggtgctgtgctccatgacggctgcattgcagagatgaagacaggcgaggggaagacgcttgtttccacacttgcggcttatctaaatgcccttacagggaaaggggttcatgtggtgactgtaaatgattatttggcacagcgtgatgctgaatggatgggtcgtgttcatcgctttctcggtcttactgttggtctgattcaggcgggtatgaagtcagatgagagaagagctagctacagatgtgacattacatacactaacaactcggaacttggatttgactatcttcgtgacaacctatctcgaaacaaagaacaactagttatgagatggccaaggccattccattttgctattgtggacgaagtggactcagtacttatagatgagggaaggaatccattattaataagtggagaggataatagagatgcagttcggtatccaattgctgctaaagtcgcagaacttcttatggagggtgttcattacaccgttgaactaaagggcaataatatagatctgacagaggacggtgtagcacatgctgagattattcttgggacagatgatctatgggatgagaatgatccatgggcaaggtttgtgatgaatgctttgaaggcaaaagtgttctaccgaagggatgtccagtatattgtcagggatgggaaagctattataattaatgagttaaccggccgagttgaacccaagagaagatggtctgatggtatccaccaagcagtagaagcaaaagaaggcctaaaaatccaggcagactcggtaattgtggctcaaatcacatatcagtcattgtttaagctttatcctaaactttctgggatgacaggaactgctaagacagaggaaaaggagttttcaaagatgttcaagatgcctgttattgaagtacctacgaatctgccaaatatacggactgcaagaggcaaatggcaatatgtacgggctgaagtagagtctatgttccaattaggtcgccctgttttagttggaactacaagtgtcgagagttctgaatacttgtcagagctacttaaagttcacaagattccacacaatgtccttaatgcaaggccaaagtatgctgcaagagaagccgaaataattgcccaagctggaagaaaacatgctattacaatatctactaatatggctggcagaggaactgacattattttaggtggtaatccaaaaatgcttgcaaaagaaatagtagaagataacatacttccatttttgacccatgaacctcctaatattgacatggaaggggaatccacatcccacaagggtctctcaaatgtagaacttagtccatcatcagtaggtctgcttgccaaagctgcaatcatgtcaaaatatattcacaaaagcgagagaaatgaatggtctttgagtaaggcaaaatccactattgctgaatctatagaaatgggtcaaatgattgggatggagaaactgcaagagcgcatgactgaagagtctgagatgtaccctctttgtgatgcaataggacttgcttatctcagtgtcttaagggattgcgaagttcattgttcttttgaaggtgctgcagtgaagagattaggtgggcttcatgtagtaggaacctctttgcatgagtcacgccgaattgataaccaactgcgcggcagagcaggcagacagggtgatcctgggtcgacacggtttatggtgagcttacaagatgaaatattccagaaatttaatctggacactgaatgggccgtgaggctaatatcaaggataacgaatgatgaagacatagctatcgagagcaatgttgttgtgaaacaggtcggat

SEQ ID NO: 206627 - DNA, 2451 bp, Zea Mays
gttattttttttgtcctgagtacccgatgagtatttacgattgcatctctaatcctccccaaccctcttccggttcttctcatcccaactgaccgactaccatggccggcggcggcggcggctctctgtctagcccctccgcctccttcctttccagtcccaccccaacaccgccccctcgtctcctccgcaggtgtagcacgaagtctgcctcacgagatagccccatcctcagaccaaaaaagccgcctccactcttctgcgcggcggcagccactcccacccccgctcccgcggccgcgtccaagtcggctgggtcatggagggacctgtgcagtctcaacgcctgggtggtgcgagactaccgccgccttgtcgactccgtcggcgcgctcgagccggcgcttcggaggctctctgaggaacagttgaaggcgaagacggccgagttccgcagccgcctaacgcgcggggagacgctcgccgacgtccaggccgatgcgtttgctgtggtacgtgaggcggctaggaggacgcttgggatgcggcatttcgacgtccagataattggcggtgctgtgctccatgacggctgcattgcagagatgaagacaggcgaggggaagacgcttgtttccacacttgcggcttatctaaatgcccttacagggaaaggggttcatgtggtgactgtaaatgattatttggcacagcgtgatgctgaatggatgggtcgtgttcatcgctttctcggtcttactgttggtctgattcaggcgggtatgaagtcagatgagagaagagctagctacagatgtgacattacatacactaacaactcggaacttggatttgactatcttcgtgacaacctatctcgaaacaaagaacaactagttatgagatggccaaggccattccattttgctattgtggacgaagtggactcagtacttatagatgagggaaggaatccattattaataagtggagaggataatagagatgcagttcggtatccaattgctgctaaagtcgcagaacttcttatggagggtgttcattacaccgttgaactaaagggcaataatatagatctgacagaggacggtgtagcacatgctgagattattcttgggacagatgatctatgggatgagaatgatccatgggcaaggtttgtgatgaatgctttgaaggcaaaagtgttctaccgaagggatgtccagtatattgtcagggatgggaaagctattataattaatgagttaaccggccgagttgaacccaagagaagatggtctgatggtatccaccaagcagtagaagcaaaagaaggcctaaaaatccaggcagactcggtaattgtggctcaaatcacatatcagtcattgtttaagctttatcctaaactttctgggatgacaggaactgctaagacagaggaaaaggagttttcaaagatgttcaagatgcctgttattgaagtacctacgaatctgccaaatatacgggtggacttgcctatccaagcttttgcgactgcaagaggcaaatggcaatatgtacgggctgaagtagagtctatgttccaattaggtcgccctgttttagttggaactacaagtgtcgagagttctgaatacttgtcagagctacttaaagttcacaagattccacacaatgtccttaatgcaaggccaaagtatgctgcaagagaagccgaaataattgcccaagctggaagaaaacatgctattacaatatctactaatatggctggcagaggaactgacattattttaggtggtaatccaaaaatgcttgcaaaagaaatagtagaagataacatacttccatttttgacccatgaacctcctaatattgacatggaaggggaatccacatcccacaagggtctctcaaatgtagaacttagtccatcatcagtaggtctgcttgccaaagctgcaatcatgtcaaaatatattcacaaaagcgagagaaatgaatggtctttgagtaaggcaaaatccactattgctgaatctatagaaatgggtcaaatgattgggatggagaaactgcaagagcgcatgactgaagagtctgagatgtaccctctttgtgatgcaataggacttgcttatctcagtgtcttaagggattgcgaagttcattgttcttttgaaggtgctgcagtgaagagattaggtgggcttcatgtagtaggaacctctttgcatgagtcacgccgaattgataaccaactgcgcggcagagcaggcagacagggtgatcctgggtcgacacggtttatggtgagcttacaagatgaaatattccagaaatttaatctggacactgaatgggccgtgaggctaatatcaaggataacgaatgatgaagacatagctatcgagagcaatgttgttgtgaaacaggtcggat

SEQ ID NO: 206628 - DNA, 2281 bp, Zea Mays
atcgcactgatggtggtgggcagtgcggaccctgtggtggcgatagggtttcgtgccctgctaaggtggctgcacacgccgtcattcgcgacggtttctccgcaagaggtttcaggttccagcccagcggaagtgcagaattttgtgcagggcagctggacagcatctgctaactggaactggatagtcgatcccctgaacggtgataaattcatcaaagttgctgaggttcagggaacagaaataaagccattcgtggagagtttatctaaatgcccaaagcatggacttcacaacccacttaaagctccagagaggtacctcatgtatggagatatatctgcaaaagctgcgcatatgctgggccaacctgcagtcttagatttctttgctaaacttatccagagggtatctcccaagagctaccaacaagctcttgcagaagttcaagtttctcaaaagtttttggaaaacttttgtggagaccaggtacgctttctggcaaggtcatttgctgtaccaggtaaccatcttggacaaagaagtaatggctaccgttggccatatggcccagttgcaattatcacaccattcaattttccgttggagatccccttactacaattgatgggagcactatacatgggaaataaaccagtactcaaggttgacagcaaggttagcattgtgatggaacaaatgattaggttgcttcatgattgtggattgccagcagaggatatggatttcataaattctgatggtgccgtaatgaacaagcttctgttagaggctaatccgaaaatgacccttttcactgggagttcacgggtagcagagaaattggctgctgatttgaaaggccgagttaaattggaggatgctggttttgattggaaaattcttggtccagatgttcaagaggttgattatgttgcatgggtttgcgatcaggatgcttatgcttgtagcggtcagaaatgctctgctcagtctgttctattcatgcacaagaattggtcttctagtggtctgcttgagaaaatgaagaaactttctgaaagaaggaagcttgaagatttaacaattggtccagtccttacagttactacagaagccatgatagagcacatgaacaaccttctcaaaataagaggatcaaaggttctgtttggtggtgaaccgttagcgaatcactcaattcccaaaatttatggtgccatgaagcctactgctgtatttgttcctctagaagaaattctaaaaagtgggaacttcgagcttgtgacaaaggagatatttggtccattccaggtagtcacagaatactctgaggatcagcttgagttggtcttagaagcctgcgaaaggatgaatgcgcatctgacagctgcagttgtctcaaacgacccgctattcctgcaggatgtacttgggagatccgttaacgggacaacctacgccggaattcgagcgaggaccacgggcgctccacagaaccactggtttggcccggccggtgatccgcgaggcgcagggatcgggactccggaagccatcaaacttgtctggtcctgccacagggaagtcatatatgacgtcgggcccgtgcccgagagctgggcgcttccttccgcgacctgattagctagacgaggatagactattccatgtcatcacgagaaataaaaggggaagataagcgaagccagcaggactggagcgaccgaccgagagcgagtggctgcatgcctaggcattcattctctgcacgcaactgcactttcaaccctggagaaaacataataaatgctcgttcccctgtacttgagatacatggtacttggaccggaacgtcggacaactcgtctgttcgcagctgcactgggttatcttcttaggccttatttgtttattatatattctaacaaattttatattaacacttagtttaaaatttgttagattatataatctaaatagattataattttaaacaaacaccgccttagataattatataatctagcttatagattatataagcaaatgttgatctgcttatggattattataatctaggtatctagattatataatccaactaataatcaatattgtttttttatctctttaacttattttaagctagattacataatctagagagtaaacaaacatgaccttaattctttggactgaaactttgtaactacctctctttgagttactgcagctcgccccgacaactgaggaatatttcaccatgtatgatgtgaca

SEQ ID NO: 206629 - DNA, 2453 bp, Zea Mays
aacacgaggagagactgcggcagcggagtgcagagagcggacgcaacgcaacaccgcccactctctgtcactgacgatcgaagtgaggagcgcactgaagccagccgccgatgagtcgcctcctctcgcggcagcaccttgccgccgtccgtcgatctgcaccctttgcgtgcgtgtccaggtggctgcacacgccgtcattcgcgacggtttctccgcaagaggtttcaggttccagcccagcggaagtgcagaattttgggcagctggacagcatctgctaactggaactggatagtcgatcccctgaacggtgataaattcatcaaagttgctgaggttcagggaacagaaataaagccattcgtggagagtttatctaaatgcccaaagcatggacttcacaacccacttaaagctccagagagctctaatgtgcaggtacctcatgtatggagatatatctgcaaaagctgcgcatatgctgggccaacctgcagtcttagatttctttgctaaacttatccagagggtatctcccaagagctaccaacaagctcttgcagaagttcaagtttctcaaaagtttttggaaaacttttgtggagaccaggtacgctttctggcaaggtcatttgctgtaccaggtaaccatcttggacaaagaagtaatggctaccgttggccatatggcccagttgcaattatcacaccattcaattttccgttggagatccccttactacaattgatgggagcactatacatgggaaataaaccagtactcaaggttgacagcaaggttagcattgtgatggaacaaatgattaggttgcttcatgattgtggattgccagcagaggatatggatttcataaattctgatggtgccgtaatgaacaagcttctgttagaggctaatccgaaaatgacccttttcactgggagttcacgggtagcagagaaattggctgctgatttgaaaggccgagttaaattggaggatgctggttttgattggaaaattcttggtccagatgttcaagaggttgattatgttgcatgggtttgcgatcaggatgcttatgcttgtagcggtcagaaatgctctgctcagtctgttctattcatgcacaagaattggtcttctagtggtctgcttgagaaaatgaagaaactttctgaaagaaggaagcttgaagatttaacaattggtccagtccttacagtaagtcaggggcggagccagcccttttttgggggtcagctgaccccggttactacagaagccatgatagagcacatgaacaaccttctcaaaataagaggatcaaaggttctgtttggtggtgaaccgttagcgaatcactcaattcccaaaatttatggtgccatgaagcctactgctgtatttgttcctctagaagaaattctaaaaagtgggaacttcgagcttgtgacaaaggagatatttggtccattccaggtagtcacagaatactctgaggatcagcttgagttggtcttagaagcctgcgaaaggatgaatgcgcatctgacagctgcagttgtctcaaacgacccgctattcctgcaggatgtacttgggagatccgttaacgggacaacctacgccggaattcgagcgaggaccacgggcgctccacagaaccactggtttggcccggccggtgatccgcgaggcgcagggatcgggactccggaagccatcaaacttgtctggtcctgccacagggaagtcatatatgacgtcgggcccgtgcccgagagctgggcgcttccttccgcgacctgattagctagacgaggatagactattccatgtcatcacgagaaataaaaggggaagataagcgaagccagcaggactggagcgaccgaccgagagcgagtggctgcatgcctaggcattcattctctgcacgcaactgcactttcaaccctggagaaaacataataaatgctcgttcccctgtacttgagatacatggtacttggaccggaacgtcggacaactcgtctgttcgcagctgcactgggttatcttcttaggccttatttgtttattatatattctaacaaattttatattaacacttagtttaaaatttgttagattatataatctaaatagattataattttaaacaaacaccgccttagataattatataatctagcttatagattatataagcaaatgttgatctgcttatggattattataatctaggtatctagattatataatccaactaataatcaatattgtttttttatctctttaacttattttaagctagattacataatctagagagtaaacaaacatgaccttaattctttggactgaaactttgtaactacctctctttgagttactgcagctcgccccgacaactgaggaatatttcaccatgtatgatgtgaca

SEQ ID NO: 206630 - DNA, 2440 bp, Zea Mays
aacacgaggagagactgcggcagcggagtgcagagagcggacgcaacgcaacaccgcccactctctgtcactgacgatcgaagtgaggagcgcactgaagccagccgccgatgagtcgcctcctctcgcggcagcaccttgccgccgtccgtcgatctgcaccctttgcgtgcgtgtccaggtggctgcacacgccgtcattcgcgacggtttctccgcaagaggtttcaggttccagcccagcggaagtgcagaattttgggcagctggacagcatctgctaactggaactggatagtcgatcccctgaacggtgataaattcatcaaagttgctgaggttcagggaacagaaataaagccattcgtggagagtttatctaaatgcccaaagcatggacttcacaacccacttaaagctccagagaggtacctcatgtatggagatatatctgcaaaagctgcgcatatgctgggccaacctgcagtcttagatttctttgctaaacttatccagagggtatctcccaagagctaccaacaagctcttgcagaagttcaagtttctcaaaagtttttggaaaacttttgtggagaccaggtacgctttctggcaaggtcatttgctgtaccaggtaaccatcttggacaaagaagtaatggctaccgttggccatatggcccagttgcaattatcacaccattcaattttccgttggagatccccttactacaattgatgggagcactatacatgggaaataaaccagtactcaaggttgacagcaaggttagcattgtgatggaacaaatgattaggttgcttcatgattgtggattgccagcagaggatatggatttcataaattctgatggtgccgtaatgaacaagcttctgttagaggctaatccgaaaatgacccttttcactgggagttcacgggtagcagagaaattggctgctgatttgaaaggccgagttaaattggaggatgctggttttgattggaaaattcttggtccagatgttcaagaggttgattatgttgcatgggtttgcgatcaggatgcttatgcttgtagcggtcagaaatgctctgctcagtctgttctattcatgcacaagaattggtcttctagtggtctgcttgagaaaatgaagaaactttctgaaagaaggaagcttgaagatttaacaattggtccagtccttacagtaagtcaggggcggagccagcccttttttgggggtcagctgaccccggttactacagaagccatgatagagcacatgaacaaccttctcaaaataagaggatcaaaggttctgtttggtggtgaaccgttagcgaatcactcaattcccaaaatttatggtgccatgaagcctactgctgtatttgttcctctagaagaaattctaaaaagtgggaacttcgagcttgtgacaaaggagatatttggtccattccaggtagtcacagaatactctgaggatcagcttgagttggtcttagaagcctgcgaaaggatgaatgcgcatctgacagctgcagttgtctcaaacgacccgctattcctgcaggatgtacttgggagatccgttaacgggacaacctacgccggaattcgagcgaggaccacgggcgctccacagaaccactggtttggcccggccggtgatccgcgaggcgcagggatcgggactccggaagccatcaaacttgtctggtcctgccacagggaagtcatatatgacgtcgggcccgtgcccgagagctgggcgcttccttccgcgacctgattagctagacgaggatagactattccatgtcatcacgagaaataaaaggggaagataagcgaagccagcaggactggagcgaccgaccgagagcgagtggctgcatgcctaggcattcattctctgcacgcaactgcactttcaaccctggagaaaacataataaatgctcgttcccctgtacttgagatacatggtacttggaccggaacgtcggacaactcgtctgttcgcagctgcactgggttatcttcttaggccttatttgtttattatatattctaacaaattttatattaacacttagtttaaaatttgttagattatataatctaaatagattataattttaaacaaacaccgccttagataattatataatctagcttatagattatataagcaaatgttgatctgcttatggattattataatctaggtatctagattatataatccaactaataatcaatattgtttttttatctctttaacttattttaagctagattacataatctagagagtaaacaaacatgaccttaattctttggactgaaactttgtaactacctctctttgagttactgcagctcgccccgacaactgaggaatatttcaccatgtatgatgtgaca

SEQ ID NO: 206631 - DNA, 2445 bp, Zea Mays
aacacgaggagagactgcggcagcggagtgcagagagcggacgcaacgcaacaccgcccactctctgtcactgacgatcgaagtgaggagcgcactgaagccagccgccgatgagtcgcctcctctcgcggcagcaccttgccgccgtccgtcgatctgcaccctttgcgtgcgtgtccaggtggctgcacacgccgtcattcgcgacggtttctccgcaagaggtttcaggttccagcccagcggaagtgcagaattttgtgcagggcagctggacagcatctgctaactggaactggatagtcgatcccctgaacggtgataaattcatcaaagttgctgaggttcagggaacagaaataaagccattcgtggagagtttatctaaatgcccaaagcatggacttcacaacccacttaaagctccagagaggtacctcatgtatggagatatatctgcaaaagctgcgcatatgctgggccaacctgcagtcttagatttctttgctaaacttatccagagggtatctcccaagagctaccaacaagctcttgcagaagttcaagtttctcaaaagtttttggaaaacttttgtggagaccaggtacgctttctggcaaggtcatttgctgtaccaggtaaccatcttggacaaagaagtaatggctaccgttggccatatggcccagttgcaattatcacaccattcaattttccgttggagatccccttactacaattgatgggagcactatacatgggaaataaaccagtactcaaggttgacagcaaggttagcattgtgatggaacaaatgattaggttgcttcatgattgtggattgccagcagaggatatggatttcataaattctgatggtgccgtaatgaacaagcttctgttagaggctaatccgaaaatgacccttttcactgggagttcacgggtagcagagaaattggctgctgatttgaaaggccgagttaaattggaggatgctggttttgattggaaaattcttggtccagatgttcaagaggttgattatgttgcatgggtttgcgatcaggatgcttatgcttgtagcggtcagaaatgctctgctcagtctgttctattcatgcacaagaattggtcttctagtggtctgcttgagaaaatgaagaaactttctgaaagaaggaagcttgaagatttaacaattggtccagtccttacagtaagtcaggggcggagccagcccttttttgggggtcagctgaccccggttactacagaagccatgatagagcacatgaacaaccttctcaaaataagaggatcaaaggttctgtttggtggtgaaccgttagcgaatcactcaattcccaaaatttatggtgccatgaagcctactgctgtatttgttcctctagaagaaattctaaaaagtgggaacttcgagcttgtgacaaaggagatatttggtccattccaggtagtcacagaatactctgaggatcagcttgagttggtcttagaagcctgcgaaaggatgaatgcgcatctgacagctgcagttgtctcaaacgacccgctattcctgcaggatgtacttgggagatccgttaacgggacaacctacgccggaattcgagcgaggaccacgggcgctccacagaaccactggtttggcccggccggtgatccgcgaggcgcagggatcgggactccggaagccatcaaacttgtctggtcctgccacagggaagtcatatatgacgtcgggcccgtgcccgagagctgggcgcttccttccgcgacctgattagctagacgaggatagactattccatgtcatcacgagaaataaaaggggaagataagcgaagccagcaggactggagcgaccgaccgagagcgagtggctgcatgcctaggcattcattctctgcacgcaactgcactttcaaccctggagaaaacataataaatgctcgttcccctgtacttgagatacatggtacttggaccggaacgtcggacaactcgtctgttcgcagctgcactgggttatcttcttaggccttatttgtttattatatattctaacaaattttatattaacacttagtttaaaatttgttagattatataatctaaatagattataattttaaacaaacaccgccttagataattatataatctagcttatagattatataagcaaatgttgatctgcttatggattattataatctaggtatctagattatataatccaactaataatcaatattgtttttttatctctttaacttattttaagctagattacataatctagagagtaaacaaacatgaccttaattctttggactgaaactttgtaactacctctctttgagttactgcagctcgccccgacaactgaggaatatttcaccatgtatgatgtgaca

SEQ ID NO: 206632 - DNA, 2392 bp, Zea Mays
aacacgaggagagactgcggcagcggagtgcagagagcggacgcaacgcaacaccgcccactctctgtcactgacgatcgaagtgaggagcgcactgaagccagccgccgatgagtcgcctcctctcgcggcagcaccttgccgccgtccgtcgatctgcaccctttgcgtgcgtgtccaggtggctgcacacgccgtcattcgcgacggtttctccgcaagaggtttcaggttccagcccagcggaagtgcagaattttgggcagctggacagcatctgctaactggaactggatagtcgatcccctgaacggtgataaattcatcaaagttgctgaggttcagggaacagaaataaagccattcgtggagagtttatctaaatgcccaaagcatggacttcacaacccacttaaagctccagagaggtacctcatgtatggagatatatctgcaaaagctgcgcatatgctgggccaacctgcagtcttagatttctttgctaaacttatccagagggtatctcccaagagctaccaacaagctcttgcagaagttcaagtttctcaaaagtttttggaaaacttttgtggagaccaggtacgctttctggcaaggtcatttgctgtaccaggtaaccatcttggacaaagaagtaatggctaccgttggccatatggcccagttgcaattatcacaccattcaattttccgttggagatccccttactacaattgatgggagcactatacatgggaaataaaccagtactcaaggttgacagcaaggttagcattgtgatggaacaaatgattaggttgcttcatgattgtggattgccagcagaggatatggatttcataaattctgatggtgccgtaatgaacaagcttctgttagaggctaatccgaaaatgacccttttcactgggagttcacgggtagcagagaaattggctgctgatttgaaaggccgagttaaattggaggatgctggttttgattggaaaattcttggtccagatgttcaagaggttgattatgttgcatgggtttgcgatcaggatgcttatgcttgtagcggtcagaaatgctctgctcagtctgttctattcatgcacaagaattggtcttctagtggtctgcttgagaaaatgaagaaactttctgaaagaaggaagcttgaagatttaacaattggtccagtccttacagttactacagaagccatgatagagcacatgaacaaccttctcaaaataagaggatcaaaggttctgtttggtggtgaaccgttagcgaatcactcaattcccaaaatttatggtgccatgaagcctactgctgtatttgttcctctagaagaaattctaaaaagtgggaacttcgagcttgtgacaaaggagatatttggtccattccaggtagtcacagaatactctgaggatcagcttgagttggtcttagaagcctgcgaaaggatgaatgcgcatctgacagctgcagttgtctcaaacgacccgctattcctgcaggatgtacttgggagatccgttaacgggacaacctacgccggaattcgagcgaggaccacgggcgctccacagaaccactggtttggcccggccggtgatccgcgaggcgcagggatcgggactccggaagccatcaaacttgtctggtcctgccacagggaagtcatatatgacgtcgggcccgtgcccgagagctgggcgcttccttccgcgacctgattagctagacgaggatagactattccatgtcatcacgagaaataaaaggggaagataagcgaagccagcaggactggagcgaccgaccgagagcgagtggctgcatgcctaggcattcattctctgcacgcaactgcactttcaaccctggagaaaacataataaatgctcgttcccctgtacttgagatacatggtacttggaccggaacgtcggacaactcgtctgttcgcagctgcactgggttatcttcttaggccttatttgtttattatatattctaacaaattttatattaacacttagtttaaaatttgttagattatataatctaaatagattataattttaaacaaacaccgccttagataattatataatctagcttatagattatataagcaaatgttgatctgcttatggattattataatctaggtatctagattatataatccaactaataatcaatattgtttttttatctctttaacttattttaagctagattacataatctagagagtaaacaaacatgaccttaattctttggactgaaactttgtaactacctctctttgagttactgcagctcgccccgacaactgaggaatatttcaccatgtatgatgtgaca

SEQ ID NO: 206633 - DNA, 2405 bp, Zea Mays
aacacgaggagagactgcggcagcggagtgcagagagcggacgcaacgcaacaccgcccactctctgtcactgacgatcgaagtgaggagcgcactgaagccagccgccgatgagtcgcctcctctcgcggcagcaccttgccgccgtccgtcgatctgcaccctttgcgtgcgtgtccaggtggctgcacacgccgtcattcgcgacggtttctccgcaagaggtttcaggttccagcccagcggaagtgcagaattttgggcagctggacagcatctgctaactggaactggatagtcgatcccctgaacggtgataaattcatcaaagttgctgaggttcagggaacagaaataaagccattcgtggagagtttatctaaatgcccaaagcatggacttcacaacccacttaaagctccagagagctctaatgtgcaggtacctcatgtatggagatatatctgcaaaagctgcgcatatgctgggccaacctgcagtcttagatttctttgctaaacttatccagagggtatctcccaagagctaccaacaagctcttgcagaagttcaagtttctcaaaagtttttggaaaacttttgtggagaccaggtacgctttctggcaaggtcatttgctgtaccaggtaaccatcttggacaaagaagtaatggctaccgttggccatatggcccagttgcaattatcacaccattcaattttccgttggagatccccttactacaattgatgggagcactatacatgggaaataaaccagtactcaaggttgacagcaaggttagcattgtgatggaacaaatgattaggttgcttcatgattgtggattgccagcagaggatatggatttcataaattctgatggtgccgtaatgaacaagcttctgttagaggctaatccgaaaatgacccttttcactgggagttcacgggtagcagagaaattggctgctgatttgaaaggccgagttaaattggaggatgctggttttgattggaaaattcttggtccagatgttcaagaggttgattatgttgcatgggtttgcgatcaggatgcttatgcttgtagcggtcagaaatgctctgctcagtctgttctattcatgcacaagaattggtcttctagtggtctgcttgagaaaatgaagaaactttctgaaagaaggaagcttgaagatttaacaattggtccagtccttacagttactacagaagccatgatagagcacatgaacaaccttctcaaaataagaggatcaaaggttctgtttggtggtgaaccgttagcgaatcactcaattcccaaaatttatggtgccatgaagcctactgctgtatttgttcctctagaagaaattctaaaaagtgggaacttcgagcttgtgacaaaggagatatttggtccattccaggtagtcacagaatactctgaggatcagcttgagttggtcttagaagcctgcgaaaggatgaatgcgcatctgacagctgcagttgtctcaaacgacccgctattcctgcaggatgtacttgggagatccgttaacgggacaacctacgccggaattcgagcgaggaccacgggcgctccacagaaccactggtttggcccggccggtgatccgcgaggcgcagggatcgggactccggaagccatcaaacttgtctggtcctgccacagggaagtcatatatgacgtcgggcccgtgcccgagagctgggcgcttccttccgcgacctgattagctagacgaggatagactattccatgtcatcacgagaaataaaaggggaagataagcgaagccagcaggactggagcgaccgaccgagagcgagtggctgcatgcctaggcattcattctctgcacgcaactgcactttcaaccctggagaaaacataataaatgctcgttcccctgtacttgagatacatggtacttggaccggaacgtcggacaactcgtctgttcgcagctgcactgggttatcttcttaggccttatttgtttattatatattctaacaaattttatattaacacttagtttaaaatttgttagattatataatctaaatagattataattttaaacaaacaccgccttagataattatataatctagcttatagattatataagcaaatgttgatctgcttatggattattataatctaggtatctagattatataatccaactaataatcaatattgtttttttatctctttaacttattttaagctagattacataatctagagagtaaacaaacatgaccttaattctttggactgaaactttgtaactacctctctttgagttactgcagctcgccccgacaactgaggaatatttcaccatgtatgatgtgaca

SEQ ID NO: 206634 - DNA, 465 bp, Zea Mays
ctattgggcttgtcgtttatttccccttccgcaaaccaaaatgttggcggctcgccggctgtccgccgccacctctccgctcctcctccgccgcctttccgcacagacccaccccacggcatcgtcggcgcagcccccgccggaggtgaccgattcgggtccgggagcgtgggccggccgcgcggtgacgctctcgctgctgggtctgacgggcgccgtcgcagccagtgctgtcagcgacctctccgtcttcctctcatgctccaggcaatagagaaggccacccagaaccagcagatagtcaatgctatcggtaaaccaatcatgcggggaccctggtacagtgcttccattgctgtgaatcacgcgaagcattctgtctcctgcactttcccggtgtcaggaccccaaggaaatggtctgctcaagctcaaagctgtgcgcttgggagatgcagaacattaa

SEQ ID NO: 206635 - DNA, 2471 bp, Zea Mays
cccgtctcccctccactcgtctctccgttcggccgtgtccagtctccagtccgcaacggaaggagaggaggcgtcgagggaaaatcgcgccaaccgggccgaacgaatcgtcggaaggccggggaggaggtctagaaggtgtgggaatggcgacggggcttgccttggcggcggcgcctcatgttgcttcggtcacgggatcggggacagtggaggagcaggcggcgggggtcggcatcttgcttcagatatcaatgctcgtgctctcgttcgtgctcgggcatatcctgcgccgccgaaagttctactacatccccgaggccagcggctcactcctgatcgggatgattgttggagggcttgctaacatatcaaacactcagaaaagcatcaggagatggtttaattttcgggaggacttcttccttctctttttactgcctccaattatattatatccttgattgtattctgcttttatttcttattggttcttgtagaattgttcatgttttacttgactgcatcttacccagtccggattcagcttagcaccaaaaccattcttttcgaacttcgatgctatcataacatttgcaatcctgggaaccttcattgcctccattgttacaggtcttttagtctaccttggtggattactatacattgtctacaggctcccactggtggagtgtatgatgtttggtgctcttgtatcagcaactgatcctgtgacagttttgtctatatttcaggagcttggcactgatacaaatctatatgcactggtttttggagaatccgttttaaatgacgctgtagcgatatccttgtacaggtctatggcatctatgaggacgcaccattctggaaaaaactttttccttgtaattctgaggtttcttgaaaattttgttggatcaatgtcatcaggcattggtgttggactaatttccgctctcctcttcaagtatgcagcactgggcgttgagaaccttcacaatctggagagttgcttgtttgtgcttttcccatacttctcgtacatgctagcagaaggcattggtctatctggcattatttctattctcttcacgggtattgtgatgaagagatacacattctctaacttatcagatgattctcagcgttttacagctcgcttttttcaccttctttcttcactagcagaagctttcgtgttcatatacatgggatttgatattgcgatagaacgtcaaagctggtcacatattggattcatatttttctcaattatcttcatactagttgcaagggctgcaaatgtcttctcttgtgcatacatactgaatttggcacgacctccacattgccaaatacctaggcaatatcagcaggctctttggtatagtgggcttagaggagctatggcttttgccctcgctcttcagtctgttcatgatcttccggatggacatggcgagacaatttttactgctaccacatctattgttgttctaactgtaggttgctgggtgtaattcttcccacattatatcaaaatgaaactagaatatttgtatggtaatgatttggatagtacgcctatgatttttgttatcctacatcagaaggccttgcttgagtattctacttgatttgaattgaatttattcttgtggagttcctttcaaaattcctgcgaagaacctccagataggcataaataacgcttgcatggcaatgttcaaggtactccttattggtggctcaactggaacaatgcttgaggccctacaggtagttggggacagcaaccgttattgccaactgtatgagctgcaggagagttctaatggcaacgacactggttacacgggacaaaattatgatgaaggagcatccacttcaagcaaattcagatctaaacttagagatctaaggagaagcacctcgtctttcgctttactggacagaaattaccttactcctattttcacttcgcaaaacggcgactgcaatgataacactacagaaagtcccaatgaagaattgacgatattcagaggacctggggatttggaggtacatgattgatgactgcagatatgaagtgcttatcttccatgaatctacacgatactccttgtaccttcctcggcgacccaaagtggaaagtgcaaccagacattcggccatagcattgccatattattaatctataaacattagttagctaggatagttcaacgtaagtctttgtacgtagaatataggtgtaatttatcagccttgaaattctgttctgatccgtttcagaaactttgtgcgtacggacgcatctgccttcttgtgcacctgcaacactcgtaggttccttgaaatgccttcttgtgcacctgcaacagtgcaggttcctccaaattgaactcgcccagatttccggatcgtgccgattgccgactgccgaaccctgtgctatacttgcg

SEQ ID NO: 206636 - DNA, 4904 bp, Zea Mays
gtctcccctccactcgtctctccgttcggccgtgtccagtctccagtccgcaacggaaggagaggaggcgtcgagggaaaatcgcgccaaccgggccgaacgaatcgtcggaaggccggggaggaggtctagaaggtgtgggaatggcgacggggcttgccttggcggcggcgcctcatgttgcttcggtcacgggatcggggacagtggaggagcaggcggcgggggtcggcatcttgcttcagatatcaatgctcgtgctctcgttcgtgctcgggcatatcctgcgccgccgaaagttctactacatccccgaggccagcggctcactcctgatcgggatgattgttggagggcttgctaacatatcaaacactcagaaaagcatcaggagatggtttaattttcgggaggacttcttccttctctttttactgcctccaattatattccagtccggattcagcttagcaccaaaaccattcttttcgaacttcgatgctatcataacatttgcaatcctgggaaccttcattgcctccattgttacaggtcttttagtctaccttggtggattactatacattgtctacaggctcccactggtggagtgtatgatgtttggtgctcttgtatcagcaactgatcctgtgacagttttgtctatatttcaggagcttggcactgatacaaatctatatgcactggtttttggagaatccgttttaaatgacgctgtagcgatatccttgtacaggtctatggcatctatgaggacgcaccattctggaaaaaactttttccttgtaattctgaggtttcttgaaaattttgttggatcaatgtcatcaggcattggtgttggactaatttccgctctcctcttcaagtatgcagcactgggcgttgagaaccttcacaatctggagagttgcttgtttgtgcttttcccatacttctcgtacatgctagcagaaggcattggtctatctggcattatttctattctcttcacgggtattgtaagttcaactccaataatttgccatatatcttgttttaggatttataagctaaaatttgttactgtattcataaaatgcttctatgtatcttatgagttttggtgctgtatatacaagagttgtaaaggatctttatgtgaaagtgaggaaataaagagggtgtgtgctgatgctacatcttactatcctcatctcttattttttttctcgaacacgcaagagcactgtacatcattatattaagagaaagaaagcaaaaataattacaaggaggccatgcggagcaaggccggacagaaaaataaaaaccacccaacacgggaccaaaaaaggagaaaggaagaaataactacttcgatccaggtgcccaaagggcttcagcgatactaagcctgccaaggtgctttgccccagccataacccaacagcctaattcattaaggaaacaatgctgcgccttggaaatagaaggtgaatccctctcaaaaacagccatgtttctttgcaaccaagggcatcaggctccaaggatgatagtgcaattaaggcctttccttttatccttgatgaccctgcaattcatgtctcgccatcattctgcaaaggaagaggcagaagaggagggagcaagatgccccaaaccatagggggagagaatactaaaccaaaattgcctggcaaaaacgcaggaggttaagatgtgttgcactgtttcctgggcttggtcacatgaagggcaaacagcagggtgaggcagccccctcttttgcaatctatcggcagtccaaactctgtcccgaattgccagccataagaagaacttgcatttggggtgcccaagacttccacaacctcttccaaggttcaaacgctatagaacctgcgaagagggccttataagaggatttagccgaatagatacctgaggtttcatgcctccaagagtgtatatcatccccatccttcagaaccacctcattaaccatatcccacataaggtattgttgtaaaccaaccaaagataggggaggtttgaaatccctcacccaagagctgttatcaagggcctgagccattgtcctagtgtacacgactttcttatgcaccttccgataaacttctaaagcgacctaaaaaacggagcacccctctaaccagcgatcagaccaaaacaacgtgtttgcaccatttcccacagctgtaactactgagatgtcaacaaactttctggcctgcggttgtatgggaagatccagacccctccatgacctgctagcatcagtcttctgcaaccatagccacctagcttgcagagcccatccctgtaatttaaggttaggtattccaagccctctgaggtttagaggccttgttaccacctcctagggcaccaaacaactgtcacccttcacatccttccttcccttccaaaggaaaccccttctaaccttgtcaattgctttgatcacccatctcgggacactcatggcaataaggagataaaccagaatggcaaagagcacaaaacgaaccaccgcagttctacctgccaagttaaggagggaggccttccaaaaagggaaacgatccgctatcttttcaacccaaatcatgagggtattctttgacagtttttgatggatttgggcagccccaaataggtgcagggaaaggttgcaacagcacattgcagcaaggaacaactttcctggacaacctgatcttcacaagcaatcggaatgaaataactctttctttgaagtgaaagatcttggagctcttcgatattttcttgggattgagattgattggtcgtcaaagtgaattgtcctatctcaaagaaatataccctttatatattgacagaaacatgtatgcttgggtgttgtccatatagttcccctactgatagagaccaccaaacttgtgcccaattaggtgatccagccaacaaagaaacatatcaaagattggttggacgattgatatacttatgtcatacaaggcctgatatctcctatgcagtgagtgtggtgagcaggtatatgaagattatggttcaaaaagaatggccacttggactttgaaggatattgtgatgcagattgggcgaatagcatagatgataggtctacatcttgatattgtgtatttgtaggaagaaatctcgtctcatagcgaagtaacaagcaagaagcaaattcgtagtggctcggtctactgcagaggctgagtacagggcaatagtgttgagcctatgtgagatgatgtagttaaaggtctcgctaggtgagttacgggtgttgaggaatgagactgatgtttcactgtgacaacattgcggcgatcaatattacaagcaatactgttcaattttatcacacaaagcatgtggagcttgataggttcttcattaaggagaagctagtagggtcttaaggctagagtacattaagtctcgtagccagctagctgactgcttcacaaaagatctaggtcctaaagagaagtcaagttgtaacaagatggacatgagaaatatttttggcctatcttgagagggagtgttggtataaatacaagagttctaaatgaccattatgtggaagtgaggaaataaagagtgtgtgtgtgctgggggatgcaacacaccaaaaaaacccaaacctcaataaatttgtagccgcaaacttcaagttcgtcaacctaaattgcttactaaaagaatttttacttccaggtgatgaagagatacacattctctaacttatcagatgattctcagcgttttacagctcgcttttttcaccttctttcttcactagcagaagctttcgtgttcatatacatgggatttgatattgcgatagaacgtcaaagctggtcacatattggattcatatttttctcaattatcttcatactagttgcaagggctgcaaatgtcttctcttgtgcatacatactgaatttggcacgacctccacattgccaaatacctaggcaatatcagcaggctctttggtatagtgggcttagaggagctatggcttttgccctcgctcttcagtctgttcatgatcttccggatggacatggcgagacaatttttactgctaccacatctattgttgttctaactgtactccttattggtggctcaactggaacaatgcttgaggccctacaggtagttggggacagcaaccgttattgccaactgtatgagctgcaggagagttctaatggcaacgacactggttacacgggacaaaattatgatgaaggagcatccacttcaagcaaattcagatctaaacttagagatctaaggagaagcacctcgtctttcgctttactggacagaaattaccttactcctattttcacttcgcaaaacggcgactgcaatgataacactacagaaagtcccaatgaagaattgacgatattcagaggacctggggatttggaggtacatgattgatgactgcagatatgaagtgcttatcttccatgaatctacacgatactccttgtaccttcctcggcgacccaaagtggaaagtgcaaccagacattcggccatagcattgccatattattaatctataaacattagttagctaggatagttcaacgtaagtctttgtacgtagaatataggtgtaatttatcagccttgaaattctgttctgatccgtttcagaaactttgtgcgtacggacgcatctgccttcttgtgcacctgcaacactcgtaggttccttgaaatgccttcttgtgcacctgcaacagtgcaggttcctccaaattgaactcgcccagatttccggatcgtgccgattgccgactgccgaaccctgtgctatacttgcg

SEQ ID NO: 206637 - DNA, 2443 bp, Zea Mays
ctcccctccactcgtctctccgttcggccgtgtccagtctccagtccgcaacggaaggagaggaggcgtcgagggaaaatcgcgccaaccgggccgaacgaatcgtcggaaggccggggaggaggtctagaaggtgtgggaatggcgacggggcttgccttggcggcggcgcctcatgttgcttcggtcacgggatcggggacagtggaggagcaggcggcgggggtcggcatcttgcttcagatatcaatgctcgtgctctcgttcgtgctcgggcatatcctgcgccgccgaaagttctactacatccccgaggccagcggctcactcctgatcgggatgattgttggagggcttgctaacatatcaaacactcagaaaagcatcaggagatggtttaattttcgggaggacttcttccttctctttttactgcctccaattatattccagtccggattcagcttagcaccaaaaccattcttttcgaacttcgatgctatcataacatttgcaatcctgggaaccttcattgcctccattgttacaggtcttttagtctaccttggtggattactatacattgtctacaggctcccactggtggagtgtatgatgtttggtgctcttgtatcagcaactgatcctgtgacagttttgtctatatttcaggagcttggcactgatacaaatctatatgcactggtttttggagaatccgttttaaatgacgctgtagcgatatccttgtacaggtctatggcatctatgaggacgcaccattctggaaaaaactttttccttgtaattctgaggtttcttgaaaattttgttggatcaatgtcatcaggcattggtgttggactaatttccgctctcatatcctttaatctaactttacttcataaaaatgaacatgattaaccttgaaagctatgatggtggtttggcttcttttatagtaagtcttgttcagccatggggattttttagtgcagacaagctgaagtttacccgaaaagggctgacagctatgtacactgcaaaatctgcactagactagatcttaaacgttttccccaaaattctgcaactcccattttcaagaaaacctttttgcaccaggactacatagatgtgtttttgtacttttgtcaagtcatgtctcaactttgccactccttaattcggtcaaacctcttcaagtatgcagcactgggcgttgagaagtgagtaaaaagttggcacttgtagtttgtctgaaatattggagcccatcacatacacaactattttttcgaccattttcagccttcacaatctggagagttgcttgtttgtgcttttcccatacttctcgtacatgctagcagaaggcattggtctatctggcattatttctattctcttcacgggtattgtgatgaagagatacacattctctaacttatcagatgattctcagcgttttacagctcgcttttttcaccttctttcttcactagcagaagctttcgtgttcatatacatgggatttgatattgcgatagaacgtcaaagctggtcacatattggattcatatttttctcaattatcttcatactagttgcaagggctgcaaatgtcttctcttgtgcatacatactgaatttggcacgacctccacattgccaaatacctaggcaatatcagcaggctctttggtatagtggtactccttattggtggctcaactggaacaatgcttgaggccctacaggtagttggggacagcaaccgttattgccaactgtatgaggagagttctaatggcaacgacactggttacacgggacaaaattatgatgaaggagcatccacttcaagcaaattcagatctaaacttagagatctaaggagaagcacctcgtctttcgctttactggacagaaattaccttactcctattttcacttcgcaaaacggcgactgcaatgataacactacagaaagtcccaatgaagaattgacgatattcagaggacctggggatttggaggtacatgattgatgactgcagatatgaagtgcttatcttccatgaatctacacgatactccttgtaccttcctcggcgacccaaagtggaaagtgcaaccagacattcggccatagcattgccatattattaatctataaacattagttagctaggatagttcaacgtaagtctttgtacgtagaatataggtgtaatttatcagccttgaaattctgttctgatccgtttcagaaactttgtgcgtacggacgcatctgccttcttgtgcacctgcaacactcgtaggttccttgaaatgccttcttgtgcacctgcaacagtgcaggttcctccaaattgaactcgcccagatttccggatcgtgccgattgccgactgccgaaccctgtgctatacttgcg

SEQ ID NO: 206638 - DNA, 2344 bp, Zea Mays
ctcgtctctccgttcggccgtgtccagtctccagtccgcaacggaaggagaggaggcgtcgagggaaaatcgcgccaaccgggccgaacgaatcgtcggaaggccggggaggaggtctagaaggtgtgggaatggcgacggggcttgccttggcggcggcgcctcatgttgcttcggtcacgggatcggggacagtggaggagcaggcggcgggggtcggcatcttgcttcagatatcaatgctcgtgctctcgttcgtgctcgggcatatcctgcgccgccgaaagttctactacatccccgaggccagcggctcactcctgatcgggatgattgttggagggcttgctaacatatcaaacactcagaaaagcatcagaattgttcatgttttacttgactgcatcttacccagtccggattcagcttagcaccaaaaccattcttttcgaacttcgatgctatcataacatttgcaatcctgggaaccttcattgcctccattgttacaggtcttttagtctaccttggtggattactatacattgtctacaggctcccactggtggagtgtatgatgtttggtgctcttgtatcagcaactgatcctgtgacagttttgtctatatttcaggagcttggcactgatacaaatctatatgcactggtttttggagaatccgttttaaatgacgctgtagcgatatccttgtacaggtctatggcatctatgaggacgcaccattctggaaaaaactttttccttgtaattctgaggtttcttgaaaattttgttggatcaatgtcatcaggcattggtgttggactaatttccgctctcctcttcaagtatgcagcactgggcgttgagaaccttcacaatctggagagttgcttgtttgtgcttttcccatacttctcgtacatgctagcagaaggcattggtctatctggcattatttctattctcttcacgggtattgtgatgaagagatacacattctctaacttatcagatgattctcagcgttttacagctcgcttttttcaccttctttcttcactagcagaagctttcgtgttcatatacatgggatttgatattgcgatagaacgtcaaagctggtcacatattggattcatatttttctcaattatcttcatactagttgcaagggctgcaaatgtcttctcttgtgcatacatactgaatttggcacgacctccacattgccaaatacctaggcaatatcagcaggctctttggtatagtgggcttagaggagctatggcttttgccctcgctcttcagtctgttcatgatcttccggatggacatggcgagacaatttttactgctaccacatctattgttgttctaactgtaggttgctgggtgtaattcttcccacattatatcaaaatgaaactagaatatttgtatggtaatgatttggatagtacgcctatgatttttgttatcctacatcagaaggccttgcttgagtattctacttgatttgaattgaatttattcttgtggagttcctttcaaaattcctgcgaagaacctccagataggcataaataacgcttgcatggcaatgttcaaggtactccttattggtggctcaactggaacaatgcttgaggccctacaggtagttggggacagcaaccgttattgccaactgtatgaggagagttctaatggcaacgacactggttacacgggacaaaattatgatgaaggagcatccacttcaagcaaattcagatctaaacttagagatctaaggagaagcacctcgtctttcgctttactggacagaaattaccttactcctattttcacttcgcaaaacggcgactgcaatgataacactacagaaagtcccaatgaagaattgacgatattcagaggacctggggatttggaggtacatgattgatgactgcagatatgaagtgcttatcttccatgaatctacacgatactccttgtaccttcctcggcgacccaaagtggaaagtgcaaccagacattcggccatagcattgccatattattaatctataaacattagttagctaggatagttcaacgtaagtctttgtacgtagaatataggtgtaatttatcagccttgaaattctgttctgatccgtttcagaaactttgtgcgtacggacgcatctgccttcttgtgcacctgcaacactcgtaggttccttgaaatgccttcttgtgcacctgcaacagtgcaggttcctccaaattgaactcgcccagatttccggatcgtgccgattgccgactgccgaaccctgtgctatacttgcg

SEQ ID NO: 206639 - DNA, 1967 bp, Zea Mays
aacttgcccaacacccctgcagtgttggacgcagggaatacttgaaaccccggctcccgatggatcatggatctcctctctgctgcgtacggtgctacctctgacgatgaggatgccgcggaccgacccttctccatgccggttgccaccagcgctgccactggcatctccatccagcggcagatacatttccaagagggagcgcgctctcctggcctcatcaggggcacatattgaatccggatcatccctgcctctgacgagagtggattttgaatctgcagttggctctatcacctatccaaatctacgagctgacattttgcattctttgcgatgccaaccgaaacctggaccaagcacaagtttccctttgaggctctcagtttgtttgaagggtcacactaaagcaatcaattgtgtagattggtcaccgactcatgggcatcttcttgcttctgctggaatggatcacacggttcatgtatggaatgtatgggacaaagggaataccactgctcgtgttttgaaacatcacactgctgctgtaaaggatgtaaggtggtcacttcataggccctttttactttctggagggcttgattgttccttacagctagttgatgttgttgagggaaaagtaatggaagtattcaaggaggatcaagctgtggaggttatcaagttcaatccaagcaaccccgatctcttcctatctggtgggtccaagggttcccttaaactctgggatattcgatgtggtctggtaacaaaagaatttcagagaagccttggaaccatccttgacattgacttcagtgctgatggaagacaatttatctcttcaactgacacaaccagaagcaatattagtgagaacactataattgtttgggatgtcctgcgacaagttcctttatctaaccaggtttataccgaagcattcacatgcccgtgtgtaaggtaccacccacgtgaagcatcatttgttgcacagtccaatgggaactacattgctattttttcagcaaggccacccttcaagctgaacaagtacacgcggtttgaaggacatggagtgtggggtttccctgtgaagtgcagcttttcccttggcgggagagaactcgcatctggttcatccgatgggtccatttacttctatgattacaggtcggcaaggcttttgaggaaaatagaagccttcaaagaggcgtgcactgatgtcgcgtaccacccagtaatgcctaatgtgatcgctgcttgtagctgggctggtgaaatatctgtctttgagtgacatgattataatgctgtgtggagaagcatcagcagttcagaaccgctagcatatatatgtgtgtgtgtgtgttctgtgactcaaacaccagttaatggtcatagcagattccaaaataaaaataatttgctgtatggagttcatcgtctgaatttcagtctcagcctcgcctatgaagagattattggtggtttcaaacaaagccttgttctttctgttcaaagtagatgaaacatcatagcacattgattgtagtggcaacatggcccaagaagaagctaagtgagctaaagaggctgctgagcgcgtaaagcttataggtacttttactgaaatttagcttcggattaacaacttgttctttactacaactgaactttcaccgccgcctgagccgtatgatcctgaagccgatccggccatgaaggaagcattagaaacgataaggatcgccaacgaagctgttgacgaagctgtcaatagactcctaaatgaagctgccgagaagatattgaaagaggactgaattcttgtgtactaaaaaaatgtaatattcgtgtatgcgtcgaacatcgaacgtttgtatgtatattaatgtaatatatttctttgcgaagcataaaatctatgtatataccgttttgagccttcggcgaaaaaacacctt

SEQ ID NO: 206640 - DNA, 779 bp, Zea Mays
agccaaacaataaatatgaacgatttcccagaaactttaggctgctagaagaactagaacgtggtgagaagggcattggtgatggaactgtgagctatgggatggatgatgctgatgacatatatatgcggtcctggacaggaactatcattggtcctcccaatactgttcacgagggacgaatctaccaattaaagctgttttgtgatacggattatccagataaaccaccgacagtccgattccagactcggatcaatatgacatgcgtgaaccaagaaactggattggttgaaccaagtctatttcctatgcttggcaagtgggaaagggaacatacaatggaggacatcctgagcagcttaaaaagggagatgtcaactcctcagaaccgcaggctgtaccaacctcatgaaggtaatgaagatcaaagagtagagcagaaagggctgtcccttagatgtgccgtcatgtaataatgtacatttgaattgagcagcgagatgccgagcttgagcgaaccctctcagggcatgtttaggaacaatcccgttcaattgccttgcttccaaacaagccctgtattaaatcctcctgtagctcaccttattcatgccgccatcgcaataaagtgtcgatgaaactgttaaattgactgcacaccatgtaacatgcaaccgattcgatttctgtgaaggacaacgtgttcagtgtcggctgttccacatgttacactgtgtagtctgttctgtctaggcggctaggcctgttattctttc

SEQ ID NO: 206641 - DNA, 709 bp, Zea Mays
ttggcccctctgctgtatcccttcccctatctgcagcagagcagttcctttcttgctctcctccgctagtccggtaccctctcgacctcggcgtcccaccgaagacgacctcacgcggagctgggaatattccttcgcctccgtgctccctttagcaccaactgtcacggccgcttccagcacgcatcattctcgtctcccgtctcgagagattgcagggggcggcgctcgaagctggaggaagcggacgggttcgcgatggggtccgagggatcctcgggtccggtcgtcgttcccagaaactttaggctgctagaagaactagaacgtggtgagaagggcattggtgatggaactgtgagctatgggatggatgatgctgatgacatatatatgcggtcctggacaggaactatcattggtcctcccaatactgttcacgagggacgaatctaccaattaaagctgttttgtgatacggattatccagataaaccaccgacagtccgattccagactcggatcaatatgacatgcgtgaaccaagaaactggattggttgaaccaagtctatttcctatgcttggcaagtgggaaagggaacatacaatggaggacatcctgagcagcttaaaaagggagatgtcaactcctcagaaccgcaggctgtaccaacctcatgaagttgataatttttttttatcgccag

SEQ ID NO: 206642 - DNA, 1901 bp, Zea Mays
ctaagttggagaaaaagggtagttgggtaacttgaaacctgcctgagtccacctgccggatgcaccgccgccttgccaccgcggccacagcgcccgcgctccggcggttctcgcaccacagcgcgcgtccccagcctgacccaaggtgttagaagagctaagaagcgaccttgctcttgctggagacgctccggcgggtgtggctatagcgcatccgtggccggagtggatttctctgatggagcacctcctccgtcaaggccacgttgacccctccaccttcgccgccgcctcgctgtcttctaaggacgccaacgctgtccgcaccgcctgcctccgattcgggcgccagcggccggagctcatcaggcatgtatcaagatgggatattcaggttgccatgcgatgtggttgtcccagcattgacagaaaggttgtaaactctgggaagcgattgcgggcttatgtaggacttgatgaaggagaggtttgcagccaatgcaatttaagaggaagttgtgatagggcatatgtgaaggctcggaaagaggacgttggaagaactgtggatgttatgcgcatccttttgacttacggtcttgatgttattaccggcaatgtagataatagagcatgcctgaacaaatctgtcaaggaatcaataaagatcctactaagcgaggttgttgaggtggattctaggggacctggttccagcactgtgaaagctgcacagcgcaaaggtcaatctgctgtacccatgaagcagggtgattggaattgtcccaaatgtgactttctgaactttgcaaagaatatcaaatgtttgcgctgcgatggagaattccaagagaggtatcagttgttgcatgaagaccgagagcatctgcctctcaaaaagggtgactggatatgcaaaaggtgcaactttttgaattttgctaagaatacaagatgcttgcaatgtcatgagaaaccaacaaaccgtttactcaacccaggagaatgggagtgtgtctcgtgagtgcctatttctactacactattatatatctccttatttgttgaacatgttcatgaaggacaagcctggcacagtggtgacaagccttttcactgagtcggttattccttcctcagaccccacttgtgtggaagccgccagcactcggtgtaactatgtgaacttcaagaggaatgggttctgcttgaaatgtggctggaaaagaccaaagtctctaaacaatcaagatagtgtcaaattgtgtcatgatttagagcatagtaagaatccacgtatttcatttgttcaagatggtgtccagatgaaggggtggcaaagtctgcaaaagaagggttcaccatccgacacagatttggatttctggagtgcagacgacgaagagggtggtagcagggataatgatacgctgctgcgacagaaggactacagatttcttgagagttttcccattgtcggtggcaggactgctaattcccaagatcttcttgcaagggagaagtggaaggatgaaatgtccaggagaaataaaggccttcaaactacggaatcgcaagaaagcaatcggccttctagccactgccgtcttccaagaagcatggagctggttgactctgatgatgatattgcttcttggttttcgggtggggataataataataggaacctggataaggtataaccagatcttgtaagtggatgcagctcatcaataaaagttgcatcctttggaattattgaaattcaggcaaaaagaattattaaagctcactggagaactgtacaatttaatgtttcggaactttgtttatgggctgctcagagatgatatgattttttgcaaggggtttgtgcctgctctcatgcaattaagttttgg

SEQ ID NO: 206643 - DNA, 1145 bp, Zea Mays
ccacagaagttatacttaatatactttactggcagtcctttcttgtttgcaaattgttccactgaacttgtaacagtaattggactttgataccgtggctgcatggtgtgtcatattgcgtccaagcagggttgcattttgatatgtataatacttgcttggagttaacaatacaatttccaagtagcaacggatcatggctagttcagttatctggatagtgtgaaaccatttgaattatataagcgattaagtggaaatcaaaatattgaagaaaaaggttaatatcatggagacttagcttgcatttcataatgaggatggaacaacacaaactagccatgctcttcttgagcctatatttctcatatggttgtaccagactactgtctgccaaagttgaagtttcagattttggaaattaataatctggaatatttgctcaacaacctttgatatgcattactctgatttgggactagataatgaatcatacatactagtaagatttgtagtaattatgtatgatgccctgacgcaattcattttgttttggcaacccgcaatacagactttataacgatcaggatgtggtcttctaacagttatattcaccctatctttattatattattctcagatgagggcgtttacaggtttggtggacaccaactacatactagatgctatccgtggttctgagttattggaagtgcagggagataatgtccggaggcgcaatgattggatggaatggctgcttcattaaggccgtccactagtaaatcagatgccaagatgcagctgcatgccatattgggggaactgaatgaatagaagtcttgatcacggcgtgatggactgatgtacagcgagcgggtctattggaatcgggatgatttttgtttgacgtgatggctgcacgtgaaggcacattattcaaagggaaaataattttacttagggctagcaaatgtttttatggcagtctgtatagttgtccgaaaagaagtgaccaccctgccttctcattatggattattattattattaggtgtcctgttgaacgatttggtgaccgtttgctttgcttttcttggatcaaagtcacgtaaccgcagcccattcaattcaacccactacaa

SEQ ID NO: 206644 - DNA, 1358 bp, Zea Mays
atgaagacggcggcggctatctgccttcactggagctgtgagaaggctatggtgcaaattgttcagcagataaatcatgatggagaggtcaatcgagctcgctatatgccccaaaattcatttgtaattgctactaagacagttagcgcagaagtatatgttttcgactatagcaagcacccatctaagcctccactagatggtgcatgcaaccctgatttacggctgaagggacataattctgaaggatatggcttatcatggagtatttttaaagagggacatttgttaagtgggtctgacgatgctcaaatttgcttgtgggacattaaagcaaatagtagaaacaaaagtcttgacgccttgcagatttttaagcatcatgatggtgttgttgaagatgttgcttggcacttgaggcatgagtacttatttgggtcagttggtgacgattatcatcttttgatttgggacctgcggtctccagcccctactaaacctgttcagtcagtggtggcgcaccagggtgaactgcctggcttttcacccgttcaacgaatgggttgttgcaactggttctactgacaagactgtcaaattatttgatcttaggaagattgatacttctctgcacacctttgactgtcacaaagaggaagtttttcaagttggatggagtccaaagaatgaaactatacttgcatcctgttgtctgggcagaaggctcatggtctgggatctaagcaggatcggccaagaacaaacaccagaggatgctgaagatggtcctccagagctcatgttcatccacggaggccataccagcaagatctctgatttctcctggaacccctgcgaggactgggtggttgctagcgtcgctgaagacaacatcctccagatatggcagatggctgagaacatctaccatgacgaagatgatctgccaattagcgatgagccggcaaaaacttcttgaagcaacacagcacaaaaggaatcttaacttctatcgactgttgggtgttcctagatcggaaccctgctcgccggagaatcttcatcgagtgagagttggctgtaggttgcttccgtggtcgtaactttatgcttgacgggttcgtcgtttcttcgaccgtctgtatgtgtattcggcgaacctttagcaatatacatatcccgattgactagatctgtacgtcgcagttgtgttttgtagtattgttttgcagccagtaggatcatgttcgtgatgtgatttgtaacgggaacaaaataatattcactccagcgtaggccaagcgatagtcacagctcaggtcgaccgatacgcaagcaggtggtgcgtctagggctgg

SEQ ID NO: 206645 - DNA, 1418 bp, Zea Mays
cgcgaggggagcatgagcggaagatggggggagagtggaaggtggagcgtgctagatgaagacggcggcggctatctgccttcactggagctgtgagaaggctatggtgcaaattgttcagcagataaatcatgatggagaggtcaatcgagctcgctatatgccccaaaattcatttgtaattgctactaagacagttagcgcagaagtatatgttttcgactatagcaagcacccatctaagcctccactagatggtgcatgcaaccctgatttacggctgaagggacataattctgaaggatatggcttatcatggagtatttttaaagagggacatttgttaagtgggtctgacgatgctcaaatttgcttgtgggacattaaagcaaatagtagaaacaaaagtcttgacgccttgcagatttttaagcatcatgatggtgttgttgaagatgttgcttggcacttgaggcatgagtacttatttgggtcagttggtgacgattatcatcttttgatttgggacctgcggtctccagcccctactaaacctgttcagtcagtggtggcgcaccagggtgaggtgaactgcctggcttttcacccgttcaacgaatgggttgttgcaactggttctactgacaagactgtcaaattatttgatcttaggaagattgatacttctctgcacacctttgactgtcacaaagaggaagtttttcaagttggatggagtccaaagaatgaaactatacttgcatcctgttgtctgggcagaaggctcatggtctgggatctaagcaggatcggccaagaacaaacaccagaggatgctgaagatggtcctccagagctcatgttcatccacggaggccataccagcaagatctctgatttctcctggaacccctgcgaggactgggtggttgctagcgtcgctgaagacaacatcctccagatatggcagatggctgagaacatctaccatgacgaagatgatctgccaattagcgatgagccggcaaaaacttcttgaagcaacacagcacaaaaggaatcttaacttctatcgactgttgggtgttcctagatcggaaccctgctcgccggagaatcttcatcgagtgagagttggctgtaggttgcttccgtggtcgtaactttatgcttgacgggttcgtcgtttcttcgaccgtctgtatgtgtattcggcgaacctttagcaatatacatatcccgattgactagatctgtacgtcgcagttgtgttttgtagtattgttttgcagccagtaggatcatgttcgtgatgtgatttgtaacgggaacaaaataatattcactccagcgtaggccaagcgatagtcacagctcaggtcgaccgatacgcaagcaggtggtgcgtctagggctgg

SEQ ID NO: 206646 - DNA, 1288 bp, Zea Mays
cactccacaacagatttcggttgccagaagctgaaaaaaaaacaaatagggacaatgtttgttgttgctgtggctgattttcttatgggtgcaaattgttcagcagataaatcatgatggagagatggtgcatgcaaccctgatttacggctgaagggacataattctgaaggatatggcttatcatggagtatttttaaagagggacatttgttaagtgggtctgacgatgctcaaatttgcttgtgggacattaaagcaaatagtagaaacaaaagtcttgacgccttgcagatttttaagcatcatgatggtgttgttgaagatgttgcttggcacttgaggcatgagtacttatttgggtcagttggtgacgattatcatcttttgatttgggacctgcggtctccagcccctactaaacctgttcagtcagtggtggcgcaccagggtgaggtgaactgcctggcttttcacccgttcaacgaatgggttgttgcaactggttctactgacaagactgtcaaattatttgatcttaggaagattgatacttctctgcacacctttgactgtcacaaagaggaagtttttcaagttggatggagtccaaagaatgaaactatacttgcatcctgttgtctgggcagaaggctcatggtctgggatctaagcaggatcggccaagaacaaacaccagaggatgctgaagatggtcctccagagctcatgttcatccacggaggccataccagcaagatctctgatttctcctggaacccctgcgaggactgggtggttgctagcgtcgctgaagacaacatcctccagatatggcagatggctgagaacatctaccatgacgaagatgatctgccaattagcgatgagccggcaaaaacttcttgaagcaacacagcacaaaaggaatcttaacttctatcgactgttgggtgttcctagatcggaaccctgctcgccggagaatcttcatcgagtgagagttggctgtaggttgcttccgtggtcgtaactttatgcttgacgggttcgtcgtttcttcgaccgtctgtatgtgtattcggcgaacctttagcaatatacatatcccgattgactagatctgtacgtcgcagttgtgttttgtagtattgttttgcagccagtaggatcatgttcgtgatgtgatttgtaacgggaacaaaataatattcactccagcgtaggccaagcgatagtcacagctcaggtcgaccgatacgcaagcaggtggtgcgtctagggctgg

SEQ ID NO: 206647 - DNA, 1854 bp, Zea Mays
ctccagaggctcctctagcagcggttagttaaccatccaggttctgtcaagatgtctgatagccatgagactgacaggaacattgagatttggaaaattaagaaactgatcaaggcattggaatcagccagaggcaatggcacaagcatgatctctctaatcatgcctccacgtgatcaggttgctcgagtggctaagatgttaggtgatgaatatggtactgcttcgaacatcaagagtagagttaatcgtcaatctgtgttggctgccatcacctcagctcagcagaggttgaagctctacaacaaagtgcctcctaacggattggttctgtacactggaactattgttactgaagacggaaaggaaaagaaagttactattgattttgagccattcaagcctatcaatgtgtcactctacctttgtgacaacaagttccacactgaggctttaaatgagctcttggaatctgatgacaagtttgggttcattgttatggatggtaatggtactctttttggcacactaagtggcaatacccgtgaagtgcttcacaaattcactgttgacctcccaaagaagcatggtagaggagggcagtctgctctgcgttttgctcggcttcggatggagaaacgccataactatgtccgcaaaacagctgaacttgctacccagtttttcatcaatccagctactagtcagcctaatgttgcaggattgattcttgccggttctgcagattttaagactgagctgagccaatctgacatgtttgatcagcgactccaagccaagatacttaatgtggttgatgtttcgtatggtggcgagaacggtttcaaccaagctattgaattatctgctgagattctagcaaatgtgaaattcattcaagaaaagaagttaattggcaagtattttgaagagatcagtcaggatactgggaaatatgtctttggtgttgatgacactctgaaggctcttgaaatgggtgctgtcgagaccctgattgtgtgggaaaatctggatatcaacagatatgtgatcaagaacagtactactggggaaattattataaaacatctgaacaaagagcaggaagctgaccagagcaatttccgtgacccatctaccaatactgatctcgaagttcaggaaaaaatgtctctcctggaatggtttgccaatgacaacaagtctcaggagggatcccagttctgtagaggatttggtggcattggtggcatgttgcgctaccagctggatatccgttcttttgatgagctttctgatgatgacgatgtgtatgaagactctgactagcaatcagccaatctcatgccagggctggcccatggaaggacgcaacagctcgacctcgccatacctacgcaggagcacacgaaaagcaactatccaaggattaatgggcatgggccagcgtcatcctcttcaagaggagcttaagactaagatgattttgagtcacaatcatgggagtaacgtgacaagaagataccctactatatcacaattattccagtaatgcgtcgagaagataccgttgtttaagtgcacaaaccaatacagtgacgtgccaagaagttaccgtattttaaggatgtttaattttcagtattcgtcggggtagtactgtgtcagaaacttatttgtacctaaaaaggccaaatattgccgttgccttggtgctttatgctatgttatcgtcttttgtgagtctgtgtgctaaggttgttgcttaatgctttgtgactcgcaagctgctactcttgcagtttttgcaacgacgaagctatgatatggagtacaattctgtgtcatcatatt

SEQ ID NO: 206648 - DNA, 2097 bp, Zea Mays
caacgattctccacgtggccaccgcgcccagtccacgctcccccaaccagcccacctaaacccccgacccatcccgacctcttcctcaaatcctcagatccgccccctcctccacccttgcgccgcgctttcacagctctcccgcctccggatccagatccgccgccaccaacgcctgctcctccccctcccgctgcaccaccaccatcaagaggtccagcagggcggcagcggcagcggcggcggcggcgacatggggcgtgacggcggtggcggtgtcgccggcggcatgtctgactcggtgctccggaaggtgctcctctcctacttctacgtggcggtgtggatcttcctctccttctccgtcatcgtctacaacaagtacatcctcgacccaaagatgtacaactggcccttccccatctccctcaccatggtgcacatgggtttctgctcatccctcgccgtcgcgctcgtccgcgtcctccgcgtcgtcgacctccccacatcgccctccatgacgccgcagttctacacctcctccgtcgtccccatcggcgcgctctacgcgatgtcgctctggttctccaactccgcctatatctacctgtccgtgtcattcatccagatgctcaaggcgctgatgcccgtcgccgtctactccatcggcgtcctcttcaagaaggagaccttcaggtcctcctccatgctcaacatgctctccatctcattcggtgttgccatcgccgcctacggcgaggcgcgcttcgacgtgcgcggcgtcgcgctgcagctcgccgccgtcgccttcgaggccacgcggctcgtgctcatccagatcctgctcacgtccaagggcatctcgctcaaccctatcacctcgctctactatgtcgcgccgtgctgcttctgcttcctcctcgtgccctgggccttcgtcgagctgcccaggctgcgcgccgtcggtaccttccaaccggattttttcgtctttgggacgaactcactctgcgcctttgcgctcaaccttgccgtcttcctgctggtcggcaagacctcggcgctgaccatgaacgtcgcgggagtagtcaaggactggctgttgattgccttctcgtggtctgtgatccgtgacaccgtcacaccgatcaacctgttcgggtacgggatcgcgtttttaggggtgggctactacaatcatgtcaagctgcaggcgctcaaggctaaggaggcacagaagaaagccacacaggctgatgaggaggccgggtcgctcttgcaggagcgcgatggacacagtgatcgcaagagcgacaatcaggcctagagggccagatctgatcctggcttccccatattggttggttctcgatacattcatgatattgctaccattgtcacttacatgtgagagaagtgttttttgttagcttgcattgtgatataagagttcatcttgagaaagacgttatgtttacatctaacgtttgtggcaatcaaaaatcaatattgcattgtggaccattggctactgaaggcatctgttttgtttacacaaatgaaatagaattctaaaaaaaattgttctgtgaacaggttaccactagcctggaactgcgacaaaataagaaatagtcgaaaccaataaagcctagcattttgttgttctactcggtcattttggtgtcctaaacttgtaattttgctggaatattgtacagggcatctgatgcaaggtgcaaagactggtgttaggtctgcggttgctttcaaggaggaaggcggccattcctcactacctctctttgcccattgtctacatttatttgttctactagtagattaggggactacagatgtactcctgcagatggttaatttggtggctattttcgatatataatgagcttacagtaatctacgagctgagtctttctgcctgcgaagtttctgtttattcgtggaccggtcggcgtgttgtgtggatcagctttgtagtactttagtttcatactccgctttgtggtaaaaaaaaatcaaagaacgtttgcttttgacatgccaacaggcctaggctgcagctccagaatcatgtca

SEQ ID NO: 206649 - DNA, 726 bp, Zea Mays
cccagtccccacacgctagtctgtgctgtgcgggtgcccctcccgcgtcgcctccctccgcttcggcatttagcgctgccgcgagatatcgaggacgaaccggagacaggatggtcaccgtcgggcgccggcgcgggtttgtcaccttcgccgctgcggcgatcgctctgatgcagatcagttatctactgttcccgatcagtgcgcagcaatccaatggctcaagggttgtaccagcagaaggttactgttccatgtacggcatttgtgcacaacgaagtgacgggaaggtcttaaactgtgcaaatgcaaccaaagctgttaagccagacacattgttttcttcaaggatccaaagtttgtgcccaacaatcactggcgatgtctgttgtactgtagatcagtttgacacattacaccaacaagtccaacaggccgttccgtttcttgttggatgcccagcatgcttgaggaatttcttgaatctcttctgtgagatgtcttgttctccaaaccaaagcctcttcattaatgtgacttcagtaaagcagattaatagcactatgactgttgatggcatagattactatgtaactactaactacggtgaagagctatataactcatgcaaggatgttaagtttggcactctgaacacccgtgcaatggattttatcggtgctggtgctaaaacttacaaagttgatgttattaagcattttagtg

SEQ ID NO: 206650 - DNA, 2234 bp, Zea Mays
cccgggagcattttcttgtgtgactgacaggttgggctagcatgaccgtaatcaacttgtcagtgactgggacgggacgggacgcgtggtctccacagtcgtcagcctgcgaagaaggacgcttctgaagttaagcgaagcaaggttgagataatcaaggaaaagagcaacttcctccggtaccctttgaacgaggagttggtctcagaggccccaaatatcaacgagagtgctgttcagctgatcaagtttcatggaagctaccagcaaactgaccgagatgtccgtgggcagaagaattactcgtttatgctccggacaaagaacccttgtgggaaagttccaaaccaactttatttagctatggatacactagctgatgagtttggcatcggaacactccgcctgacgaccaggcagacattccagttgcacggtgttcttaagaagaacttgaagactgttctaagcactgtcataaagaatatgggctcaacattgggtgcttgtggcgatctcaacaggaatgtacttgctcctgcagcgccttttgtcaaaaaagatatcctttttgctcaacaaacagcagagaacattgcagcactccttacaccacagtccggggcttattatgacctgtgggtggatggcgagaagataatgtcagctgaagagcctcctgaggtgacaaaagcccgcaatgacaactcgcatggaacgaacttccctgactctccggaaccaatctatggcacccagtatctaccaaggaagttcaaggttgcagttaccgcggctggtgataactctgttgatattctgaccaatgacatcggtgttgttgttgtttcagatgatgcaggagaacctattggctttaacatctatgttggtggtggcatgggaaggacacaccgagtggaaactacattccctcggctggctgatccattgggttatgttccaaaagaagatatattatatgctataaaggccatcgtcgtcacacagagggaaaatggaagaagggatgaccgcaagtatagtaggatgaagtatttgattgaccgttggggaatagataggtttcgggctgaagttgaaaaatattacgggaagaagtttgaaagtttccgaccattgccagagtggcagtttaacagctaccttggctggcaagaacagggtgatgggaaattattctatggagtgcatgttgataatggtcgtgttggtgggcaagcaaagaaaactctacgagagataattgagaagtataatttggatgttagtattaccccaaaccaaaatcttattttatgtgggattgatcaagcgtggagagaacccataactacagctcttgcacaagctggcctgctggaaccgaaggatgtcgaccccctgaatttaactgccatggcatgccctgccttgccactgtgccctttggcacaaacagaagctgaacgggggatcttacccattcttaaacgaattagagcagtcttcaataaggttggtatcaaggattcggagtctgtggttgtgaggataactggatgccctaatggatgcgctagaccatatatggcagagcttggttttgttggtgatggcccaaaaagttaccagatctggctgggtggaacaccaaaccagagtacgctagcagaatcatttatggacaaagtgaagcttgatgacatcgagaaggttttggaacctctctttacctattggaatggcacacgccaggaaggcgaatcttttggaagcttcacaaaccgaacaggattcgacaaattgaaagaggtagtgaataagtgggcagagtcaccatcagccgcatgaagatttcgctttcgttggataaaatcccaggctcgcagcacaattttggccacgggattaattatatgacgaaggaaatccagataagccgagaaatggaaaaaggaagactcgggttgtgagttgctatgtttgttgggttgagtgatcgaatttttttgtgtgtgctctcaaggagacctctgtgaacttgaataaactccacacggagttgtgccaaattagaccgaggcgtccgtgaacttgaatcagttcctcgggatgttgtgcctgagaataaatcccaccgaggcgtctgtgaacttaattcaattcgtcaggaagctgtgccttagaataaattcgacgggtgtccaattttcttgtcattctagcgagat

SEQ ID NO: 206651 - DNA, 1653 bp, Zea Mays
gtctcctccctcaatcaacgcgtcctcgccttaccatgccaacctagccccggctctccatggaaggtgcgacctctgcacccaactctccagggaaggcatggtctactctccatggcctcccgcaatcaacggtctctcaccccaccacgacgaccctgccctggctccccatggaaggccatggaaggtgcgatcgagccccagctcaacatggaaggcgcgatccactctcctcgccccatcatcggcgtccactatccatcaaagagtcccgccttcccagtcccccttccccacagatggtcggtgaacccatcgccaccgtgccaacggggcccgaatccgtggccgaggccgaccgcctcctggcgctggctgagtcggagctctccgcgggcaggctccgagccacgcgcaggcacgccctccacgccgcccgcctgtacccgacctccccgcgcgccccggtagtggccaccaccgccaacgtgctcctcgccgacgcctcctcccaccacgccgcgctgctgctgcccgagcccgacgaccccgacgcctcaccgctcttcgcctccgagctccgccgccacttcaaatcgctcgtcaagtccctccgcgtcggcctcaacgccgccaccgcagccgcctacccctccgtcgccgccgccgccgaggaggcactcggccacgccaccgaggcctacgaggcgctcaccacccctacccctgggaccttctggaccgcctgcgccgggtgccgcctcctccacgagttcgagcgcaactctggaaattgttgatcaattaattgtgggggggggggaagtgtctctacttccttcccggttggtcaaggcggacaagcggtcgttggtctggtatccccttcctgtgtcctctctcctttgtgtagatggcgaattcgtggagtttgaagaatctgaatgttctcgcatatcactgtgcaagacagggatcacaaattcttgacaaaaacagtggaagaagcataccgaggagtcgattgcggtgacggaggtccatttggagtagttgtcgtccgcaatgatgaagtggtagttagctgccataacatggttctgaagcacactgaccctactgcgcatgctgaagtaactgcaatttgagaggttgcaaaaagttcgggaaaatcaagctctctgactgcgaaatttacgtgtcctgcgagccatgcccaatgtgctttggtgcagttcatctctcccgaatcaagaagctggtttatggggccaaggcggaggctgccatcgccattgacctgcaatgcactactctcttatgatcatgtgtgtactgccacattctgatatgagtactcaactttaaattaatcaatctactgtaagtcacaacttttggataaaatttcttcctagatgaaccacttccagagttccagatacttactcttaccgagatgggactgggcagaagagagttatccatgttaatttctaacaaatgatgaacatgcttattatttgcttgctcattatttgcttcctcggagttttttatatgtggactgtacaatgaaaacacaacctatcatgatgccaggtccctcatggatgtgttcattctcttgtaatctacgcaattctgtta

SEQ ID NO: 206652 - DNA, 983 bp, Zea Mays
caatcagccactgaagaacatacggtttgcaaaagttacagtggtaagaacggtgccacaacatccagacaatcaggttgccaacagctagataaagctgagatttgcaagttgactgttgtgttttaaccagtgactgagaagagttgcaaactgaataagaatgtacagttgacaaagcaagagcataagaaaataaggacgataagttcatctatccagtcaaacactgaagagcatacataattttgcaaaagttcaactgaaggcacaacactacagcacccaggcagctgtgcaagacagggatcacaaattcttgacaaaaacagtggaagaagcataccgaggagtcgattgcggtgacggaggtccatttggagtagttgtcgtccgcaatgatgaagtggtagttagctgccataacatggttctgaagcacactgaccctactgcgcatgctgaagtaactgcaatttgagaggttgcaaaaagttcgggaaaatcaagctctctgactgcgaaatttacgtgtcctgcgagccatgcccaatgtgctttggtgcagttcatctctcccgaatcaagaagctggtttatggggccaaggcggaggctgccatcgccattgacctgcaatgcactactctcttatgatcatgtgtgtactgccacattctgatatgagtactcaactttaaattaatcaatctactgtaagtcacaacttttggataaaatttcttcctagatgaaccacttccagagttccagatacttactcttaccgagatgggactgggcagaagagagttatccatgttaatttctaacaaatgatgaacatgcttattatttgcttgctcattatttgcttcctcggagttttttatatgtggactgtacaatgaaaacacaacctatcatgatgccaggtccctcatggatgtgttcattctcttgtaatctacgcaattctgtta

SEQ ID NO: 206653 - DNA, 3160 bp, Zea Mays
cctacccttcctccccctccgcctcccaccggcccacccccactctcttcttctccactcggccgggcactctccttgccccggcctcacaccatcacatgtccacaatgctgccgtcctccagatcgagatctgggccgaacgagtcccccgtcagcaggggcaggccgagcacgccatcctccaaccaccgcccctccacgccgtcctccaaccaccgcccctccaccccgggcggcaccaggaggagcagcgtcggcacgccatccacgccgcgctcccgcagcaacggcgcgggccccttcaagtccgagcccaactcgccgccgtcggccgccgcgcagaagccccgcctctcgttcgaccgctccccgagatccggggacaccaagcccgtcgtcgagcgccgggtgcccaagatcggcacgactcctgaaaagcatctccggagggaggccgaactgcaggcgcggcttgagtccgcccaggaggacctgaagaaggcgaaggatcaactggcattcatcctcggagagagggaccgtcttgtcggggagctcaacgaggccaagagagtcgctgatgagactcacgagaagctccaggatgccctcatggccaagaggtgggccgaggaggccactgagatcgagaagttccgggcggatgagctcgagcaggcaggcatcgacgaggcgcagaggcgggaggacgagtggcagagggagattgagtgtgtgcgtggccagcatgccgctgacttggagagtctggtcaacacaacggaggaggtggagaggctcaggcgtgatctttccatggcgaacgaggccaagaaggctgcacttggccacgccgatgatgcaatgaagattgctgaagtcaatgcagagaaggtggagattctctcaaatgaagttgttcgcttgaaaggcttgcttgattcgagtgctgccagcgaagagagtaagagccgtgaagctgagcttcttgttaagaatctggagtctgaagtttcatctctgaaaggcaaacttgaggaggcaaaagtccttgaagacaggttagccgacgcagaaaaaatgattgaggagcttaaatcagagatagctaatgcgcagaaggtcgaggaagacatccgtcagcagttagaagaatggaagcagaagtcagtatcacttgagatgaaattggaggaagttactctatctgagaagttcaaaagtgactcacttgtttccacgactgaagagctgtacaagatccagtcgatattgcaagatcgagaatcggaaattgaagttcttaaaggaaagacaactgccttggaaatcgaggtgacaaggcttttagcagatgtgactgattcaaatgagcatcttgatgcatcacagcaagaggtgtttgggctgcagacaacaatagatgttctgaagaacaagcttgaggctgcagagctagctgcctcagaggctttggacaatgagaggactgctaccacaaagattgaagtcctgactgaggagaaaaccaaccttattagtgagctggatgacgctagagacagagaggagagagagaaaagggcaattgaggatcttactgctgcattggataaggtaactggtgaagcacaggaagcacatgataggtgtcagaagaaagaagatgattatgaacatgcccttgcgcagataggtgatctgaagatggccctgaagagtatggaagagacttatgaggtaatgcttgatgagtcagaacaggacataactggcctaagggaaactgtggagaagctggaagctgaggtgagcaagtacagagaagaatgtgaatctaaggagcttgaccttatcacggctactaaacagtctgaacaagaaattgctgctcttaaagaagaagcggagcatgtatgtgcatccctgcgaggtgcagagcaggagcttgaagcagtcaatgaagagaaagagaggcttgaggggaaattggcacgcacagaatcagccgttgctgaagccaacgatgctgtgcaggaggcaaaagctgaaaatgagaggcttcaagagaaactgacatacacagagtcggcggttgctgaagccaacaagactgtgcaagaggcaaaggctgagagttcacagctgaaggagcgattacttgacaaagagaatgcattgcagagcataacccaggagaatgatgagttcaggatgcgagaagctgacgccatgaagaaaatagaggagctatctgccctgcttgccgaagccatgacaaagaagcatcccgaggaggaagagaagctggtggttgttgatgaggcacacaattctggacgtgaagctatccgttctgtggcagaaaatgaagatacagaagaaactgaccataagaaaccaaagcttgaagctgatgcagtcgatacgaactccaacggagaaccgaagcacgacgagaaagacgacagcaaggtggaagaagaggagctgaagactgagctcagcctacaggagagcgacagagctagctctgagaaggaagcacagtccgaaaacaggagacaagaaacagaaccatccaacgacgagttagacccgaagaaggacagcagcaccgagagcgccaacggaacggccgtgccagaggatacggcagcgacgacgactaaagcggcaacgtctcctacgaaaccgcagcagccgcagcagaaaaagaacaagcctctgctgaagaagtttgggagcttactgaaaaagaaaaacagcaagtagccgaacggtgggctgtactactactagtgttgttttgattttcttctttcctctccctttttcttttttttttctttttggggtctgtttgacgaggtgttgtgcttgctatgcgtcgtttaccgccaatgcctgtatttgtgggtgattggagaagtttgtgggtgtcgtgaattttttaacttggggacctatatggtgttggctgctgctgtctacacgtttgtggcagatcctcccatgtgtgtaaatggagttactcttcctgatcagaatgcatggctattcgtttctggaactgtgcagctccctgattgattgcaaggtcatgtgatgtaaacctcctagcagagaatgtgatctggcatgcagttggtatcata

SEQ ID NO: 206654 - DNA, 3097 bp, Zea Mays
cattccggtaacaaatcgagtcacagttggtctgctccctaccgtcgccgtttccgcactttcctcgtcacacaagtccacctccaccgccgcacgccgccgctcctccgcatccgcgaccgcgacctcgaggtcgccctccctccgcgccagctgcaatggcggcctcgccggaccaattccgggggcatgcgcgcctcccgcacttcgcggccccgctccgctacgacctccgcctccgcccggacctcgccgcgtgcaccttcacgggcgccgcggccatcgccgttgtcgtgtccgcgcccacccgcttcctcgtcctcaacgctgccgagctggatgtcgatcgcgcctccatccgtttccaggatttggcgccgacagatgtggctcagttcgatgaggatgagatcatggtcatcagcttcgaccgggagctgcccttcggagagggcgtgctcaccatggacttcaccggcacgctcaacgatcagatgaggggattttacaggagcaaatatgtgtacaatggagagtcaagaaatatggcagttacacagtttgaagccgctgatgcacggaggtgctttccatgttgggatgatcctgcatttaaggccaagttcaagctaacactagaagttccatctgacctggtagcattgtccaacatgccagtggctaaggagactgtcagtggacttaccaagactatttattatgaggaatctccacttatgtcaacctatcttgtggctatagttgttggcatctttgattacatagagagttcaacatcagagggaactaaagttcgtgtttatactcaagttggcaagactaatcaaggaaagtttgcactagatgttgctgtaaagtcgctggatttatacaaagattattttgccactccttatccattacctaagttggacatgattgctatcccggatttttctgctggggccatggagaactatgggttagttacttaccgagatacagctttgctgtatgatgagctactatcatcagcatccaacaagcaacaggtagcaataactgttgcacatgagttggcgcaccaatggtttggcaatcttgtgactatggaatggtggactcacttgtggctaaatgagggttttgcttcctgggtaagctatttagcagtagaatctttatttcctgaatggaataactggacacaatttcttgatgagacgacctctggcctcagattggatgcacttgcagagtctcatcctatcgaggttgaggtaaaccatgctagtgaaattgatgcaatttttgattccataagctatgacaagggtgcatctgttattcgtatgctacaaagttaccttggtgcagagtgttttcagaaagctttggcttcatatataaagaaatatgcctactcgaatgctaagactgaagacctatgggttgttcttgaggaggaatctggggagcctgttaaggatttgatgactacatggactaagcaacaaggatatcctgttatttatgcaaaaatcaatggacatgatttggaacttgaacaggcacagtttctatctgatggatcgtctggtcctggaatgtggattgttcctgtaacagcatgctgtggctcatatgatgcacagaaaaagttcttattgaaagataaaatggataagataaatattaaagagttttctgactctcaaagtgctgatggggagaagaatcaaatcatttggatcaaattgaatattgatcaaactggattttatagagtgaagtatgatgatgaacttgcagctggacttgtaaatgcaatcaaagcaaagaagctctcattaatggataagattggtatcgtggaagattcatatgcgctctctgttgcttgcaagcaaacactgacgtcattgttgcgactgctgaatgcttataatgatgagtctgattacactgtactttcacatgtaacctctgtatgtttaagcatttctaaaataacagttgacgctactcctgacttgaacaaagatatcaaacagcttttgatcaaccttcttctcccagctgtcataaagttaggctgggaccccaaggatggtgagagtcatcttgatgtaatgcttagatcactgctcttgactgcgctggtcagacttggacataatgaaactataaatgaaggagttcggcgtttccacatcttctttgaagacggcaaaacttcccttcttccaccagatactagaaaggctgcatatcttgccgtgatgcgaactgttagcacctcaagcagatccggttttgatgctctccttaaaatctacagagaagcatctgaaccacaggagaaatcacgtgtcttaggctccctgtcttcatcaccggatcaggatattgttttggaggcattgaactttatgtttactgatgaggtgcggaatcaagattcattttacatccttggtggcattagcttagaaggacgagaaattgcatggacctggttgaaggaaaactgggatcacgtgttgaagacatggaaatcgagttcactcatatcagacttcattgagtccattgtcccacggctgtcgaggttaccgagttctttgctggccaagttaagccatcattcgagagagcactgaagcagagcctggagagggtgcggatcagcgcgagatggatcgagagcattaggagtgagcccaagcttggtcagacagtgcaggagctgctgcaggccgatgcgtaaacatgtggcctggaaggtagcggttcctcagtgtgatcatctcatacgggctgttcgggtcagattaaagtcggttgtttagattgctgcagttataatctatagagataaacattgtagaaacagtagaagtcggtataaattaaacctaaacgaccaggcctataaattcttgaaaaggttcaggtgggcttattctacattgtattggcagttgcttgcgtatgatttgttgagggaaaaaactgatgcaatgacgtttgtttcaaagagtggtgtactgagtccatgattattattatttttatattattgacagtagtaaag

SEQ ID NO: 206655 - DNA, 3011 bp, Zea Mays
tccctaccgtcgccgtttccgcactttcctcgtcacacaagtccacctccaccgccgcacgccgccgctcctccgcatccgcgaccgcgacctcgaggtcgccctccctccgcgccagctgcaatggcggcctcgccggaccaattccgggggcatgcgcgcctcccgcacttcgcggccccgctccgctacgacctccgcctccgcccggacctcgccgcgtgcaccttcacgggcgccgcggccatcgccgttgtcgtgtccgcgcccacccgcttcctcgtcctcaacgctgccgagctggatgtcgatcgcgcctccatccgtttccaggatttggcgccgacagatgtggctcagttcgatgaggatgagatcatggtcatcagcttcgaccgggagctgcccttcggagagggcgtgctcaccatggacttcaccggcacgctcaacgatcagatgaggggattttacaggagcaaatatgtgtacaatggagagtcaagaaatatggcagttacacagtttgaagccgctgatgcacggaggtgctttccatgttgggatgatcctgcatttaaggccaagttcaagctaacactagaagttccatctgacctggtagcattgtccaacatgccagtggctaaggagactgtcagtggacttaccaagactatttattatgaggaatctccacttatgtcaacctatcttgtggctatagttgttggcatctttgattacatagagagttcaacatcagagggaactaaagttcgtgtttatactcaagttggcaagactaatcaaggaaagtttgcactagatgttgctgtaaagtcgctggatttatacaaagattattttgccactccttatccattacctaagttggacatgattgctatcccggatttttctgctggggccatggagaactatgggtagcaataactgttgcacatgagttggcgcaccaatggtttggcaatcttgtgactatggaatggtggactcacttgtggctaaatgagggttttgcttcctgggtaagctatttagcagtagaatctttatttcctgaatggaataactggacacaatttcttgatgagacgacctctggcctcagattggatgcacttgcagagtctcatcctatcgaggttgaggtaaaccatgctagtgaaattgatgcaatttttgattccataagctatgacaagggtgcatctgttattcgtatgctacaaagttaccttggtgcagagtgttttcagaaagctttggcttcatatataaagaaatatgcctactcgaatgctaagactgaagacctatgggttgttcttgaggaggaatctggggagcctgttaaggatttgatgactacatggactaagcaacaaggatatcctgttatttatgcaaaaatcaatggacatgatttggaacttgaacaggcacagtttctatctgatggatcgtctggtcctggaatgtggattgttcctgtaacagcatgctgtggctcatatgatgcacagaaaaagttcttattgaaagataaaatggataagataaatattaaagagttttctgactctcaaagtgctgatggggagaagaatcaaatcatttggatcaaattgaatattgatcaaactggattttatagagtgaagtatgatgatgaacttgcagctggacttgtaaatgcaatcaaagcaaagaagctctcattaatggataagattggtatcgtggaagattcatatgcgctctctgttgcttgcaagcaaacactgacgtcattgttgcgactgctgaatgcttataatgatgagtctgattacactgtactttcacatgtaacctctgtatgtttaagcatttctaaaataacagttgacgctactcctgacttgaacaaagatatcaaacagcttttgatcaaccttcttctcccagctgtcataaagttaggctgggaccccaaggatggtgagagtcatcttgatgtaatgcttagatcactgctcttgactgcgctggtcagacttggacataatgaaactataaatgaaggagttcggcgtttccacatcttctttgaagacggcaaaacttcccttcttccaccagatactagaaaggctgcatatcttgccgtgatgcgaactgttagcacctcaagcagatccggttttgatgctctccttaaaatctacagagaagcatctgaaccacaggagaaatcacgtgtcttaggctccctgtcttcatcaccggatcaggatattgttttggaggcattgaactttatgtttactgatgaggtgcggaatcaagattcattttacatccttggtggcattagcttagaaggacgagaaattgcatggacctggttgaaggaaaactgggatcacgtgttgaagacatggaaatcgagttcactcatatcagacttcattgagtccattgtcccacggtttacctccgaggagaaagctgtcgaggttaccgagttctttgctggccaagttaagccatcattcgagagagcactgaagcagagcctggagagggtgcggatcagcgcgagatggatcgagagcattaggagtgagcccaagcttggtcagacagtgcaggagctgctgcaggccgatgcgtaaacatgtggcctggaaggtagcggttcctcagtgtgatcatctcatacgggctgttcgggtcagattaaagtcggttgtttagattgctgcagttataatctatagagataaacattgtagaaacagtagaagtcggtataaattaaacctaaacgaccaggcctataaattcttgaaaaggttcaggtgggcttattctacattgtattggcagttgcttgcgtatgatttgttgagggaaaaaactgatgcaatgacgtttgtttcaaagagtggtgtactgagtccatgattattattatttttatattattgacagtagtaaag

SEQ ID NO: 206656 - DNA, 2933 bp, Zea Mays
tccctaccgtcgccgtttccgcactttcctcgtcacacaagtccacctccaccgccgcacgccgccgctcctccgcatccgcgaccgcgacctcgaggtcgccctccctccgcgccagctgcaatggcggcctcgccggaccaattccgggggcatgcgcgcctcccgcacttcgcggccccgctccgctacgacctccgcctccgcccggacctcgccgcgtgcaccttcacgggcgccgcggccatcgccgttgtcgtgtccgcgcccacccgcttcctcgtcctcaacgctgccgagctggatgtcgatcgcgcctccatccgtttccaggatttggcgccgacagatgtggctcagttcgatgaggatgagatcatggtcatcagcttcgaccgggagctgcccttcggagagggcgtgctcaccatggacttcaccggcacgctcaacgatcagatgaggggattttacaggagcaaatatgtgtacaatggagagtcaagaaatatggcagttacacagtttgaagccgctgatgcacggaggtgctttccatgttgggatgatcctgcatttaaggccaagttcaagctaacactagaagttccatctgacctggtagcattgtccaacatgccagtggctaaggagactgtcagtggacttaccaagactatttattatgaggaatctccacttatgtcaacctatcttgtggctatagttgttggcatctttgattacatagagagttcaacatcagagggaactaaagttcgtgtttatactcaagttggcaagactaatcaaggaaagtttgcactagatgttgctgtaaagtcgctggatttatacaaagattattttgccactccttatccattacctaagttggacatgattgctatcccggatttttctgctggggccatggagaactatgggtagcaataactgttgcacatgagttggcgcaccaatggtttggcaatcttgtgactatggaatggtggactcacttgtggctaaatgagggttttgcttcctgggtaagctatttagcagtagaatctttatttcctgaatggaataactggacacaatttcttgatgagacgacctctggcctcagattggatgcacttgcagagtctcatcctatcgaggttgaggtaaaccatgctagtgaaattgatgcaatttttgattccataagctatgacaagggtgcatctgttattcgtatgctacaaagttaccttggtgcagagtgttttcaggaatctggggagcctgttaaggatttgatgactacatggactaagcaacaaggatatcctgttatttatgcaaaaatcaatggacatgatttggaacttgaacaggcacagtttctatctgatggatcgtctggtcctggaatgtggattgttcctgtaacagcatgctgtggctcatatgatgcacagaaaaagttcttattgaaagataaaatggataagataaatattaaagagttttctgactctcaaagtgctgatggggagaagaatcaaatcatttggatcaaattgaatattgatcaaactggattttatagagtgaagtatgatgatgaacttgcagctggacttgtaaatgcaatcaaagcaaagaagctctcattaatggataagattggtatcgtggaagattcatatgcgctctctgttgcttgcaagcaaacactgacgtcattgttgcgactgctgaatgcttataatgatgagtctgattacactgtactttcacatgtaacctctgtatgtttaagcatttctaaaataacagttgacgctactcctgacttgaacaaagatatcaaacagcttttgatcaaccttcttctcccagctgtcataaagttaggctgggaccccaaggatggtgagagtcatcttgatgtaatgcttagatcactgctcttgactgcgctggtcagacttggacataatgaaactataaatgaaggagttcggcgtttccacatcttctttgaagacggcaaaacttcccttcttccaccagatactagaaaggctgcatatcttgccgtgatgcgaactgttagcacctcaagcagatccggttttgatgctctccttaaaatctacagagaagcatctgaaccacaggagaaatcacgtgtcttaggctccctgtcttcatcaccggatcaggatattgttttggaggcattgaactttatgtttactgatgaggtgcggaatcaagattcattttacatccttggtggcattagcttagaaggacgagaaattgcatggacctggttgaaggaaaactgggatcacgtgttgaagacatggaaatcgagttcactcatatcagacttcattgagtccattgtcccacggtttacctccgaggagaaagctgtcgaggttaccgagttctttgctggccaagttaagccatcattcgagagagcactgaagcagagcctggagagggtgcggatcagcgcgagatggatcgagagcattaggagtgagcccaagcttggtcagacagtgcaggagctgctgcaggccgatgcgtaaacatgtggcctggaaggtagcggttcctcagtgtgatcatctcatacgggctgttcgggtcagattaaagtcggttgtttagattgctgcagttataatctatagagataaacattgtagaaacagtagaagtcggtataaattaaacctaaacgaccaggcctataaattcttgaaaaggttcaggtgggcttattctacattgtattggcagttgcttgcgtatgatttgttgagggaaaaaactgatgcaatgacgtttgtttcaaagagtggtgtactgagtccatgattattattatttttatattattgacagtagtaaag

SEQ ID NO: 206657 - DNA, 2237 bp, Zea Mays
aatttccaccccttcgtcagccccttgaccaccgttccaaccctctcccatcgcgtcgcctcgaaggaagcgcggctgatcctgctccaagcctccaaccctagcttccccgctccccaccttcctccgtccggggctcatggcggagatcgaggtggtatccgaaggcggcaggcgggacgaggacgaggagcggcggcggcagcagcagcaaggcgcgggggagccggaccccgtggtggacgtgtactctgcggcggcgtatggggacctggagcggctccgcggtttcgtggagcaggggggagccgccaccgcgctcagggagcccgacggcaacggctaccacgcgctccagtgggccgcgctcaacaactacccccacgtcgcgctctacatcgtcgagcacggtggcgacgttaatgcgacggaccacgcgcggcagacggcgctgcactgggcggccgtgcgtgggtccacttccgtggctgacgtgctgatggagcacggagcgagggtcgaggccgccgacgtcaatggcttccggtccacgttgcatctcagtatggccaaacagcattcttgcatcacatcatctcaaagtacggtgcagattttgatgctttggacattgatgggaggagcgctttgcactgggctgcctacaaaggaaatgcagatacaatcagattactgctatttatggatgctaatcaagtaaggcaagacaaaaatggttgtacccctttacattgggctgccataagaggaaatttggaggtttgcacagttcttgtacatactggtactaaggaagagctcacactaaaggatagtggtgggttaactcctgtgcaactggcagcagaaaaaggtcatcgacatctttccaatgtcctttctaatgctacaaaagtaagctttgaagataagtttttccctggaaaatcaaggaaaattggatatgcccctttcttgtttgcttatcttgtcatctgcctcatcctgttcctaaactcaattgtatttgcacctaatttttctaggatcactgctactgctggtctttggtcttgggctgctgtatcacttttctttgcatcacaagtaatgttctacagagttagcagaaaaaatcctggctacatcaaggcaaattccaagcgaattgacccaaaggagccacttatggaaattgatcttaccaattcctctacttggacaggcaattggtctcagctatgccctacttgcaagataattcgacctatgcgctccaaacattgtccaacttgtaagcattgtgttgagcagttcgaccatcactgcccatggatatcaaactgtgttggaaagcgaaataagtgggacttttttgtgtttctttggatggggatagctacatcctttcttggtgctgctgttggattccacagacttcagacagagcctgttatactctcatcttcagaatcgtggatacattttatggtgacaaagcatcctggtgctgtactgttcatgtttcttgatgtctttttgttaactggagctcttattctgactggagcacaagcagtacagatagcacggaacatcacaactaatgaggcagcaaatcgatctcgttacacatatcttcgagggcctgatgggcgtttcagaaatccttacagtcgaggttgccagaggaactgcactgattttcttatcagtggatacagcaatgacgaggaggtcgcatggccaacacttcaacaaacagtacagtgaagatagatgcactggttcatgaaacaaaagtgttattgacagatttaatgcccaagatccctggaaagcttatgctttagcgctccgaatatttcagtttgttcagacactggattgacaatggtgtgaagagcgacctggggtcacattctgagtggcacccttttattataagggtctttagtaagtgctgtcggtcatggaattgtttgatactgtagattgttcgcatgcgtgggtgtgcagcagtatgttttcttttctccggctacatgttttgctaggacaagtcatctattcatgttatcgagatgagtgctgatagtgatagatggtgaatgctggttttctgatctccggtgtagtaagttgaattcacaatcttactccattcacgaaatatacacgggacaactgagcaagtataactgtagagcaaccccagcagaaacacttgaatcagg

SEQ ID NO: 206658 - DNA, 2240 bp, Zea Mays
caaaatttccaccccttcgtcagccccttgaccaccgttccaaccctctcccatcgcgtcgcctcgaaggaagcgcggctgatcctgctccaagcctccaaccctagcttccccgctccccaccttcctccgtccggggctcatggcggagatcgaggtggtatccgaaggcggcaggcgggacgaggacgaggagcggcggcggcagcagcagcaaggcgcgggggagccggaccccgtggtggacgtgtactctgcggcggcgtatggggacctggagcggctccgcggtttcgtggagcaggggggagccgccaccgcgctcagggagcccgacggcaacggctaccacgcgctccagtgggccgcgctcaacaactacccccacgtcgcgctctacatcgtcgagcacggtggcgacgttaatgcgacggaccacgcgcggcagacggcgctgcactgggcggccgtgcgtgggtccacttccgtggctgacgtgctgatggagcacggagcgagggtcgaggccgccgacgtcaatggcttccgggcagtccacgttgcatctcagtatggccaaacagcattcttgcatcacatcatctcaaagtacggtgcagattttgatgctttggacattgatgggaggagcgctttgcactgggctgcctacaaaggaaatgcagatacaatcagattactgctatttatggatgctaatcaagtaaggcaagacaaaaatggttgtacccctttacattgggctgccataagaggaaatttggaggtttgcacagttcttgtacatactggtactaaggaagagctcacactaaaggatagtggtgggttaactcctgtgcaactggcagcagaaaaaggtcatcgacatctttccaatgtcctttctaatgctacaaaagtaagctttgaagataagtttttccctggaaaatcaaggaaaattggatatgcccctttcttgtttgcttatcttgtcatctgcctcatcctgttcctaaactcaattgtatttgcacctaatttttctaggatcactgctactgctggtctttggtcttgggctgctgtatcacttttctttgcatcacaagtaatgttctacagagttagcagaaaaaatcctggctacatcaaggcaaattccaagcgaattgacccaaaggagccacttatggaaattgatcttaccaattcctctacttggacaggcaattggtctcagctatgccctacttgcaagataattcgacctatgcgctccaaacattgtccaacttgtaagcattgtgttgagcagttcgaccatcactgcccatggatatcaaactgtgttggaaagcgaaataagtgggacttttttgtgtttctttggatggggatagctacatcctttcttggtgctgctgttggattccacagacttcagacagagcctgttatactctcatcttcagaatcgtggatacattttatggtgacaaagcatcctggtgctgtactgttcatgtttcttgatgtctttttgttaactggagctcttattctgactggagcacaagcagtacagcacggaacatcacaactaatgaggcagcaaatcgatctcgttacacatatcttcgagggcctgatgggcgtttcagaaatccttacagtcgaggttgccagaggaactgcactgattttcttatcagtggatacagcaatgacgaggaggtcgcatggccaacacttcaacaaacagtacagtgaagatagatgcactggttcatgaaacaaaagtgttattgacagatttaatgcccaagatccctggaaagcttatgctttagcgctccgaatatttcagtttgttcagacactggattgacaatggtgtgaagagcgacctggggtcacattctgagtggcacccttttattataagggtctttagtaagtgctgtcggtcatggaattgtttgatactgtagattgttcgcatgcgtgggtgtgcagcagtatgttttcttttctccggctacatgttttgctaggacaagtcatctattcatgttatcgagatgagtgctgatagtgatagatggtgaatgctggttttctgatctccggtgtagtaagttgaattcacaatcttactccattcacgaaatatacacgggacaactgagcaagtataactgtagagcaaccccagcagaaacacttgaatcagg

SEQ ID NO: 206659 - DNA, 2219 bp, Zea Mays
ccaaaatttccaccccttcgtcagccccttgaccaccgttccaaccctctcccatcgcgtcgcctcgaaggaagcgcggctgatcctgctccaagcctccaaccctagcttccccgctccccaccttcctccgtccggggctcatggcggagatcgaggtggtatccgaaggcggcaggcgggacgaggacgaggagcggcggcggcagcagcagcaaggcgcgggggagccggaccccgtggtggacgtgtactctgcggcggcgtatggggacctggagcggctccgcggtttcgtggagcaggggggagccgccaccgcgctcagggagcccgacggcaacggctaccacgcgctccagtgggccgcgctcaacaactacccccacgtcgcgctctacatcgtcgagcacggtggcgacgttaatgcgacggaccacgcgcggcagacggcgctgcactgggcggccgtgcgtgggtccacttccgtggctgacgtgctgatggagcacggagcgagggtcgaggccgccgacgtcaatggcttccgggcagtccacgttgcatctcagtatggccaaacagcattcttgcatcacatcatctcaaagtacggtgcagattttgatgctttggacattgatgggaggagcgctttgcactgggctgcctacaaaggaaatgcagatacaatcagattactgctatttatggatgctaatcaagtaaggcaagacaaaaatggttgtacccctttacattgggctgccataagaggaaatttggaggtttgcacagttcttgtacatactggtactaaggaagagctcacactaaaggatagtggtgggttaactcctgtgcaactggcagcagaaaaagtctaatgctacaaaagtaagctttgaagataagtttttccctggaaaatcaaggaaaattggatatgcccctttcttgtttgcttatcttgtcatctgcctcatcctgttcctaaactcaattgtatttgcacctaatttttctaggatcactgctactgctggtctttggtcttgggctgctgtatcacttttctttgcatcacaagtaatgttctacagagttagcagaaaaaatcctggctacatcaaggcaaattccaagcgaattgacccaaaggagccacttatggaaattgatcttaccaattcctctacttggacaggcaattggtctcagctatgccctacttgcaagataattcgacctatgcgctccaaacattgtccaacttgtaagcattgtgttgagcagttcgaccatcactgcccatggatatcaaactgtgttggaaagcgaaataagtgggacttttttgtgtttctttggatggggatagctacatcctttcttggtgctgctgttggattccacagacttcagacagagcctgttatactctcatcttcagaatcgtggatacattttatggtgacaaagcatcctggtgctgtactgttcatgtttcttgatgtctttttgttaactggagctcttattctgactggagcacaagcagtacagatagcacggaacatcacaactaatgaggcagcaaatcgatctcgttacacatatcttcgagggcctgatgggcgtttcagaaatccttacagtcgaggttgccagaggaactgcactgattttcttatcagtggatacagcaatgacgaggaggtcgcatggccaacacttcaacaaacagtacagtgaagatagatgcactggttcatgaaacaaaagtgttattgacagatttaatgcccaagatccctggaaagcttatgctttagcgctccgaatatttcagtttgttcagacactggattgacaatggtgtgaagagcgacctggggtcacattctgagtggcacccttttattataagggtctttagtaagtgctgtcggtcatggaattgtttgatactgtagattgttcgcatgcgtgggtgtgcagcagtatgttttcttttctccggctacatgttttgctaggacaagtcatctattcatgttatcgagatgagtgctgatagtgatagatggtgaatgctggttttctgatctccggtgtagtaagttgaattcacaatcttactccattcacgaaatatacacgggacaactgagcaagtataactgtagagcaaccccagcagaaacacttgaatcagg

SEQ ID NO: 206660 - DNA, 2285 bp, Zea Mays
gggtgctgtccgtccctttgtcggtggtcgttgttcccaaccaaaatttccaccccttcgtcagccccttgaccaccgttccaaccctctcccatcgcgtcgcctcgaaggaagcgcggctgatcctgctccaagcctccaaccctagcttccccgctccccaccttcctccgtccggggctcatggcggagatcgaggtggtatccgaaggcggcaggcgggacgaggacgaggagcggcggcggcagcagcagcaaggcgcgggggagccggaccccgtggtggacgtgtactctgcggcggcgtatggggacctggagcggctccgcggtttcgtggagcaggggggagccgccaccgcgctcagggagcccgacggcaacggctaccacgcgctccagtgggccgcgctcaacaactacccccacgtcgcgctctacatcgtcgagcacggtggcgacgttaatgcgacggaccacgcgcggcagacggcgctgcactgggcggccgtgcgtgggtccacttccgtggctgacgtgctgatggagcacggagcgagggtcgaggccgccgacgtcaatggcttccgggcagtccacgttgcatctcagtatggccaaacagcattcttgcatcacatcatctcaaagtacggtgcagattttgatgctttggacattgatgggaggagcgctttgcactgggctgcctacaaaggaaatgcagatacaatcagattactgctatttatggatgctaatcaagtaaggcaagacaaaaatggttgtacccctttacattgggctgccataagaggaaatttggaggtttgcacagttcttgtacatactggtactaaggaagagctcacactaaaggatagtggtgggttaactcctgtgcaactggcagcagaaaaaggtcatcgacatctttccaatgtcctttctaatgctacaaaagtaagctttgaagataagtttttccctggaaaatcaaggaaaattggatatgcccctttcttgtttgcttatcttgtcatctgcctcatcctgttcctaaactcaattgtatttgcacctaatttttctaggatcactgctactgctggtctttggtcttgggctgctgtatcacttttctttgcatcacaagtaatgttctacagagttagcagaaaaaatcctggctacatcaaggcaaattccaagcgaattgacccaaaggagccacttatggaaattgatcttaccaattcctctacttggacaggcaattggtctcagctatgccctacttgcaagataattcgacctatgcgctccaaacattgtccaacttgtaagcattgtgttgagcagttcgaccatcactgcccatggatatcaaactgtgttggaaagcgaaataagtgggacttttttgtgtttctttggatggggatagctacatcctttcttggtgctgctgttggattccacagacttcagacagagcctgttatactctcatcttcagaatcgtggatacattttatggtgacaaagcatcctggtgctgtactgttcatgtttcttgatgtctttttgttaactggagctcttattctgactggagcacaagcagtacagatagcacggaacatcacaactaatgaggcagcaaatcgatctcgttacacatatcttcgagggcctgatgggcgtttcagaaatccttacagtcgaggttgccagaggaactgcactgattttcttatcagtggatacagcaatgacgaggaggtcgcatggccaacacttcaacaaacagtacagtgaagatagatgcactggttcatgaaacaaaagtgttattgacagatttaatgcccaagatccctggaaagcttatgctttagcgctccgaatatttcagtttgttcagacactggattgacaatggtgtgaagagcgacctggggtcacattctgagtggcacccttttattataagggtctttagtaagtgctgtcggtcatggaattgtttgatactgtagattgttcgcatgcgtgggtgtgcagcagtatgttttcttttctccggctacatgttttgctaggacaagtcatctattcatgttatcgagatgagtgctgatagtgatagatggtgaatgctggttttctgatctccggtgtagtaagttgaattcacaatcttactccattcacgaaatatacacgggacaactgagcaagtataactgtagagcaaccccagcagaaacacttgaatcagg

SEQ ID NO: 206661 - DNA, 2536 bp, Zea Mays
gtgaggaatccgtccgccccgggatttcgcctccagtggtagcgggagtgccgcgtcgtctttcgctcccaagtgcgacgggaaataaggcacctgtgttcctacttgcaagatctaaagaaggcttctgctgaagagatgcgcagaagtgtttatgcaaattatgctgcattcatcaaaacatcaaaggagatatcagaccttgaaggggagctactatcagttagaaatttgctaagtacacagtcagctttaattcatggtctgtctgaaggggttcagatagattcgttggccacagggcctgaaggttctgctgaacaagacatatccagtgttgaagatcaggagccatcagaaatatggaaatggtccacagatttccctgacatgcttgatgttctgctagccgaaagaagagtggatgaagcactggatgccttggatgaggcagaacggatcgctgctgatgccaaacaaaagggaactctatccacgactgacattctggctttaaagagggttatatctgaaaaccgtcagaagttggctgatcagctagctgaagctgcttgccagtcttctatttgtggtgttgagcttcgagctgcagcttctgctctcaagagacttggtgatggacctcgtgctcatagtttgttgctcagtgcacacaatcagagacttcagttaaacattcaaacaatacaaccatctagcacatcatatggcggggaatacactgcttctcttgcgcaacaattttttcctgttatagctcaggctctcagtgactcagttgaggtcttcagtgaaaaatcagcttacacatctgaactagttacttgggctactaagcaggcaatgtcattttcgcttcttgtaaagaggcatactttagcctcttgtgctgctggtggggggttaagaactgctgcagaatgtgttaagatagcgattggttattcagacttgctggaagctcgtggtctatcactttcgtcagttctgatgaagcaactcagaccctctgttgagcaagcattagattccaatttgaggagaattgaagagagtactgctgctttagctgcagctgatgactggatactcacctatcctccaactggtatacgtccactggctagatcatctggtaatctggcactccagccgaagctctcaagcagtgctcaccgtttcaattcaatggttcaggatttctttgaggatgttggaccactggttagcttacagctaggtggttccgcgatggatgggcttctgaaaatattcaactcgtatgtaaacttgctgataagtgctctaccagggtcagtggatgatgaagttaacttggaaggtttggggaataagattgttagaatggcagagacagaggaccagcagttagctttgttagctaatgcatctttactagctgaagagttgctaccgagagcagcgatgaagctgtactctatgaacccggtcagcaaagatagcttgcgtagaagaggtcctgaaaaccaaaatcgtgcggcagagcagcgggcatggaaaaggaagctgaaccgcatggtagagaaacttagagatagtttctgcagacagcatgctctagatcttatattcacagaagaaggtgacacccgtctgagcgcagagatgtacatcgatatggataatactgttgaagatcccgaatgggttccatctgcgattttccaggaattgtatgcgaaattgaataagatggcaagcgttgcggcagacatgtttgttggtagggaaaggtttgccacgctgcttatgatgagacttacggaggcagtcatgctttggctctcagacgaccagagcttttgggaagaggttgaagaaggaccaagggctctgggtccggttggacttcagcagttctacctcgatatgcaatttgtgatccttttcgggcaaggtcgtttcttatctcggcatgtgcatcaagtcatattggacatcattgatagagcgatgagagcgttttctgccacggggatggaccctgataggatccttccaagcgacgactggttcatcgacgttgcccaggagagtattagtaggatcggcggcgggagggcacgagtcgccaatggggacagggaggtgaacagccccacagcctccgtgtcagcgcagtccgtgtcgtcagttagatctctcggcagctcctagcgtgcacagtttctgtatcaatattactgtagggatttgtttggatgtgtttgtgctggtacatatgtgtgagtaattaattgtatgcctaggccaagaaaatccttgaagctggtcttgttcacctgttctgagactttgggccggtccacgcatcggcattccctacggtagtggtaggtattgatggaccaaatgtaccggctggtacagccacgggcacaacacgaatcggctatgctattgctagctacgacacggttatagttccgtgacaggtattgtctgctcttataaagctctagttttttttttt

SEQ ID NO: 206662 - DNA, 1186 bp, Zea Mays
gatcgaaccgtttggctggtggggcgcgagcgcgaggtgacgacggcgacgcttcagttgagtgcgggtgtagtgctcctgcgacttcggcctgtccactttttagggggtgccgaggggcgtgggggtacggccgtccgcacaataatctgcgctgcgcggaagaagggaaggggaaaagcagttaagcttgagcgcgcgcgacagggtcaagtcgagggccggggaatcgccggagaatggaggtgggcagggctccgcgacgacgggtgtccccagcggcggcggcggcggctgtgccttcgctgcttctgttcgccgttctattcggggccgggcggcggcgttcggccacctgcaaggcgccggcgcgacggcgctgtacaagcacgcgtcgttcttcgaccgcgatggcgacggcgtcgtctccttctcggagacgtacggcgcgtttcgggcactcgggtttggattcggcctgtccagcgtcagcgctgccctcatcaatggcgcccttggtagcaagtgcagacctcaaaatgcaacgtcatcgaagttggatatctacatagaggacatccagaaagggaaacatggaagcgattcagggtcatacgacgccgaaggaaggtttgttcctgacaagttcgaagagatattcgccaagcacgccaagactgtcccagacgccctgacgtcggacgagatcgaccagctgctgcaggcgaacagagagcccggggactacagcggatgggctggcgctgaagcggagtggaagaccctctacagcctcggcaaggacaaggacggcctcctccgcaaggacgtcgcgagaagcgtctacgacgggacactgttccacatgctcgcgcccaactggaaatctcccgacgaggaggaggaacaggaactaagcgtgatccgggagagctgaaccgagaggtacaagcaaagtctggttgagagataaggactctgggaccctctgaacatgctgtcaagcaacatgtactactagcggtgtgaacgggtggtgtgaacactcttttcatatcacatcataaaaaaaggtgtgaacagatatttcaatgtacattatcataaaataagataaattcataattcaaataaaaatattctgtgtcttaccaaaacaaacgagatacaaaacaactaaaagaaa

SEQ ID NO: 206663 - DNA, 683 bp, Zea Mays
cttcgagattcttgggtaatctttgtggaaagcaaaatgcaacgtcatcgaagttggatatctacatagaggacatccagaaagggaaacatggaagcgattcagggtcatacgacgccgaaggaaggtttgttcctgacaagttcgaagagatattcgccaagcacgccaagactgtcccagacgccctgacgtcggacgagatcgaccagctgctgcaggcgaacagagagcccggggactacagcggatgggctggcgctgaagcggagtggaagaccctctacagcctcggcaaggacaaggacggcctcctccgcaaggacgtcgcgagaagcgtctacgacgggacactgttccacatgctcgcgcccaactggaaatctcccgacgaggaggaggaacaggaactaagcgtgatccgggagagctgaaccgagaggtacaagcaaagtctggttgagagataaggactctgggaccctctgaacatgctgtcaagcaacatgtactactagcggtgtgaacgggtggtgtgaacactcttttcatatcacatcataaaaaaaggtgtgaacagatatttcaatgtacattatcataaaataagataaattcataattcaaataaaaatattctgtgtcttaccaaaacaaacgagatacaaaacaactaaaagaaa

SEQ ID NO: 206664 - DNA, 689 bp, Zea Mays
cagactgtgacaacacaggcctgctgtttgctggctagcaaaatgcaacgtcatcgaagttggatatctacatagaggacatccagaaagggaaacatggaagcgattcagggtcatacgacgccgaaggaaggtttgttcctgacaagttcgaagagatattcgccaagcacgccaagactgtcccagacgccctgacgtcggacgagatcgaccagctgctgcaggcgaacagagagcccggggactacagcggatgggctggcgctgaagcggagtggaagaccctctacagcctcggcaaggacaaggacggcctcctccgcaaggacgtcgcgagaagcgtctacgacgggacactgttccacatgctcgcgcccaactggaaatctcccgacgaggaggaggaacaggaactaagcgtgatccgggagagctgaaccgagaggtacaagcaaagtctggttgagagataaggactctgggaccctctgaacatgctgtcaagcaacatgtactactagcggtgtgaacgggtggtgtgaacactcttttcatatcacatcataaaaaaaggtgtgaacagatatttcaatgtacattatcataaaataagataaattcataattcaaataaaaatattctgtgtcttaccaaaacaaacgagatacaaaacaactaaaagaaa

SEQ ID NO: 206665 - DNA, 707 bp, Zea Mays
aaattatcatcataaatataaaaaaacaatggtcaaaagtcaggagtatgttttatttctgaattacgatgaagtccatttctgccaaccaaaggggctgtaggagttggtaatcccgtcgaatcggattcgcgggccccaggggccactcagccagtactcaatgactaaagtgccctcccaagttccgcaattcacgcgcgaagtcattctcgtaatctcgtccaaaatgtcgcacaagcactgtttcgtccttcgtattgcccttcctatagccgcacgcatggcgaaccgaagcgaagccaaaacgcccattccccttcgccctcttcgaccctagcaagaagacggcggcggagatggtgtactacgcgcttttggtgggcgcagagctggacggcctcaccaacctgcagcccagcggcggctgcgacgaccccagcttcccctactacctcaagctcaagtgcgagaactgcggggaggtcaccgccaagtccacctacgtcactctcagcgagcaagtcgacctgcccaagggacatggcaccgctcacctcgtccagaagtgcaagctttgtgggagagatggaacaattgtgatgattcctggtcaggggacgccacttactattgagcagagccagaaagaagagaagacttgtttgatggtgtttgactgcagaggctatgaacctgtgcatggg

SEQ ID NO: 206666 - DNA, 3489 bp, Zea Mays
gcgtgtcgcgcccgtcgccaaacaaacaccggctggcaccacgacgcgcgcgccgagctcaccggcgagccaacagccactgccttctgctcgcccccgatcgcggacgggacagcgcgctcgccgcagtgcatgcgtgcgtctgcgcctttgcgtcctgcccggctgccccctgaggcctggcctgcagctagctccaaagcagcaggcgcgctcccgcccggtccgcgacccggcgcggcgagcatgcatgagcgtgcacacatgcctgcctgccgccccgcgttccgaaccgactcccccctctaacatccagcgagccggcctcggtctgttcccaagcggctgattcgtctgggttgcccactgctgcccgcggccatggatcagcagcggaagagcagcctcaggtcgtacgggtccaacgcctcgtcccagtcagggtccttcgacttcaaccacgaccaggacacggaacgcgccggccagcccggcggcgacgaccgccgggaggtcgtcgtcaagatcgacgccgagccgcactcgccggtctccctccacgcggccggcggcgtgtccgggcacagctccgcggccagcacgccgcgggccggtggcgcggcggtgcgcattctcgcgccgtctgcgtccgggtcgagcgcgtcgacttccagcgtcggaggcgacgcgtccggctccggcgaatcgttcagcttcaggaaacgcccgccgcagtctccggccggcggggactccggcgaggatccgccgagccgcctcatcggcagcttcctccggaagcaggcggcggccggcggcgagctgtccctcgaccccgacttcgaggtggaggagatgagaaggccgccacgcgcgccgacgtctgtcaacgcctccagggagctgcgcgtctcgttccaggacccccggaaacggatgtccccgtccacgtcgtccgcgtcgtcctcctcctacggcgccggcggcgacagccggaaccagagcaccatcgacgtggacgctgccgaggtgctgcgctgcacgtcgacgtccaccggttcctccctgctggcgcgcagcaggacgcgatctcggctgatggatcccccgccaccgtcgacgtcgtcgagtgcccccgccaacgagggggatccccgaaagtcatttgtctcgaaggggctgccgcccaagtccggtcagctccggtcgggtcttatcggcaagtcggggctcatcggcaagtcggggcccatcggcaagacaggtgcgttcgacgatgaggacgacgacccgttcatggacgagggcatgacctcggacttcaagcgcgacacgatggattgccttctcatcatggagtgggtcagcctggtggtcatcgtgggcgcgctcatctgcagcgtcaccatacccagcctgtcggtaaagaagctctcggggctccacctctggaagtgggagctcctcgtgttcgtgctcatctgcggccgcctcgtctctggctgggtgatccgcatcgcagtcttcttcgtcgagcgcaacttccttctgcggaagaaggtgctctacttcgtgtacggcgtgcgccgcgccgtgcgcaacgtgctctggctgggtgtggcgctcgtgtcctggcacctcctgttcgacaaggccgccaagcgggagacgcacacgctggtgctgccctacgtcaccaaggtgctgtgctgcctcctcgtggccaccgtgatccgcctcgtgaagacgctgctgctaaaggtgctcgcctcgtccttccacgtctcctcctacttcgacaggatccaggaagcgctcttcaaccagtacgtcatcgagaccctctccggcccgccgctagtagacgagagccggatgatggctgaggtgcagaggctccagagcgcgggagcatccatccccagtgagctcgaagcgacagcgatgccgggcaagtcccggccactgcccaagagtgggcgcctcacgacggtcgcgtccaagcgaggaggaggaggagcagcagcagccagcaagcagctgcataggcagaaaaccgagcgccatttggatgacggcatctcgattgaccagcttcacaagctcagccagaagaacatctccgcgtggagcatgaagaggctgatgaagatcgtcaggtacggggcgctgacaaccatggacgagcagctcaagcatgcaacaggcgaggacgagctggcgacagagatacacagcgagtacgaggccaaggttgcggccaagaggatcttccagaacgtcgccaagcctggatccaagaagaagctctgaaggcgatggatctcttcgaaggagcgcaggagcacaacagggtcagcaagaggtcgctcaagaactgggtggtaaacgcgttcagagagcgcaaggctcttgcgctgacgctcaacgacaccaagaccgcggtgaacaagctgcaccagatggccaacgtcgtggtcgcgctgatcgtgctcgcgctctggcttctcatcctgggcatcgcgacgtccaagttcttcgtcctgctcagctcgcagctcctcgtggcggtgttcatgttcgggaacacgctcaggaccatcttcgaggcgatcgtgttcctgttcgtgatgcaccctttcgacgtcggcgaccggtgcgaggtcgacgggatgcaggtggtcgtggaggagatgaacatcatgacgacgatcttcctccgatacgacaacctcaaggtgtactacccgaacagccagttagcccagctaccgatcatgaattactacaggagccctgacatgggagattcggtggacttctccgtccatgtcgcaacaccggtggagaaactgtccctcatgaaggagaggctattgcattaccttgacaacaagaaggagcactggtaccctggctccatggtcgtcctgcgcgacgtggacgacacgaacaagctgaaggtctccatctggtgccgccagacgatcaacttccacgacatggggatgaggttcgagcggagggagctgctgctccaggagatgatcaaggtcttgagagacctcgagatcgagtaccggatgctgccgctcgacgtcaacgtccggagcgcgccgaccatccagtcctcgaggatgccggcgacatggacgtttaactactgagatcttggctggatagtggataccatcaggcttgttgtgagattgtgctgctagaggtagtagtagtagtagttcctgagtgagtgttgagctgtgacagcgtgctgatgagatgcaacaggtttttgctgtcgctgcagccatcacttgctcttcccgccctgtagttgttgtgttgttggtccatactccgtagtttggtgcttgtaattagggaacttcttctgctacagaataactttgttggattatctagcttacttcaaagattaaacttctgaagttattacatcaaaatatgccatgtccgtttcgaaacaaa

SEQ ID NO: 206667 - DNA, 3572 bp, Zea Mays
gtatataagtactcacgcgaggctcccccgcgctcccgtaaacgcgtgtcgcgcccgtcgccaaacaaacaccggctggcaccacgacgcgcgcgccgagctcaccggcgagccaacagccactgccttctgctcgcccccgatcgcggacgggacagcgcgctcgccgcagtgcatgcgtgcgtctgcgcctttgcgtcctgcccggctgccccctgaggcctggcctgcagctagctccaaagcagcaggcgcgctcccgcccggtccgcgacccggcgcggcgagcatgcatgagcgtgcacacatgcctgcctgccgccccgcgttccgaaccgactcccccctctaacatccagcgagccggcctcggtctgttcccaagcggctgattcgtctgggttgcccactgctgcccgcggccatggatcagcagcggaagagcagcctcaggtcgtacgggtccaacgcctcgtcccagtcagggtccttcgacttcaaccacgaccaggacacggaacgcgccggccagcccggcggcgacgaccgccgggaggtcgtcgtcaagatcgacgccgagccgcactcgccggtctccctccacgcggccggcggcgtgtccgggcacagctccgcggccagcacgccgcgggccggtggcgcggcggtgcgcattctcgcgccgtctgcgtccgggtcgagcgcgtcgacttccagcgtcggaggcgacgcgtccggctccggcgaatcgttcagcttcaggaaacgcccgccgcagtctccggccggcggggactccggcgaggatccgccgagccgcctcatcggcagcttcctccggaagcaggcggcggccggcggcgagctgtccctcgaccccgacttcgaggtggaggagatgagaaggccgccacgcgcgccgacgtctgtcaacgcctccagggagctgcgcgtctcgttccaggacccccggaaacggatgtccccgtccacgtcgtccgcgtcgtcctcctcctacggcgccggcggcgacagccggaaccagagcaccatcgacgtggacgctgccgaggtgctgcgctgcacgtcgacgtccaccggttcctccctgctggcgcgcagcaggacgcgatctcggctgatggatcccccgccaccgtcgacgtcgtcgagtgcccccgccaacgagggggatccccgaaagtcatttgtctcgaaggggctgccgcccaagtccggtcagctccggtcgggtcttatcggcaagtcggggctcatcggcaagtcggggcccatcggcaagacaggtgcgttcgacgatgaggacgacgacccgttcatggacgagggcatgacctcggacttcaagcgcgacacgatggattgccttctcatcatggagtgggtcagcctggtggtcatcgtgggcgcgctcatctgcagcgtcaccatacccagcctgtcggtaaagaagctctcggggctccacctctggaagtgggagctcctcgtgttcgtgctcatctgcggccgcctcgtctctggctgggtgatccgcatcgcagtcttcttcgtcgagcgcaacttccttctgcggaagaaggtgctctacttcgtgtacggcgtgcgccgcgccgtgcgcaacgtgctctggctgggtgtggcgctcgtgtcctggcacctcctgttcgacaaggccgccaagcgggagacgcacacgctggtgctgccctacgtcaccaaggtgctgtgctgcctcctcgtggccaccgtgatccgcctcgtgaagacgctgctgctaaaggtgctcgcctcgtccttccacgtctcctcctacttcgacaggatccaggaagcgctcttcaaccagtacgtcatcgagaccctctccggcccgccgctagtagacgagagccggatgatggctgaggtgcagaggctccagagcgcgggagcatccatccccagtgagctcgaagcgacagcgatgccgggcaagtcccggccactgcccaagagtgggcgcctcacgacggtcgcgtccaagcgaggaggaggaggagcagcagcagccagcaagcagctgcataggcagaaaaccgagcgccatttggatgacggcatctcgattgaccagcttcacaagctcagccagaagaacatctccgcgtggagcatgaagaggctgatgaagatcgtcaggtacggggcgctgacaaccatggacgagcagctcaagcatgcaacaggcgaggacgagctggcgacagagatacacagcgagtacgaggccaaggttgcggccaagaggatcttccagaacgtcgccaagcctggatccaagcacatatacctgtcagatttgatgcgtttcatgaggcaggaagaagctctgaaggcgatggatctcttcgaaggagcgcaggagcacaacagggtcagcaagaggtcgctcaagaactgggtggtaaacgcgttcagagagcgcaaggctcttgcgctgacgctcaacgacaccaagaccgcggtgaacaagctgcaccagatggccaacgtcgtggtcgcgctgatcgtgctcgcgctctggcttctcatcctgggcatcgcgacgtccaagttcttcgtcctgctcagctcgcagctcctcgtggcggtgttcatgttcgggaacacgctcaggaccatcttcgaggcgatcgtgttcctgttcgtgatgcaccctttcgacgtcggcgaccggtgcgaggtcgacgggatgcaggtggtcgtggaggagatgaacatcatgacgacgatcttcctccgatacgacaacctcaaggtgtactacccgaacagccagttagcccagctaccgatcatgaattactacaggagccctgacatgggagattcggtggacttctccgtccatgtcgcaacaccggtggagaaactgtccctcatgaaggagaggctattgcattaccttgacaacaagaaggagcactggtaccctggctccatggtcgtcctgcgcgacgtggacgacacgaacaagctgaaggtctccatctggtgccgccagacgatcaacttccacgacatggggatgaggttcgagcggagggagctgctgctccaggagatgatcaaggtcttgagagacctcgagatcgagtaccggatgctgccgctcgacgtcaacgtccggagcgcgccgaccatccagtcctcgaggatgccggcgacatggacgtttaactactgagatcttggctggatagtggataccatcaggcttgttgtgagattgtgctgctagaggtagtagtagtagtagttcctgagtgagtgttgagctgtgacagcgtgctgatgagatgcaacaggtttttgctgtcgctgcagccatcacttgctcttcccgccctgtagttgttgtgttgttggtccatactccgtagtttggtgcttgtaattagggaacttcttctgctacagaataactttgttggattatctagcttacttcaaagattaaacttctgaagttattacatcaaaatatgccatgtccgtttcgaaacaaa

SEQ ID NO: 206668 - DNA, 820 bp, Zea Mays
gagaagtgctgctttggcttaccaagcagaaaagaggtgtctcatatcggtgattcagcagctagctctcgattttggggcaatcaagaggtgaaattgcgaagaacatgagtaccacaactgccaagggaaaaggagaacctcaaaatgcaaatgatgcaccactcgatgttcagcccttaacaatagcgtatccgggggaaccagtggtctgcacaccaagacccatcgtgtcgcatcctgcatataatggtggatggaaggttctccgccacatcaggccaaatggaagatctgatttcacattcattcatcaaacccatggcaaattccgctccaaaaaacaagttcttaatcatctgaattgtctgttgaggggaaaggggaaggattcagcagatgaggctaagcagggttgtggcgctaatcagcaagctcaaggaatgggtggtgctccatcaagtgctagtcttctattggctgaaggaaaacctcctacagtgacgatgatgaatcaaccagctgaataaagttgcgctacatctgctagtaattcagtcagcggaatgagcaatgaatcatgctgaaggaagttgtgctagctgtatcttctagctattcaatcagtggaattggtggtacctagactattaaaaaacaatgttaactcatttaattttaaggacccaacagtaagatttgttatgttgatgtgtgtactagcatatatattcccagtattgttgctgcttctcacaatgttgttgacgctctaaatgctagtaatattgcaccacaattaattttgtgttaaacattt

SEQ ID NO: 206669 - DNA, 859 bp, Zea Mays
tattgctccaataatatgtgaagatgatggaggttgtgtgataaaagaagatcatacggttattgcacaaaagaggtgtctcatatcggtgattcagcagctagctctcgattttggggcaatcaagaggtgaaattgcgaagaacatgagtaccacaactgccaagggaaaaggagaacctcaaaatgcaaatgatgcaccactcgatgttcagcccttaacaatagcgtatccgggggaaccagtggtctgcacaccaagacccatcgtgtcgcatcctgcatataatggtggatggaaggttctccgccacatcaggccaaatggaagatctgatttcacattcattcatcaaacccatggcaaattccgctccaaaaaacaagttcttaatcatctgaattgtctgttgaggggaaaggggaaggattcagcagatgaggctaagcagggttgtggcgctaatcagcaagctcaaggaatgggtggtgctccatcaagtgctagtcttctattggctgaaggaaaacctcctacagtgacgatgatgaatcaaccagctgaataaagttgcgctacatctgctagtaattcagtcagcggaatgagcaatgaatcatgctgaaggaagttgtgctagctgtatcttctagctattcaatcagtggaattggtggtacctagactattaaaaaacaatgttaactcatttaattttaaggacccaacagtaagatttgttatgttgatgtgtgtactagcatatatattcccagtattgttgctgcttctcacaatgttgttgacgctctaaatgctagtaatattgcaccacaattaattttgtgttaaacattt

SEQ ID NO: 206670 - DNA, 1094 bp, Zea Mays
ctcggtctcggccatggaggccgcaagcaatcaggagccggggagatgcggcggcgacgacgacgaggcgaagaggagggaggcagagcttgcgtcaagcaggctcctcgacccggggttcaagccctccaaactatcccaggaccggctcgacaagtttaaggaattacacaagaaacggttacagataactgaaaagccgaagtataaaagaaaaccgaaaggaaccactgagagaagtatcaaagtaaccagcaattataaattcactgataaggatgcatctgctgatagttctccaagagatgtgcatcatatgtcatcagttacaggaattcaaggggcttgacattaaagaacgatgggaaagaaaggcaaacatgtaaaaatatctgaagatccaacaacaaaagcatatccacaccgcactcatttgaaatttgaaagctgagggacaaaacaaagcggccgaccttttccacggatcatcatgttgctggtaaaggtttgtcagctagcagaactgatcagtaagctagtatctaatttttcagtgttttgtctaacgttttctccagacgtttggttgggactttgctctgttgtattgtccgatccaaacttgcaaagttcaagtgcgatgataatttgtttattgctgtgtgatatagtttgggtttgtttgtcctctttttgtgtgagaaaaggtactgatggtgcaacacaggcccatgtgcacaatggaacatagttgttgctgatgatactagtgtatatagaagattatttctcatatgcttctcgcaacttgctggtgcggcttgtttacaagaatgaagcaggtgaaggcaaatcgtgcaataagttatcgacggaccgcatacagatctcgcccccaggatgtgcccatttttaaatcctcgagcgcctttggcctggtccatctgggaccttttgcgatggtttccgttcgtactatgctgtcctgtcaacgcaagtactatatatatgtacttgaagttgtatctgcaaacttgccagcgaagtggtggtgtataaaaaaaataaagatttgattaaatgcttcacgtttg

SEQ ID NO: 206671 - DNA, 1164 bp, Zea Mays
gcccaacccacctgctctctctctctctcgggcgctctcggtctcggccatggaggccgcaagcaatcaggagccggggagatgcggcggcgacgacgacgaggcgaagaggagggaggcagagcttgcgtcaagcaggctcctcgacccggggttcaagccctccaaactatcccaggaccggctcgacaagtttaaggaattacacaagaaacggttacagataactgaaaagccgaagtataaaagaaaaccgaaagtatcaaagtaaccagcaattataaattcactgataaggatgcatctgctgatagttctccaagagatgtgcatcatatgtcatcagttacaggaattcaaggggatcctgcatcaggcctgtcctcgaggaacaaaaggaaactacattgggggcttgacattaaagaacgatgggaaagaaaggcaaacatgtaaaaatatctgaagatccaacaacaaaagcatatccacaccgcactcatttgaaatttgaaagctgagggacaaaacaaagcggccgaccttttccacggatcatcatgttgctggtaaaggtttgtcagctagcagaactgatcagtaagctagtatctaatttttcagtgttttgtctaacgttttctccagacgtttggttgggactttgctctgttgtattgtccgatccaaacttgcaaagttcaagtgcgatgataatttgtttattgctgtgtgatatagtttgggtttgtttgtcctctttttgtgtgagaaaaggtactgatggtgcaacacaggcccatgtgcacaatggaacatagttgttgctgatgatactagtgtatatagaagattatttctcatatgcttctcgcaacttgctggtgcggcttgtttacaagaatgaagcaggtgaaggcaaatcgtgcaataagttatcgacggaccgcatacagatctcgcccccaggatgtgcccatttttaaatcctcgagcgcctttggcctggtccatctgggaccttttgcgatggtttccgttcgtactatgctgtcctgtcaacgcaagtactatatatatgtacttgaagttgtatctgcaaacttgccagcgaagtggtggtgtataaaaaaaataaagatttgattaaatgcttcacgtttg

SEQ ID NO: 206672 - DNA, 1124 bp, Zea Mays
caacagaccgctaagcccaacccacctgctctctctctctctcgggcgctctcggtctcggccatggaggccgcaagcaatcaggagccggggagatgcggcggcgacgacgacgaggcgaagaggagggaggcagagcttgcgtcaagcaggctcctcgacccggggttcaagccctccaaactatcccaggaccggctcgacaagtttaaggaattacacaagaaacggttacagataactgaaaagccgaagtataaaagaaaaccgaaagttctccaagagatgtgcatcatatgtcatcagttacaggaattcaaggggatcctgcatcaggcctgtcctcgaggaacaaaaggaaactacattgggggcttgacattaaagaacgatgggaaagaaaggcaaacatgtaaaaatatctgaagatccaacaacaaaagcatatccacaccgcactcatttgaaatttgaaagctgagggacaaaacaaagcggccgaccttttccacggatcatcatgttgctggtaaaggtttgtcagctagcagaactgatcagtaagctagtatctaatttttcagtgttttgtctaacgttttctccagacgtttggttgggactttgctctgttgtattgtccgatccaaacttgcaaagttcaagtgcgatgataatttgtttattgctgtgtgatatagtttgggtttgtttgtcctctttttgtgtgagaaaaggtactgatggtgcaacacaggcccatgtgcacaatggaacatagttgttgctgatgatactagtgtatatagaagattatttctcatatgcttctcgcaacttgctggtgcggcttgtttacaagaatgaagcaggtgaaggcaaatcgtgcaataagttatcgacggaccgcatacagatctcgcccccaggatgtgcccatttttaaatcctcgagcgcctttggcctggtccatctgggaccttttgcgatggtttccgttcgtactatgctgtcctgtcaacgcaagtactatatatatgtacttgaagttgtatctgcaaacttgccagcgaagtggtggtgtataaaaaaaataaagatttgattaaatgcttcacgtttg

SEQ ID NO: 206673 - DNA, 2510 bp, Zea Mays
ggagaactcatgatactcacatctatagatgattttgcaaattcagacagtaactgtagcaccgacgtatactgtatacacacacaaaaaaaaaactttccgtttctgatttccgtacaaggggtacaacgacattccaatccgaatactccgacactgccctactttttgtggttagcgcaagggtcagtgttctaggttggttgcttcagtatcactacttttcctagagctgggccacatagccatgtgcaggcaggagtgttgctagtagccctgccagtgtactacagactcgataggtggccataaaagaggagagccaataagcacaatggcgcctgaagagaggatgaagacagaggccagtcacaaggcgatagcagcaggtggtggcaagatgacggtgctccactctccggttggagttaggagcatcgtgacctccttggtggctttcttcatcctagccagctccatcgtgttcctcctcgacagaggccaggaagagcaagtgcaagtggcagtcgagcatggacgccaagaagtgcaggtgaagctggaatccgggctgcaagaaccggcgataagagggacaacccaagagggggacgccagcaacgaggagtgcaactggtccaggggaaggtgggtgtacgacaacgtgtcccgcccattgtacagcgggctcaagtgctccttcatcttccccgaggtggcctgtgacaagtatggcaggaaggatgccatgtaccagcactggagatggcagcctcatggtcatggatgcgacctcccaagatttgatgccatcaagctgcttgaaaatctgagaaacaagagaatggtgtttgtgggcgactcagtcaacaggaaccaatgggtctctctcgtgtgcatggtggaggcctcaatacctgacgacaggctcaagatacgcaccttcaatggctcactcatctccttcaaggcattggaatacaacgcaacgatagatttctactggtcaccactactggtggaatctaacagcgacaaccccattatccaccgggtggagtaccggatcataagggcagacagaattgagaagcatgccagtgtctggagggatgccgacatcattgtcttcaattcttacctgtggtggaggaagcagaaggatgacatgaggatgaaggtcatgtatggttcattcgaagatggtgatgcaaagttagacgagatggaaatggtcgatggtttcgagatagctctcaagaaactaaccgaatggctgggggagaatattgacaagaacaagactaggatatttttcgcaggatcgtcaccaacacattcctgggctagcaactggggtggagaagacaagaacaagtgccttaacgaaacagagccgatctacaaaaccggatacaaagctgcaactacagactacagcttgatggccaaagctaagcactactttcgaacattggagccgaaaggcatacatgttcagatactgaacatcaccgagctgtctgactaccgcaaggacgggcatcctacggtgtacaggaaacagtttgctcctctgacgaaagagcaaatcgcagacccagccagttacgcggattgcacgcactggtgcctccccggagttccagatgtctggaacgagtttttatatggctacctcgtgcaaaaatgatgtacaaaactgtcagtcaggttccagttgtcgtcggcccgccgcaccgcgtgcaggaccaccccgccatggccaccggacaccctcgccggcgcgtcgcgcagttacaggctacagctactacctggaaggccaggccagccccagcccatgcagtaacacttggatgatgtggcccgacaacggcccaagtttaacggtctcaaagcttagaggcctcacattgccaaaattatgaataaccgaaatggtacaagtttcttatatatgaaacgcggttcaaaacacggcttctagggctatccacgtcgacttttattttttcagccgttagattcacaatcgaaggacaagcaaacgcgatgtcgtttctatcctccacagatgacacgatgtttccagaaatcgcttcttctttccttcctctgggcatctctctcccgaggctacgggcctacggcttcgatgttaagccagtggagttcctccgcagctgacggcgatggcggagaccacctgcttctccgtgttacgccacagatcttggctgccacggtctcgcgcttgccgactgtaatacccaatttgtaaattgtaagaaataatacaaatggagaaaacaatttctccttatgtgagtttaacctttgtgcatcatcacatgtgtacaccctaggtataaacaaataattaataccctaaaagccacaaaaatatgtatcatgttggttttcattttggtgtgcattttgtgacaacataaaaggacaagaaatatattaaagcccaagtggaatttagaatctaaaagaaattc

SEQ ID NO: 206674 - DNA, 1357 bp, Zea Mays
ggagaactcatgatactcacatctatagatgattttgcaaattcagacagtaactgtagcaccgacgtatactgtatacacacacaaaaaaaaaactttccgtttctgatttccgtacaaggggtacaacgacattccaatccgaatactccgacactgccctactttttgtggttagcgcaagggtcagtgttctaggttggttgcttcagtatcactacttttcctagagctgggccacatagccatgtgcaggcaggagtgttgctagtagccctgccagtgtactacagactcgataggtggccataaaagaggagagccaataagcacaatggcgcctgaagagaggatgaagacagaggccagtcacaaggcgatagcagcaggtggtggcaagatgacggtgctccactctccggttggagttaggagcatcgtgacctccttggtggctttcttcatcctagccagctccatcgtgttcctcctcgacagaggccaggaagagcaagtgcaagtggcagtcgagcatggacgccaagaagtgcaggtgaagctggaatccgggctgcaagaaccggcgataagagggacaacccaagagggggacgccagcaacgaggagtgcaactggtccaggggaaggtgggtgtacgacaacgtgtcccgcccattgtacagcgggctcaagtgctccttcatcttccccgaggtggcctgtgacaagtatggcaggaaggatgccatgtaccagcactggagatggcagcctcatggtcatggatgcgacctcccaagatttgatgccatcaagctgcttgaaaatctgagaaacaagagaatggtgtttgtgggcgactcagtcaacaggaaccaatgggtctctctcgtgtgcatggtggaggcctcaatacctgacgacaggctcaagatacgcaccttcaatggctcactcatctccttcaaggcattggaatacaacgcaacgatagatttctactggtcaccactactggtggaatctaacagcgacaaccccattatccaccgggtggagtaccggatcataagggcagacagaattgagaagcatgccagtgtctggagggatgccgacatcattgtcttcaattcttacctgtggtggaggaagcagaaggatgacatgaggatgaaggtatggttcattcgaagatggtgatgcaaagttagacgagatggaaatggtcgatggtttcgagatagctctcaagaaactaaccgaatggctgggggagaatattgacaagaacaagactaggatatttttcgcaggatcgtcaccaacacattcctgtgttcacatatgttactt

SEQ ID NO: 206675 - DNA, 1758 bp, Zea Mays
ctcccgcctcccctccatcggtgtcctcccgcggtccccctctctctgggaaggcccttggatccctcgatctccaaggccttccttccattgccatcgccatcggcatcaattgttccccgtggtggtcttgtggctctctccggtcgcctgagcaagccacacctagtcggtcacactcccctgatcggcgtcgggcggtcgggttcatttgatgcgcagtgggcccggcgggcatggcgttccacgaagtggagacgtcgcgtcggtgctaagacgtcggggcatggtcggcgcgcagtgacggcggtcggcggctgggtccgatccgtgcatgcatgccctgcgctcttaccctcatcgagtcgtcgctcgaccggtggtgccccctcccccgcgcctgctcggcgcccacaaggtcgcagccacggggaggcgcagagggaaaaggaagatgagctgctttccgtgcttcggtggcggaaagggcaatgacgacgacgacgacgcggagagcccaggtgatgcggccccggcatccaacatggcgccacccgcgatggtgcaggcgcccgccgcatactccccggctcccacggccgctccaacagccgcggctccgcccatgcccggtggcgcgaaccacgcgcacgaggcttccgccgacgagtcgtcgttgcggctcgccatcacggggcaagcgttcgcgttccgcgagctcgccgcggccacagaccatttcacgccatacaacctcgtcggagaaggcggattcttccgggtctacaagggccaactagagaagagcggccagaccgtggccatcaagcagctggacaagcatgggttccaggacaacaatgcgttcctgagcggggtcgccaagctcagcaagctccaccacgagaacctcgtcgacatcattggctactgcgccgacggagaccagcggctgctggtgtacgagtccgtgcccgccggcaccttagaagaccacctgttcgatctgccggcggacaagaaaccgatggactggtgcacgaggatgaaggtggcgcacggcgcggcacaggggctggagtacctgcacgagacagcgaacccgccggtggtgtacggggagttcaaggcctcccacatacttctcgacgagaggtccacgcccaagctctccgacttcgggctcgcgcagctcggccaggcggggggcagcatgccggtggcgtcgcccatgatgggctccttcggctgctgcgcgccggagtacgacaggaccgggcaggccaccatgaagtccgacgtctacagcttcggggtggtgctggtgcagctcatctccgggaggagggccgtcgacaccagcaagccggtggacgagcagaacgttgtcacctgggccatgccgatgttcaaggaccagaagagataccatgagctggttgatccactcataaaaaaggagtacgctgccaaagcgctgaaccaggtggtcgccatggctgcgatgtgcttgcaggaagaggactccgtgcgaccgctgatggccgacgtcgtcatgacgctgggcttcctcacggcgatgccgccggatccaccggcccctgctgctccacctgccgccgcctcggagccgaagaaagacaaagcagaatcggatcattcagactcatcgtcatcttcttcggacgacgaagaggacgaagaggaggaaaccgaggagcaatgataagggcatgcaggttgttgagaaagctgagt

SEQ ID NO: 206676 - DNA, 574 bp, Zea Mays
atgttcagtcgccgtcgcggcgccgcgcgggagcccccagaaaagccgaggaggaggcagcgtacaccttctgcctcgctgcgccggcctcccaatcgatcgaggcggcgcagagcagaggaaaaccccgagccgcaaccctcctcaccgcacagcaactcgagtactcgttctcttccgcatcctcctcctcgtcaactccagtcgtcttcagcccttcaccacaatcaggcccacctcccaccaccacatttcttctcatccaaccgccccgtaggatcacagagaagggggatggcgagcggcggggcggtgagggatgtgggctcgcctgcggagctggaggcggcggtggccggggcgcgggcggtggccgtgcacttctgggcgtcctggtgcgaggcgtccaagcagatggacgaggtcttcgcgcacctcgccgtcgacttcccccacgcagccttcctgcgggttgaagctgaagaacaacctgaaatatcagaggcatatggagttacagcggttccatattttgttttctgcaaggattttgagccttgacccctggcatggg

SEQ ID NO: 206677 - DNA, 1354 bp, Zea Mays
aaacccttctgtcctcccttcgcccggtccaccctctcgcggccgccaggagaagccgccgccacagcaggcgacaaagatgggcaacaaattttgggctcctaagttttagggggggttcgtcaagacccagaagaccaatgcgtacttcaagcgtttccaagtgaagttcaagagaaggcgtgctggtaagacagactacagggcaaggataaggttgattaaccaagacaagaacaagtacaatacacccaaataccgatttattgtgcgatttaccaacaaggacatcattgcacaaatcgtatctgcaagtatcacgggtgatattattcttgctgctgcatattcccgtgagctgccacgatacggtctagaagttggtctgaccaactatgctgcagcctactgcactggtcttcttttggctcgtcgtgttctcaagatccgtgatttggatcaggagtatgagggcaatgttgaggccactggtgaggacttctctgtcgagccagcggaagagaggaggcctttccgtgccctcttagatgtcggccttattaggactactactggaaaccgtgtctttggtgccctcaagggagctttggatggtggtctagatattcctcacagcgataagaggtttgctggcttcaagaaggatgataagcagctggatgctgatatccaccgcaagtacatctatggtctccatgttgctgagtatatgaagaatctggctgacgaggagcccgagaagtaccaggctcacttcagcgagtacatcaagaaggggattgaagccgatgacatggaagctctgtacaagaaggtccatgcggccatccgtgctgatcctagcatggccaagtcaacaaaggcgcaaccaaaggagcacaagaggtacaaccccaagaagttgacctatgagcagagaaaggccagactcgtggaaaggctcaacgccctcaattcctcgggtggtgtcgatgatgatgaggatgacgagtgaagtgctatcctatttggcgatcagaacttgcgcaatggcatttgttgttccctttactcctgtaacaggcatttttttgtttgagattagagctggatatatggggttcacgatgtgctgccggttgaccttgctctttttatccctggattttgtcagtctttgggctgaaacacaaattttggaatctcctcaattcccagggatgaatggacgtgtagctcacatgggacaagatccgcgtcacgtcttctactgaaaacaaaaaaaaaatctgtactctttgaatgaaacagagccacacagcaaccagatgcatgacacacggtcaaatttggg

SEQ ID NO: 206678 - DNA, 612 bp, Zea Mays
cagatgtgagatgtcctagtaaccggaaagtgtggagtgggaacacaagagcaaagtccctgggaagatgcatggatgtggacatgatgcacatgttgctatgctgttgggatctgctaagattcttcaggagcatcgtgatgagttgaagggtacagtagttcttgtcttccaaccagctgaggaaggtggcggtggggccaagaaaatgatagaagacagagctgtggaaaacatagatgccatttttgggcttcatatagctgactctgtgcctattggtgtgctggcatccaggccagggcctattatggctgggagtggattctttgaggccgtaataagtggaaagggaggacatgctgcacttcctcatcacactatagatccgatattggctgcctcaaatgttattgtgagccttcagcaacttgtttctcgagaagctgatcccttggactcacaggttgtgacagttggaaagtttcaaggaggtggagccttcaatgtgatccctgattcggtaactataggtggcaccttccgagcctttctgaaagagagttttaatcaattgaagcagcggattgaagagtgtggactgtcgtgcag

SEQ ID NO: 206679 - DNA, 3067 bp, Zea Mays
ggctactggattcttctctcttctctttctctgagtcgcagcttcggcagctggcggtctggtctacggtctaccactaccactctaccagagaggggatcgatcacacaaacacacccatggcgggctgcgcggcggcgcgcatgttcgcgtacaacgccagcctctgcgcctgcgatccggggtactactactacctcagcagcaacggcaccgcgagctgcatcccgatgccgggcggcgggtggggcgactggcaggtgggctccgtgggcgcgccgaggaaccagagcctctacttcctggagccggtgctctcggtctacgccatccgccgcctcacccagtcccaggccgtgctcctcgaggcgaccctcgcgtcgctcctctgctggatcgccttctgcgccgcagccaggttcggcggccgggacccccgcggggagaagaggctgttccgggcccggtactgggtcagccgcctcgactgcctcttcgacaacagccactgggcgggggatcagcaagtactaaggaaaaggaaaaccgaattgggtggcacattctcagtcgctagcttgatcatcttcactggattattaactgtcctcttgtatcaagccatcaaaaggcgcagccttgagatgcatcgagtcaagccagcaaatgctccggacctgctgtctttcgtgaatgatctcgagttccacatctcaaccatctccagcatgtcctgcactcaagcggttgctcctttgacggtagcaatggggacaccagggttcatggacttcagggtggttcccctgtcaacactgttcacctacagttgcacaaacacgagccacgggccatccattacgctcaggtgcaatggatgccgggtccctccaagagatcactacgtgtcctggcaatttgttgacctgctggggcagccagcaactgctgttggtttccagttcaacctgaccgcaaggcaacatggcaacaatcagcacatgagctttgtgagtggtacaatgaactctgacggttatactgatgatgtcaagttgaagacgttcagggggagggattccaatgttctaaagatccagctgtttcctcagatatacaacaatcttggtaacctgcggctcttgcagccactggttcaagacttcactcaaggatctatgttttctgatgtcagcagcttgaattcctccctgcagaaccctagggatggagtggtgaatactactctctacataagttatctctcagactacattgtggagatcagcaatgagagtgtagtaggcccaggtgagtttcatgaagcaatgtcctttacgcacagattacatttgtagcatctaatggagacgattatctgcagttagtgtactcgcaagtattggtggcctttatgccttcagtgtggcaatttgtctctgcctcatgtctcaagtaagtctttgcaaaaatcggtgttgttgtctgaaagccttgccaacgtttttcattttttttttttttttgccaatgaaactaaatagtccaactttggtttctgcgtctttccatccctttgccattttatttggttccttcacgtccactgtccatttggttgttattcacgcttattctgtggcaccgaaacaaaggaataaccctgagctgtccgtttgtcatagcaagaaaataaaataaaagttatgcaactgcttgtgttattaacacatcatgttttcagtgtgaagcaaggataaagaagcttcgtgacgaggataccagaatgctgaaaattctgagcaaacgacgtgctcagcggaattgggataagctgcggaagtttgtcatgtatacctggggtctaagcaacctagacccatctgatagaacctgtcagcagcctgaaggatcagtgatggattctcggcatatgagaagagaagcaattagacaaggaatctaagacgctaacagtactcatagagttcctgatgaaatggggggaaattgacatagaaagagctgcgagcatccaagcagttcaatatagccttgatcaagacttttagacgcaaagttgacatagccacttcgactcattcagatcccttcctgatatccttcatagatggaccttttgaaattttcccctctgcatagtcgtgttggtccctgaagatttgtcaatgcaaagagcaaaaaaaaaaaagtacagaggcagcagattgtccatgtcggttgcacctgaagctgcagagatagacttctggcatgttcctggtatagctcagctcattcgctagtcaccacccagttttattttctagttggcattacgctataaagtgactaacacgttgtaaacaaacggtacacacacaactagcatcctatcgtgccgtgaatttgcgatttggttactcagctggtgtttggtcaaaacgaatccaatactgacatggaagattacagtcgctaacccaacctgtgttcctatcctgaaacagagatcagttttaataaactggactccgccccctgcatgcatccattttatattgtcgcagtcttgtttcccattttccctctgtcgtatatacactgataataaacactacttatttgtacgtgatgctcgataacgccttcgtagtactgattctagcagctggagagaacctggtaactaaaactaagcacttccgctgacccgacagctggcatattggatctgggatctctctctccactggcactgggcccggtcgctgctagatccagggcaaccagatccctgagcttatttatgtttccagcgttaaagtcgccatgaagggggcgggacaacagaggaaaaagaaccactacatggatacatacatacgcgcgtaccatgggttcgcgtatgtacggaatagagctgacagataaataagtgcacgatcgcgagtactgtctggaaggctataataatccaatctatacaacaattattactactattattaatctaactgcagtcttttcccccgagcagagccttcgtctcgttcctcttctggag

SEQ ID NO: 206680 - DNA, 2715 bp, Zea Mays
ggctactggattcttctctcttctctttctctgagtcgcagcttcggcagctggcggtctggtctacggtctaccactaccactctaccagagaggggatcgatcacacaaacacacccatggcgggctgcgcggcggcgcgcatgttcgcgtacaacgccagcctctgcgcctgcgatccggggtactactactacctcagcagcaacggcaccgcgagctgcatcccgatgccgggcggcgggtggggcgactggcaggtgggctccgtgggcgcgccgaggaaccagagcctctacttcctggagccggtgctctcggtctacgccatccgccgcctcacccagtcccaggccgtgctcctcgaggcgaccctcgcgtcgctcctctgctggatcgccttctgcgccgcagccaggttcggcggccgggacccccgcggggagaagaggctgttccgggcccggtactgggtcagccgcctcgactgcctcttcgacaacagccactgggcgggggatcagcaagtactaaggaaaaggaaaaccgaattgggtggcacattctcagtcgctagcttgatcatcttcactggattattaactgtattattgcagcctcttgtatcaagccatcaaaaggcgcagccttgagatgcatcgagtcaagccagcaaatgctccggacctgctgtctttcgtgaatgatctcgagttccacatctcaaccatctccagcatgtcctgcactcaagcggttgctcctttgacggtagcaatggggacaccagggttcatggacttcagggtggttcccctgtcaacactgttcacctacagttgcacaaacacgagccacgggccatccattacgctcaggtgcaatggatgccgggtccctccaagagatcactacgtgtcctggcaatttgttgacctgctggggcagccagcaactgctgttggtttccagttcaacctgaccgcaaggcaacatggcaacaatcagcacatgagctttgtgagtggtacaatgaactctgacggttatactgatgatgtcaagttgaagacgttcagggggagggattccaatgttctaaagatccagctgtttcctcagatatacaacaatcttggtaacctgcggctcttgcagccactggttcaagacttcactcaaggatctatgttttctgatgtcagcagcttgaattcctccctgcagaaccctagggatggagtggtgaatactactctctacataagttatctctcagactacattgtggagatcagcaatgagagtgtagtaggcccagttagtgtactcgcaagtattggtggcctttatgccttcagtgtggcaatttgtctctgcctcatgtctcaatgtgaagcaaggataaagaagcttcgtgacgaggataccagaatgctgaaaattctgagcaaacgacgtgctcagcggaattgggataagctgcggaagtttgtcatgtatacctggggtctaagcaacctagacccatctgatagaacctgtcagcagcctgaaggatcagtgatggattctcggcatatgagaagagaagcaattagacaaggaatctaagacgctaacagtactcatagagttcctgatgaaatggggggaaattgacatagaaagagctgcgagcatccaagcagttcaatatagccttgatcaagacttttagacgcaaagttgacatagccacttcgactcattcagatcccttcctgatatccttcatagatggaccttttgaaattttcccctctgcatagtcgtgttggtccctgaagatttgtcaatgcaaagagcaaaaaaaaaaaagtacagaggcagcagattgtccatgtcggttgcacctgaagctgcagagatagacttctggcatgttcctggtatagctcagctcattcgctagtcaccacccagttttattttctagttggcattacgctataaagtgactaacacgttgtaaacaaacggtacacacacaactagcatcctatcgtgccgtgaatttgcgatttggttactcagctggtgtttggtcaaaacgaatccaatactgacatggaagattacagtcgctaacccaacctgtgttcctatcctgaaacagagatcagttttaataaactggactccgccccctgcatgcatccattttatattgtcgcagtcttgtttcccattttccctctgtcgtatatacactgataataaacactacttatttgtacgtgatgctcgataacgccttcgtagtactgattctagcagctggagagaacctggtaactaaaactaagcacttccgctgacccgacagctggcatattggatctgggatctctctctccactggcactgggcccggtcgctgctagatccagggcaaccagatccctgagcttatttatgtttccagcgttaaagtcgccatgaagggggcgggacaacagaggaaaaagaaccactacatggatacatacatacgcgcgtaccatgggttcgcgtatgtacggaatagagctgacagataaataagtgcacgatcgcgagtactgtctggaaggctataataatccaatctatacaacaattattactactattattaatctaactgcagtcttttcccccgagcagagccttcgtctcgttcctcttctggag

SEQ ID NO: 206681 - DNA, 1029 bp, Zea Mays
cgtggtccttgctcttatcctatcctgcctactgcctgcgtttatcttcttctctctttcccctctctggccctctctctcattttctcatcatacaagttgttgagttcctgtccctgttcttggacggacacatatccaatccacccgagatttgctcaatttactccagacacactggcaacgaccggaccgtcgaacctcgcgtctctggcgacatgtcgacggcggtggcggaggcgcggccgcgctacgggttccccggatccgggaaggggggcagcggcggcggcggcggcgggcatgggaaggaggcggacatggcggcggtcgggaagaggaggagcgacggcttcttcatagaggaggtggcggaggaagaggtgctgaccgatacctcctcggtcggggcgccgtcgccgtcgggctcgtcgatcggtgagaactcgtcgtcggaggccggcggtgacgacgtggacgaggaggtcgagagcaagctcaaggaagatgacgcgctggattgcttggacgcgctcgaggactccttgcccgtgaaggcctctcgagcttctactccggcaagtccaggtcgttcaccagcctcgccgagggggacgagggcgaggaggacgactccgactccgacgacgtggagtgcagccagctgccgccgccgcaccgcggaaagaacgtccgggacgcgcgggcactgccaccccttagactcggcggtgctgggatgcggcggaggaacgggccgaatggcggcctcgggagcttcagatccccgaggtccttctcgctgtccgatctccacagcagcgctgagggggagtagtgattagcagccgcagatctgcttccagctctggcctcctctcttggccaccaccagtagagatgtagtagtagccacttactatatggttccggtgtataagatccaagtctgttgtgttcatcctcctggcttccgtttctttgacctcacaagtcacaagaagtgcatcgactgacctaacaaatact

SEQ ID NO: 206682 - DNA, 2542 bp, Zea Mays
ggaaaattccccaaaaatcgtgcggagaatttttttttgcccgaagatgccgaagatcacctcgtcgccgtctcccaccatctcggccatgaatcccctcctcccctcctcctttccgaaatcaccccacccgccggacccaaaccctagctccccgaatcctagcccctgcagctacctcctccacgccgacaccgacgacgaggcgctgattcaaatccccggtcagaaccctaccctggtgggcgcctccgcccccttcgcgttgctgccgtctatcgacccggtcccgcacgtctcgtcgcagttctacaccttcagcgccgcctcctacgggctcatggtacgctgcatccgagcaggccgctccgcatcttccgacgaggtccgcggcgccacgtcgctctccgtgctcgcctcctggcgggcggtctggaaggatcggaacgaggacactgcctacctcaccgcgtggaagcgcatccaggacaagctcgccgcttcggccgacggccggcaccttcacttcaagtccaacaccgcgcagcgcgtctcccacgtcggcatgtggagggacatagtctcggaggcgcacgccgaccccgacctgctccggcacctcgcgttcaaggacaccgtcgaccgcatcaagcagtcttggactgtgggggccaaaatctacggtttgtatatactgagacattggatgtgcctgctcgagatgtgccttggaggttacaacaattggctgccaagcataaggttgtactttgtataaggcagaagtatatacggtataagcccttcatggctgaggtgaaagattatgcctgcgaccgtgctggagtgcccacatcaagtagtgggagtgctgcatcctcagccaataattccgagggtaagaaggcgcgggttctaaagcgagagccataccagtcaaagaggtgtggttgtggattccgtattcgggcaattgtgccgatagctaactataatgaaaaagacaagacttttgtgtacttggaggagggcactgcagtgttcaagctttacgctgtgcattcagggcatgaaccagggccacttgatggcaatgcacgaattgttcacaggttggttggtcataagggagctcttgagtttgatccagacatttatggtgtcagtgaggaaggtgatcctaccttttcagcgaagggggatgaagatgttgatattgacgactcacaccaggcagtcttgcggcaagtacggtatctgagatcagaagttctctcgctagaagggaaggtggctaagatgcacccagaattgttagggtcactgtccactgagttgtctgaggttttgcacaggattaggaagtttaatttggaaggcaatgtctaccaacagcagatattgatggtaggcaatgaagaagtcaggggatgggggtcaggggatgtatctcaccaattagaccagcatgatcgaccattctgcaaggatgatgagatgcttgatgatgatgatactgactttggctcaagcattggacctattgtctcatgggacaggatggcagcagagtgcgaggataggaagatgctcatgggtgatagcccaaagtgtgacaagtggatgcttaaggatgatgtgggtgattttgatgcaaagagtattcttaactgtggggatgatgatggcgtggaggattccaaggtcatcaagccgttgatgcatgacgataccatggtaactgacccaaatttggttcatcagcaatgtttgcgatgtgcagcctttcagcaaggttattgtcaagcactgacatcggatggtataccaccagttcaaggattcttcccatgccagtaggaaggttttgtgcactcacactgtaggggtgatcccattgaacactacatcattcctcgttttctaaagggtccatgcccctaaaatgaccaagatgttgaaaccattccgcacaccgttgctcattcgatcatttgattgctgccatcgtaagaagaaattgatactgtccgtttggggtgtgagtccggaatcccaaaatatcgccatagctgatgccaaaagtgccgagtgaagacacacaccaagagtagatggttaatcgtctcatcttcctggtcacaacagtgatctggatggggaaggccatgacatgccatcctgtccgttgtctttgttggattgtgtaaaatagatgatacggtacagtagatgatactgtttaacactgtttacagagtaaagtttgaaatagatgataagataaaggatgagacaggggagctgctagagacaacctcagcaacggttgtgggccactagctataggaaaaacttacatttccttggagtccatattttcaaaatcattactgaagaagtgcgaaataagctgatttggtggagaaccggccccaggcgaggcttcaaaagcgccatttatgatttaagaacatcctgagtatctggctgtaacaccacctcttgtaccaggtcccaaatggccaacaaccgaatatat

SEQ ID NO: 206683 - DNA, 2090 bp, Zea Mays
attaagagcgaactgtagactgcccccgcctctacccaacgccgcatccccttccacccgcagataacgcgcacgcccgcaccacacccgccgcgattccctaacggccgcggatcacgcgctgcccccgccgccacgattcccctccccctcacgcccgccccccacgtcgagattccccaactgcccacggatcacgcgcacaaaccgccccatccgcgagccgaagcaaaccctagcgctgttggagtagtagcctacgaccgatggctgcgacggcgatcctgccggggctggggacgcaagtgcttatccggaccgtccatcctatgtaccctacccccgcgtgcgtcgcccccagatcccctggtcgtctggcggcgcgcggaggccccggggcgagagttgacggcgtcggcgacctcctgccactgcggccggcggaggctcccacggttgaggtcgaggtagcgcgagccccaggcgtcgacgagcgcggccgtctcgcccttgctccagcagtcctcccggtacggcaggttcgggttcggcggcaacttcccgtccttcgctcctcctcccagatctctccgcgtcacgacgacgcggcagagaaagccaggaactccaaagttcagcacgcgacgcaactatcctctagagagagagaggaagcccgtcgttctggaagtttccacgctccgcgcctccgccccctggtctccgctccaatggtgccctcactcctcgccgccatgtccacctcgcccttcctagccagcagcggcagcagccgcaggccgctaggcgctgcccacacccgacgggctggactgcgcgtggccgcgcttaagtacgaccctgccaaggtggcgccgcagaacgaccgggttctcgtccgtcttgagcagatccctgaggtctctccgctatcaatcgtgtctccactccaatacgcatggattgagacggatacgagtgtagccgtataaagcctaagtgctgtagttactctgactttgagagcaactacgaccacttgggttttgaaatgtcttatggaatctgagtttatttatatagcagtataattgattcactcaagctaacactcccccaactataattacagtattctgtttactgcaccgattagagatattgcagtactatcaataagtgtggttagtttgacatgttagcagggctctgtaattttaaaattttagaatcaactgttgcacccgtccttttctatacctgaattactgtacaatcctgtttcctgtgaaactgtattacaggaatgcacatgtgtctgctgaagtttttagaagttgatagtttgatataattgattgttctgagttctgagtttctgacaaaactgttttattcatgcagaaatctgctggcggtgtattgctaccaaaatctgctgttaagtttgagagatatctgatgggtgagattctatcgatcggtgctgaagtcagtgaagttgaggctgggaagaagtttgcacttgcaggttctcttctcagacatcaatgcttatgaggtggagcttggtactgatgacgagaagcactgcttctgccgtgagtcagacttgttagctgtagttgaatgaattttaccatgaaaatttcggacttacctgggaatgctccaacggcatgaacttatcttgcccccactttgttgtatgccatttgaacaggctcttgctcacgtttggaatacgaaactgtgctgaaccgaacttgaaatgtttacattgcccatctgatgtttctgcttctgaacattctttaggcaacatcctaattatttctatcagggtctccagattttgttgtgctgaccatagtctcattcgattggtttgaaatgtatgtgtgttctttttaatgtttctcgtcctcattgctcagccagagtttatgggcatgtcgaacaccatggagtattcatgtacggagtatataaagaagagaatatggtcagagttcggaaccttggacatctgatcgggaatgatttggaaaacaaaaacaaacagtttgttcattactactcaaaagaga

SEQ ID NO: 206684 - DNA, 3464 bp, Zea Mays
gtgttggtattttcagctgctcaatcaggccgatctagtaggaggactatgagttcaaatgaggattctgaaccagaatgtggacggcttgtcggtactgttaggcgccacatgcctattgatacacgtgatcctgttggagctgttatccatttttatcttggtgattcatttgattctaactgtgagtctaatgttctgcggaaactccaatctcagagtacctggtatctaactggacttggttctcttgcaacaacacaaagagaatatgttgctttgcacgctttccgccgtcttagtgtgctgatgcaaaatgcaatacttcagccaagtccagagcatttcccgaagtatcaagagcaaccacctgccattccagactgcttcaccccaaattttgttgatcatctgcatcgtagtttcaatggtcctcaattgtcggcaattcattgggctgcaacacatacagctgctggcacaagcaatggtgttgtaaagaaacaagaaccatggcctttcacgttggtacaaggtcctcctgggacagggaaaactcatactgtgtgggggatgctaaatgttatccatcttgttcagtatcaacattactatgctgctttactcaagaagcttgctcctgaaagttacaagcaagttagtggtagcactagtaccagcttggagactgttgcggcagggtcaattgatgaactactgcagagcatggatcagaatctgtttcgcactcttccaaagctttgccctaagcctcggatgcttgtatgtgccccatcaaatgctgcaacagatgagctacttgctcgtgttcttgaccgtggttttatagatggtgaaatgaaggtatatcgccctgatgttgcccgtgttggagttgattcacagtctcgtgctgcacaagttgtttcagttgaaaggaggacagatcagcttttactgatgggtcgtgaagacgtaattgggtggctacatcagctgaaaggccgtgagcagcagctatcacaggagatttcctatcttcaaagggaactcaatatggttgcagcggctggtagatcccagggttcagtaggtgtagatcctgatgttcttgctcaaagggatcgtaaccgtgatattcttcttcagaaacttgctgcgtcagttgaaagcagggataaagtactggtggagatgtcacagctgctgatattagaaagcaggttccgtcctggcagcagctttaatattgaagatgctagggctagtctggaagccagttttgccaatgaagctgagattgtttttacaactgtgtcaagtagcgggcgtaagttattttctcgcctgagtcatggctttgatatggttgttattgatgaggctgctcaggctagtgaagtaggagtcctccctccattggctcttggtgcagctagatgtgtcctggttggtgatccacaacaactccctgctactgttattagcaaagcagctggaactttgctttacagtaggagtcttttcgagaggtttcagcaggctggttgtcctaccattttgttgtcagtgcaatacaggatgcatccccagatccgtgaatttccatcaaaatacttctatcaaggtcgccttacagatagtgagagtgttgttaaattacctgatgaagcctattacagagatgcacttatggcaccttatatcttttacgacatgtcacatggccgtgagtctcataggggtgggtcatcttcatatcagaatattcatgaagcgcagtttgcattgcgtttatatgagcaccttcagaagtttctgaaagctaatggtgccaagaaggtttctgttggtataatcacaccatataagttgcagttgaaatgccttcagcgggaattcaaggatgttatgaatactgaggaagggaaggatatctacataaatacagttgatgcttttcaaggccaggagcgtgatatcattattatgtcttgtgtccgtgcttcaaaccatggtgtaggttttgtcgctgatatacgtcgtatgaatgtagctctaactcgagcaaggagagctctatgggttgttggtaatgctaatgctctcatgcagtctgaggattgggcatcactaatagcggatgcaaaggccaggaaatgttttatggacctggatagcattcccaaggacttcttacccatgagggttccatccaatactccaggtaggaattcttccaacaacatccggaggactggtggtggacctagaccaagacgcttggacatgttctcagaaccaagggctggtatgaacatgaggcctgatgaatatgagcgtctgaattctgttccaagaaatggtagctacaggaatttggatgattttgtccaccctggagatcgctccagggataatatgcagtttggacatcctaggaggccaaatgcttctaatggtaggagagaagtctaagtagtgttgctatcaataactctggtacagcatggaacattgatgaagagctctgaacagtccaagattcagcaaggtgcagatgcatgttctgaagatcagttgcttgtgcattagattccttgcaacctttggtgggggtggtcacaataaagcattgctgtcagcggaggatgtgcgaatctaccatgttgtgacctggatcgagacacattcatgataggtgattaaaggctcatgatgtcaggtggaagaaaggctgctgtagccctcagtgttatgaactttgcaggattttcttttttagatcgaagctgtctgctgtgttttgacgttgcagtccttgctttagccagctccatctttccgtatatatgtacatgcatgggcatttccattttgctgctgcgatcgttgcatgccaggagaaagctcactggttctagatgaggataggtctccagcattgttgcctgattgctgccgcgatcgttgcatgcttgatatgtctggtaggatcagtatgctaacataggcaacgcttctgtatcatattcatatgacaaattccttctgtatacagggtcgagatctagagagaaaaaaagttcattatttcattcagctcatgttgttcccctttgttcttgttaatttggacgaatccgtgcgacgcggggctggatctcagtggatcgtggcagcaaggccactctgccacttacaatgccccgtcgcgttttaagtcgtctgcaaaggattcagcacgccgcccgttgggaagggagcttcgaggcggcccgccgcggcgcgtcggccgggcgggctgagccaatggcacgggcccttggggcgcgaacgccctaacgtgggtcggggcgggcggcgagcagaggcgccggttgctagcttggattctgacttagaggcgttcagtcataatccggcacacggtagcttcgcgccactggcttttcaaccaagcg

SEQ ID NO: 206685 - DNA, 1317 bp, Zea Mays
atatgggaaatgtattttactcttcatgcttttccccttcgtgcaagcaaagctaaacaatacccgtcttgccttcaaatcgaactcctcccccgatcgatcccaatcgaacccaccaagccgataccctaaccctcgcccttctcgatgtcggccgccaccaccggcccagccccttcagtagccactccgatggcgccccctccgtcctacccggcctcctccacggcctcttcctccatctccgcgtccgccgaggaggaggaggacctctatggccgcctcaaatcgctccaacgccacatggagttcgtcgaaatccaggaggagtacgttaaagacgagcagaagaacctgaagcgcgaactccttcgtgcgcaggaggaggttaagcggatccagtctgtaccgctcgtcattggccagtttatggagatggtcgacggcaacaacggcatcgtgggctctaccactggcagcaactactacgtgcggatcctcagcaccatcaaccgcgagttgctcaagccgtcagcgtccgtcgcgttgcatcgtcactccaacgctctagtcgacgtgctgccgccggaggccgactccagcatctccttgttgggatcgtcggagaagcccaacgtcacttacaacgatattggaggatgtgacatccaaaagcaagaaatacgggaggcggttgaattacccttgactcatcatgagttgtacaagcagattggtattgatcctccaagaggggtgcttctgtatggtcctccgggtactggcaagaccatgcttgccaaagcagttgcacatcataccactgctgcttttatcagggtcgtcggttcagagtttgttcaaaagtacttgggtgagggccctagaatggtgcgtgacgtgttccgtttggccaaggagaatgccccagcaatcattttcattgatgaggttgatgctatagccactgctcgttttgatgctcagactggtgctgaccgagaagttcagcgtattcttatggagctactcaatcagatggatgggtttgatcaaacagtcaatgtgaaggttataatggcaactaatcgggcagacactctagatcctgctttgttgcgtcctggtagacttgacaggaaaattgagttccctctgccagaccggcgtcagaagaggcttgtttttcaagtttgcactgccaaaatgaacctgagcgatgaggttgatttggaagattatgtttccagaccggataagatcagtgctgctgatataatagagttcaagtgtggtgttaaagactatcgcttcaag

SEQ ID NO: 206686 - DNA, 810 bp, Zea Mays
agttttgataatatgtactcaacatggagatagttaatttaagatatggtcaaatgataaaatccagcgatcttggtaacgtcccttttatctgagtggcagcatgctatggcttgtgcaacactgtcaactcctgtccagaaagcttcagaacatggcctgttggtccagtttcttctcgggacacgagtcggcggtgagtttccatggatcgcccgagtcctcagtcagggcacacagcagtctgatctccatcaggttctacaagaagaaccattccaatgtgagaccacccagcgagaccaccgcagcccctgataacgtagagacagtttcaaggctcctggaaccgtaaccaagcgagaagaaggctagctcggtgaccgaacgctgcgggccgcggccaccaccacaggtacctgaacggaaaagctcgccacattctgaagcctctcaccttgacgaccggggctgtgtaaatcttccgagaccgccactggcgcttcctcctcgagcccctgctgtaaaaatgaacggactcctagcgttttgtgcgcctgggtcgcacgctgactagtgaatctgttggcagttgtgcgccgcagcccgcaggccatggctctagtgacgagagcgacgcgagcaagctgtttgtatgtgtctgattacaataataaaaggtttcgcgctgtttactgtattggcttctactgtttctactgtgtttttgcaactgtgtatatactgtagctgcagcagtgcgaacagttgggttgtgtttctaacgtaatgtgtggcgctctttttttc

SEQ ID NO: 206687 - DNA, 2897 bp, Zea Mays
taaaaaagacgggcttcctcccgcgattcgaatcggaagccctcgcattccgaaacccaccctccgcctcaagaagccaccgctccgacgagccgtgggtggcagaggacgcgcagagcaagcctcaccgctgcaggcgggcgcgcggacagcgtcccgccctccccatggagcccgacgccgccgggtgcgacgtgtccgcggacggcctcatcgccgagctgcttgacatgggcttcgagttcgacgccatcagcgcggcggtcggcgcggtcggcccgcgccgcgcagaggtgcttgaggtcctgctgggcgggtcggacgcccgagcggggcaggcgaggcggggagggggagtgccaggccgtcccgccttgtctacggcgcagccacggccggctggcaggggcatgaaattgagtaaccctagggggaggcttaggcagtccagcatcacggaccacgttgcctcagctactggtggcggaaaggaatctggtcgggaagcgaacatttcgtttccttgttcatcggctcctggtggtcccagggtaatgccagtggctgttgatttttgttccgaaccgggtccccaatctcagtctttggttgagaactcgacagtggagtccgaccaaatggacagaattagtgctgttctgcaaaagcattttgggttttcctgcctcaaagcattccaaaaggaagtcttggatgcttggtctgctcacagggattgtattgtcctagcagccacaggatcaggaaagtccctctgttttcagatcccagctctattaacaacaaaggttgtggtggtcatatcacccttgataagtctaatgcatgatcagtgcctgaagcttgcaaatcacggggtatccgcatgcttccttgggtcagggcaacctgatagccgtgttgaaggtaaagcgatggctggcatgtataagattgtttatgtttgccctgagacaatattaagattaatggaaccgttgaagaaacttgcagaaaagccagggattgcactttttgccattgatgaggtccattgtgtttctaaatggggccacgattttcgacctgactataggagattatctgcgttgagagaaaatttcagttccagcaaattgaagttcttgaagcatgacattccgttgatggcattgacagctactgcaactattcccgtacgagaagacattactaagtccttgaaaatgtcaaaagatacagcgattgtgctaacctctttttttcggccaaatctccggttcagcgtaaagcacagcaaaacttctgcctcatcatatggaaaggacttccaagaactgataggggcatataaggcttcaagggaaggacagcaaattcttcatggaattgacactgactccgaaagcagttcatatgaatctctgaatgatagtgcatcagacgatgaagatgcaaatgttatttctgcaaaccacggggataagaatgttggaaaaacaaaaactagcatgactttggtagaagaaaacattgaaaatgagttggatttgtatcaaggagttgataattttgatgtttcatgtggagagttccttgaatgttcacagcctgagagctccaagtctcctgctcaatccaatcaaactagctcctcagattgtggtgttcaaggttctacaattgtttatgtacccacaaggaaacaaaccgttgaactagctaacttcctttgcaaatctggtctcagagctgcagcatataatgcaaagatgcctaaatcccatttgaggcaagttcatcagcagtttcactgcaacgacttagaggttgtggtggctaccatagcatttggcatgggaattgacaaatcaaatgtcaggcgaattattcactatggtttaccgcagagtttagaagcatattatcaagaagctggccgtgctggtagagatggaaagctgtcagattgcactctatattataattttttgagaacaccgacactccttcctaataaaagaagtgaggagcaggcaaaggctgcatatagaatgctacgtgattgttttcactattctctgaatacttcaacatgtagagccaaaatattagtgaagtactttggcgaagactttggtcctgatggatgtcgcatgtgtgacatctgtactaatggccctcctcaaatgcatgatttcaaggaagaagcgattgtgttcatgaatgtgctccagggtcgaagtggcggtgaaactgatgagatgatttacagcagagtaccccattacagctctggcaggagagggtttggcgaggcacctaattttagaatggttgtcagtcatataagggaaaagcttcctaggtttgctgcgactgacaagatatggtggcaaggtctttcccgtatattagagggcctgagatacgtagaggaagcagctgaaactcctcgtgtctccatgcagtaccctgaactgacggaggacggattaaagtttcttagtagctcacagtcggaggcacctctgtatgcatacccggacgcggcaatgctcttggcaatgaaggagccaaggcccttctctggtttctccgattggggcaggggctgggccgatcccgagactcgccggcagcgtctggcgggcaagaaggccgggagaagaaagcggaagtggcgctcccgggggcggcagcagcagccgggcggcttcaccacggcgagggagagactgactgcgatactggcaaagaagaaaaaaagttgccacctgctgctcctgtggctccaagaagccctgatgattgctggccaaaccaagcggatggcgcctgtggctgcaagtgtgcgcgttcgatgtgtcacgccccggcaccgctcggtcggctga

SEQ ID NO: 206688 - DNA, 1713 bp, Zea Mays
acgaaaaacaatctacggttgccaggtctgcgacgtcagtgccgacgaactcatggctcgcgagaggcccgtaaaaacatgatagccagatctgcgacgtcacggctgtcgccagtgatcgccattcgccaccctctccgttccattccaatccgttcagcggtcagcggaacatgatacggtctgcgcccttccaagcaatcacatcttcttccccgttataaatcgctcactcgctatcgtcggctacctgtatcctggcgacacccaacagcctgcttgccgcgcttgcattgaggggagttcggggagcggccggtgcggaaggaatcgacacagaggaattcattctgcagttcagttcacatggctgctgaatcagagaacggcaactgcaaagcttgggcagcgagagatccttctggagttctctcaccacacagttttaaccgcagagcagtgcaaagcggcgatgtttcgctgaagatcatatactgtggagtctgttatgcagacgttgcttggacgcggaataagctcaatgattcaaaatatcctttggttcctgggcatgagatagctggagttgtaactcaggttggtgcagatgtcaaaggctttaaagtgggtgaccatgtaggtgttggaacatatgtgaactcttgccgtgattgtgagaactgcaatatctctctagacaaccattgcccaaaagcagtttatactttcaatggcattgatacagatggaactgtcacaaaggggggttactccactcacattgtagtccatgaaaggtattgcttcaaaatacccgatggctaccctttggcgaaggcagcacctcttctgtgtgctggaataaccgtgtatactccaatgatgcgacacaacatgaaccaacctggaaagtcacttggggtcattggtcttggtggtctgggtcacatggctgtgaaatttggtaaagcatttggtcttaaggtcacagttttcagtacaagtgaatcaaagagagatgaagccatcaacctccttggagcagataattttgttatatcatcagacacacagcaaatggagtccctgaagaactccctgcacttcataattgacactgcttccggtgaccatccatttgatccgtatttctctctccttaaggttggtggtgtgatgacattggtaggttttccaagtgagatcaaaatgcatcctgcaagccttatacttggtgcgcggaccttgtctggcagtgttgttggaggtataaaagacatccaagaaatggttaacttctgtgcagccaacaatatctatccggagattgagatcattaagatagattatatcaacgaggctctcgcgaggcttgttaatcgagatgtgaaataccgctttgtaatcgacatcgagaactccttcaagtagcgtgctagtgcacatgctctcgtctttctgttagtgttcaacagttcaagagctattacaaatgtgagtcatgccaaataaacttgatgtaaacaaccataattgaacagcaaggggaaacaggtatattgtgataatgaagtcgctctatgaatattcaactgcagtgttctctgacaaataatagcaactagtctgtctgcgatgtctaaatcagcaggtgtgctcttttacacgcaacagtgagtttgaactttgaatacactcctgcccaatacaaac

SEQ ID NO: 206689 - DNA, 1601 bp, Zea Mays
aggtaccggcaggccattggccacagcccgctttactcacgacgcgacgaaccgcgcactccttttaaagctccacgttgcggtgtcctcacgggtcacggcgaccgatgccgctgctgctgcgcggcgcctccctcctccgcctctgccagtgtaccagtgggctctcaagtgtgaaatttagttcaagagtaacggtactagtgaatctcaacgccatgagggacggaatgcgggccacatattcacgtagagctgcctctaagaacagtgaggtcaagaaagatgagcagccagtcacagagaaggttagtagagctgcctctaagaacagtgaggtcaagaaagatgagcagccactcacagagaaggaagatgctgctgaaactgatttggaggtggagcgagggaggagcagcagccctagccagctccaatcaatgactgtcaaggagctcagggagctcacgaggaggaggggtatttctgtgaaaggtaccaagaaagatttagtatcagcactgatgaattctatggccgtggaagcaaatggtgaagggggaaagtcatccgttgagctggttagccccttggaagtacctttgaaaagaaaaggtggtgcttctgttgtggttgaacaaaaactagaaagttctgagatcatttctgaaacacctaacaagaaaagtagaacaaaacaaaaatcaagcaagaacaccactcgtgaggaaatttcggtgactaatgtcaagctaagtaagactgttgtccagaaggaaacagttgccggattaagtcctgatgatgattcagagccttggactatactcgtgcataagaaaccacaagccagctggattccatacaaccctaggactatgaggcctccacctctaagcaaggatacacgggctctgaagattatgtcatggaatgtcaatggattgaaagcattgctcaaatcaagaggcttctctgtgcagcagttagcacagagggaggactttgatgtgctttgcctccaagaaacaaaaatgcaggagaaggatattgaagttattaaggacactttgcttgatggctacacaaatagtttctggacttgcagtgtgtcaaagcttggctattctggcactgcaataatttcaagagtcaaaccactgtcgatcaagtatgggcttggtatatcagaccatgatactgaagggagggttgtgactgtagagtttgatgacttctacctgttaactgcttatgtaccaaactctggtgatggtctaaaaagattgacttacagggtcacagagtgggatccatcccttggtaactacatgaaagaattagagaaatcgaagcctgtcatactaactggtgatcttaattgtgcgcatcaggagattgatatacatgaccctgctggaaatcgtagaagtgcaggcttcacaaacgaggaaagagaatcatttgggaccaattttttgtccaaagggtttgttgatacgtttcggaaacagcatcctaatgttgttgcctatagttactgggggtacaggcataatgcccggaagacaaacaaagcataagtcaagatcactctcacc

SEQ ID NO: 206690 - DNA, 2407 bp, Zea Mays
atgggcggaggagggccgcacagtgcagaactatcagctcaatcacgtcgtcagggagcttcggaagtacagtcgcttgaaacacaccatggagatagatcggtcacacatcgttttctgctttacagctatcactttctaagattatcggattggattgctacactgggagcaatatatgatggtccaggaatccaggattactccaatgccaatgatatgcagcttgcacttgcacaaattatttcttggattagttgctcttttttgtatggtaaagattttgttgattttggaagcattgattggggaagactattgagaaatcatggcatttctgattctgaaaaggtgctcattttctttgatgaccaccaaagtgagttgaaaaggttaaagcaagcgctaaaggctggattcaggcatctcatatttgaggacaactatgatactggtacatgtgaccattatttcttgaggcatatctatgatccgtcatatatcagaggcgtccacattgcctacggttctgccgttctgcatcccgcccgccgcgctcgtcttccccacgcgctgcgcccgcctgccatcaacgcgcacgcccacttccatccatggccttccattcgtaaaacgtgcctccctcagggtttcggtggaggttgccggcgtgaagcattggccaccgagtgctgcacgccaacagccaacagggggtaccgtgcaggtgggcagaagcagccagcgacaacagtagggcacagggatttatatggaccttccaaatacactagacatttgcaagcaaccaaagatactctcagagaagaaggttgtgaacacacatctgcagagataaaaaggagtgccatcaatggcagccacagattgggcatgaagtgtatccactatgagatcaatgtgttgctttttcgtgtttaataatttgagttataatatatggtttgcttctaatgttttttatttattttttattttggcaatgcaggggacataactcctccaacagggattaggcaggctatggagatgcaggctgaagtagaaaggagaatatgtgcccaagtccttgaatcagaagggaagaaacaagcccaagtccttgaattagaagggaagaaaactgcccagatcctttaatccgaagtcgagcagcggaggaacccggcgctcaggggatagccaaccgtcgtggtgcagtacaatggctggaaaggcggcggcttgattgccgtcagctacgaggctcgtggatttggtccatgcgcggagatgaggccaagagggtctgtcctggtattaatcttgttcaggtcccagtggcgcgtggcaaggctaaccttaatctttacagaagtgctggtgctgaggttgttgcaatccttgcaagcaaagggaagtgcgagcgggcatccatcgacgaagtttatcttgaccttactgatgcagcaaaggaaatgctcttacaagctcccccagattcaccagaggggatttttatggaggcggcaaagtcaaatatcttgggccttccggctgatgccagcgagaaggaaaagaatgtgagggcatggctttgtcaatcagaagctgattaccaggacaagttactggcatgtggagctataattgttgcacagttacgagtcagagttctggaggaaacccaattcacatgctctgctgggattgctcacaataagatgttagctaaacttgtcagtggaatgtacaagcctgctcagcaaacagttgtcccttcttcatcagttcaagacttactagcatcactacctgtgaaaaagatgaaacaacttggtggtaagcttggaagttccttgcaggatgatcttggggttgagacaattggtgatctcctaagttttacagaggaaaaattacaagagcagtatggagtaaatactgggtttgaccatataatatatatccctactactatataagcatggtgtgtaatgggtttggaaaaggttctagacgaacacatggtcaaagtctgcaatgatcagtacagtttgactgacaaatatactgatggttggctgtcttcagattgtagaacagctctttttaaataaacacctcaaggagtaaagctgacacccatccacgatcatcacgctgcttgtgacgatcgtcgttctctttcgtcgctaaaacgtagtgagttctctgcttcgtcgagtcacgccctcatgggctgctcgtgtttattattgtttgatctgtcagaaaaatcccacgtgtatttgtttatagatagattacactaattattaaaacgggtgaaattcattcacgctgcaaagttgtacatagtgcgttggaatttatttgaaagtaaagttgtacatagtttttgact

SEQ ID NO: 206691 - DNA, 1276 bp, Zea Mays
cacctttggagattctctagcaatgtgtatcattgatcatcaagctcttccccgcctcctgaatttattgacacagaaccacaagaaaagcattaagaaagaggcatgctggacgatttcaaatattactgctggaaacaaagatcagatacaggctgtcataagtgctggtattatcgctcctttgttgcaactgcttcaaggagcagagtttgatatcaagaaggaggctgcttgggccatctcaaacgctacctctggtggttcccatgagcaaatcaagtacttggtgtctgagggctgcatcgtgccgctgtgcgaccttcttgtttgccctgatccgagaattgtaacagtttgtctggagggtcttgagaatattcttaaagtaggggagcacgacaagaccatgggcgcaacaggtgacattaatgttttcgctcagatgattgacgacgcggaaggcctggaaaaaatcgagaacctacagagccatgataataatgaaatctatgaaaaggctgtgaagcttcttgagacttactggatggaggaggaagatgatgcaatggctactgctggggaagctgctcctgctgtttttgactttagccaaggtggcaaccctcctggtggtggtttgaacctcaactgaatacagtatttgaccaaaagggtgttaattccctcatgacaacctagtctggtcgattccatgtgggataatggtttgtggttggtccagtaaattcgagatttcaagggagatgggttagcattattcccaagctgtcatggatatcagtatcgcagggtctgtaacaggaccataatcgtcgaacatgagtctgggtttttgagcaggctactctctagggtttgcgtcatttatgttttatatctggctactgtatagcctgagtctaattatctgcaatgccgtaggacattcctgagtggtttggttttgaggttcctcaggaatggtctgcgttgcaggttgtccagagttgtaaaccttcaagtggtttgagtatattgctcggccttgctttactacggtcgatccaacctgttggaggccaaatgacttataaaaagctgttggcagctgcattgttggcggttggtgataaaatttgtagggaaaaataaggcgaaggttttgacttttgaagccaaattcaatttcgagttccacgcagtaacggaggctgatacaatgccctttacaactcaaatacaacaaatttccgctcaacagttatgtgttttt

SEQ ID NO: 206692 - DNA, 2743 bp, Zea Mays
ccccgaccccccgcctcaccggctcacccgccctcgctcaaaccgcgctcgctcgcccaccctgcaaccctagcctcacctgcctccgccgcccgccatggccagccctggaaatcttgcccgcgagatgcgccgccctctaccacgaaacctcatcgtcccctgcccaaacgtcgtccctgtccacatcaccgcccgcccgcgattaccgtcggaaatctcatcgacgagatgcccctcccccagcgcgcgcaacggcctccgctcgtgatggccggcggcgaagcggacgacgaaagaggaggaggagcaagaggcggagcggtttcccacatcgagcttgtgaccatggtggagacgtggtggttctatatatgcctctatctacaaggatgtccccatgatggttagcctgtctggtcggtttcatctggagagaggcattgaagagcgcctaggcaaagagtttatggatagaataaacaaagaaggctacatcgatgtcacaagcaaatcaggttctttacaattcatggttcagctgacttgatcatacgagtggaagatgcgtacgagtttgcatggcttataccaaactacatgttgcatgtcatcgagggagcaaatcactgctacactgctcactgtagagaacattctgatgacgtagtagaagccatcacatccagtgagtgatatctcaaagtagtgcaaagggagagttaccaagttgatcaatttttttctagaaatttcactacagccggttatagctgccaatgaacgtgcatttagattcaagaaatggaggtgatacttcgaatgaggcccataaaaggaattctatagatggcaacaataaacaaacaagtgaattggatgcattcatctacaagagtcttgagggcatccaagatcaagaattctgtaatgcggtttcttatatggctgttgttgctgatttcagtcaccttcaccttctcacaggatgctgctcagctaggcagattcaccttcaccttctgttactcaatttctgcttgccttcattattactcatactcttttttgttttttatttaaatacttataaataagcagtacatatgtgagtataaagcagggatactcataaataagcagtacatcgatagttatgtggtacaacataaaaatataattatgtagtactaagtcatgaaaaaataatcccaactccaaggatgttaccgatgatattttctttgttgctgcaatttatattatgacatattatcttgaagtataaagcagggatattggtttcttctcttgaatacaaatgggctatagttgataaaattgattaactgatttgtgactatgaagctgactgatttgtgtttccttgttttgttggcttcacggagtgtccttttgatcttaaagaagcaatatcaagtatctgttttgctgctccaagatgtgcagatctactaaaactgttacaacttaaatgatctttgcaactaaatatgggaaggaatttgttgctgcagcttcagagttgatgcctgattgcagggtcaatcgtcaggctggtcagttgcatcttgtgaaaccatatatggttgcagttcagagtaacaatgtctctgccgtgaatgaagccttgaatgaactttatgtcgaagatgaggactacgagagactccgtgaatcagttgacatgcatgacaactttgaccagattggtcttgcccagaagcttgagaagcatgaattgctggagatgaggaggatcgccgcctacatttacaagaaggctggcaggtggaagcagtcgattgctctatcgaagaaagacaacatgtacaaggactgcatggagacatgctcacaatctggcgaccgtgaactgtcagaggacttgctcgtgtatttcattaagcagggtaagaaagaatgttttgcttcttgcctcttcatttgctacgacctgatccggccggatgtcgctcttgagcttgcatggatgaacaacatggtggactttgccttcccgtacctgttacagttcattcgtgaatacactagcaaggtggatgatttagtgaaggacaagatcgagtcgcagaaggaagaaagagctaaggagaaggaggagaaagaccttgcgactcagcagaacatgtatgcacagctgcttcctctcgctttgccagcgccgccaatgcctggcatgggtggccctccacctccgatgggtggaatgggcatgcctcccatggccgggatgggtatgccgccgatgggccctggtccgatgccagcattcggaatgggaggctactgaattgtggttttgcagggagcttagatgatgatgtgaattgttccattgcaagcataagtggaacctcattggagctgtacatggtttacagtttgggaaatcaatattctttattgtaccaggaaattttttttgggtgagtcagtgaaatcagcctgacccatagtttgagaagcggaacctatgatatgttttacaatgggatcggaaataggatgattaggttgtttcagcatgagctattgaaagctggtaccatgtgtatgtatagtggtgtgataaaatcttttgcgtgtcgatagacaaatgtatgtttctttgttacgacctgttaatctatatattagcccgacttgtagttcaaatgtcctacattattttcttctagcttctccatcttggagttca

SEQ ID NO: 206693 - DNA, 2451 bp, Zea Mays
atcaaagcccacttgtccttgtcccttctcccctccggcctcagcttcccttccccgtcgtctatccgcgtcagtttcgactttcgattcccctcgccctcgccgacggccagacgccgaacgtctcgccctctcccgacgctccccgcctcccccttgatccgccgagcgcggcggccgccgccgccgccgaacccgatctccccccctcccgcgtgacaggcacggcctcccctcggttggaagggtttgctgtatcatgcattttttgtggataatcttcattttctcttgagtcaccgattcttttgttgtcttcaaaatgtcgggcttgctgaactcaaaccttaatagttcggcatcaaatctttcagactcagctggaaggccatttacagcatccttttcgggtcaatctggatcaattccaggttttcatcattctggcttgcataacactcatggaagttacaatcttccgagtatgcctggatcacttgcacaaaggaatgctgccatgagtggccttccgtcctctggggttcaacaacctggaggtagcattcctgggagattcccttcaaacaaccttccagttggcatgcctcagattcctcatgcacattcaggtgtcagtggtagagggatgaattttggcgcaggtccggcatttagtagcagcatgaatattggtggtaacatccaaggcttatcctcgggcttgggctccggtggtaatcgcaattctgttcatgggatgccagtatcttcatctataggaaactcgggtcaacggataagttctgtaggaaatatggtaagtgcaagcaatattggaagaaatataggcactggtggtttgtccgtgccaagtattgcatcacgaatcaatttgaatggtagtggtgggagtggtagtctgaatgtgcaaggatccagtcgaatgatgaatggattgcttcatcaacaagcattaaggatgaaacagagcacctcttagggaaggaggatgagatcagacatatatgtgcgtaggacccaagaatttgaggttagaggcattgaaaaggatgaaagggagtaaggcgaggggccctgatggtttcttaattgagacatggagacacctcaaggacacatttatagtagggctaaccaagttattcaaccatatctgccgattaaacaagatgactaacgaatggagaagtatattggtatcgatctacgaaagtaagggagatattcaaagttgtactaattattggagaaattatttgattagccatactatgaagctatgggggagagttaccgaacattgtctgaaaggaatgatgaggatatctatgaaccaatttggtttcatgcccgaaaggtcaaccatgaaaaccattttcttaataagacaagtgatagggcattatagggagcagaaggacatgcacatgtttttcattgacttggaggatgcttacaacagaatactatggaaataatggaatattatttggtgggctttagagaaatataaaattccaatgaagtatgtttgactcattaaggacatgtacaacaatgttgtgactagtgttcaaacaagtgatggagacatagatgacttttcgattagaataagattacatcaagtatcagttttgacttttgagcccttacttttttccttagtgatggataatgtcacaagggacatacaagggggtatcacttcgtgtatgttttttgcggatgatgtagtgctagttgatgaaagttgggtaggagtaaatatgaaactacaaaactagagttgtggtgggagactctagagtcaaaggttttcgactcggtagaactgaaactgaatatacaagatgtgacttcaacgttactactcacgaggaaggatatgttagtttggaagatcaagtagtgccaaggatggatacctttcagtatttaggatcaatgctatagaaagatatggatatttatgatattagacgtagaatcaaagcagggtggatgaagtggtatcaaatggcgttctatatgactagaggccaagtgggtaccacagaagctaaaaagacaagttttataggacaatgattagacctgctatgctgtatgatacggaatatcggtctacaaaaagatgacatattcaatagagaagttttgttgaaatgcttatgttgtgttggatctatggccatacaagaagggatcaagtccaaaacgatgctatacatggtaggctagaggttgcaccaattgaatttttttttgtccaacatcgattgagatggtttgaacatgcccaatggagacctccaagaggcaccattgtgtagttgaaatttaagacatgatagcaatgaccaatgggaagatagatagagaggaagatcaagatcaatgtgggaagaggcagtaaaaggagacttg

SEQ ID NO: 206694 - DNA, 874 bp, Zea Mays
ctcagcttcccttccccgtcgtctatccgcgtcagtttcgactttcgattcccctcgccctcgccgacggccagacgccgaacgtctcgccctctcccgacgctccccgcctcccccttgatccgccgagcgcggcggccgccgccgccgccgaacccgatctccccccctcccgcgtgacaggcacggcctcccctcggttggaagggtttgctgtatcatgcattttttgtggataatcttcattttctcttgagtcaccgattcttttgttgtcttcaaaatgtcgggcttgctgaactcaaaccttaatagttcggcatcaaatctttcagactcagctggaaggccatttacagcatccttttcgggtcaatctggatcaattccaggttttcatcattctggcttgcataacactcatggaagttacaatcttccgagtatgcctggatcacttgcacaaaggaatgctgccatgagtggccttccgtcctctggggttcaacaacctggaggtagcattcctgggagattcccttcaaacaaccttccagttggcatgcctcagattcctcatgcacattcaggtgtcagtggtagagggatgaattttggcgcaggtccggcatttagtagcagcatgaatattggtggtaacatccaaggcttatcctcgggcttgggctccggtggtaatcgcaattctgttcatgggatgccagtatcttcatctataggaaactcgggtcaacggataagttctgtaggaaatatggtaagtgcaagcaatattggaagaaatataggcactggtggtttgtccgtgccaagtattgcatcacgaatcaatttgaatggtagtggtcggtgg

SEQ ID NO: 206695 - DNA, 1272 bp, Zea Mays
catcttttctgatgcaccaaaatgaaacaaggtttacaatatgaaacaaacttttgcaataaggtaacccttcggattataatgctatagagttgcatcacaaggaacaactccacgataatgtacctgtaattcaagcacagcagtatcctatggcaaggtcaggcttaggaagtagctacctacccaatcgacaacaacaccagcaaggtgctaattcagtccagaatggcggatcccacaatattttactgagaccacccagtcaaacttctagtttgggatcatatgatccatttctgcagcaataccagcagcctcagcctcaaaatcatttcagattgcagcagatgtcttcagctgcacattcatatcgggatcagattcaaaagattcaggcgggaccgacaccacctgatccatatggcttgttaggatttttgggtgttataaggatgaatgatgctgatttagcatctcttgctttaggaatagatttgacagcattgggtttgaacttgaactcgccagataatctatacaagacatttggctcaccctggtcgaatgacccagcaaaaggagatactgattttcgaattccagcttgttacctctttgacaaaactcctccactacagaccttactttttcagaggtttcacatagtaacactatttttcgtcttctatagcatgccaaaagatgaagctcagctgtactctgccaatgaactgtataatcggggatggttttaccataaagaagtgcacttatggctcaccagaatttcaaatgtggaacctctagtaaaaactcacctctatgaacgtggatcttactattgctttgacccagaatcctgggacacaatacgcaaggacaactttgttctccactatgagatggtagagaaaaggccagttctgccttcaacatcaccaaaccttagatgaaaagaaaatctaggacggggagaggaacaaagaaacatataacgatctgcaggaaggactaaggaggcaggaagtcgcagaacagaattggggatgtccaattaacaccccttgtaattactaaaactgtgagcgaatgttgcgtttttcttgcactccccccttcgccctcctaattaaactgcctaatgttcaggattagtttttctccagcttcaaaataacaacgcatagatggttttgatgttctgtcctctgtccaaccatatcatgtcgatgctcagcgaaagataaaatcataccatgtcgatgatca

SEQ ID NO: 206696 - DNA, 2324 bp, Zea Mays
aagttcgtgtgtgtggagactgaggctgaacttcagctaaacgtcttcggtcactcgtgctggtcgcgcggcgatctacgcctctccgtcctccaaacgaaaccctaacccgcgcatccaacctccatccatcctccgagccccaaactccaaaccctagacccctccccctgccttcgcggccgatgggcgcagatgagcagccatctccgacgcggaaacgcgaccgcgaggaaggggaggacctctccgacgggggcgccgccgagaagcggccgcgcgccgaggtcgcgtccctgctggggctggccacctacgaggacgaggaggaagacgaagcggccaggggtcacacgaatggccgacacgcggtggagcctgagctagaggacgacgaggatgatgatgatgaggacgacgacgtgaggagggctcctgagaggaggcccagacaggtagagctgcgccgggactgcccatacctcgacaccgtgaacagacaggttcttgattttgatttcgagaagttctgttcaatctccttgtcaaatttgaatgtgtatgcgtgcttggtctgtggaaaatatttccaaggaagagggttgaaatctcatgcatatacgcacagccttgaagcaggccatcacgtgttcattaatcttcaaactgagaaggcttactgtcttcctgatggatatgagattaatgatccatcgttagaagatattcgacatgttctgaatccaaggttcactaaggagcaggttctaaatcttgacaaaaataagcagtggtctagagcacttgatggctccaattatctacctggaatggtgggtcttaacaacatcaaggagactgattttgtgaatgtcacaatacagtcattaatgagagttacacctctgagaaatttctttctaatccctgaaaactatcagcatagcaaatcaccattggttcatcgttttggggaattgacacgtaagatttggcatgctaggaacttcaagggccaggttagtccacatgaatttctgcaagcagttatgaaggccagcgacaaaaagtttcagattggtgtacagtcagatccagtggaatttatgacatggctcttaaacacactgcatgcgaaactaaaaagttcaaagaagaaaaacagaagcataatacacgattgttttcagggagaacttgaagttgttaaggaggttcataggaagcatataatggaaaaaagagaggatggcggtgagctgaatggtgaggcaggttcagtggtgggaactgcagatggaattgttactgaaacatccaaggtcccattcctgatgctcggtcttgacctgccacctccacctcttttcaaagacgccatggagaaaaatatcattccacaggtaccattgtttaacatactgaagaagttcgatggtgagacagttacagaggttgtccgaccttccattgcccgaatgaggtaccgagtcactagactgccgaagtatctgatccttcatatgcgaaggtttaccaaaaataacttttttgtcgagaaaaaccctactctagttaattttcctgtgaagaacttggagttgaaggactacattccattacctaagccgaaagagaatcataagctacgttcaaagtatgacctcatagcaaacattgtccatgatggcaaacctggcgagggatgctacagagtatttgtacagcggaaatcagaagaggcctggtatgagatgcaggatctccatgttactgagacccttcctcaaatggttgctctctcagaaacctacatgcaaatatacgagcaacacgaatgagtaatggacagtggtcatcctatggtcagtctgtttgcttaacagagatcagaatatcacaaactaatccttatctttggagcagctttttttggggcagaattttgtagtatcttcacacatgtccagacttaatttcttgacaagcagagatcgagggaatgtacttgggtcatcaagtcaatgctatggaggctgaaacatcgtgaattgtttttagagctgctttgatagaggaacgatttcccacatatttcatgtttgtagtgcagcactgcagcctgtatctgttgtgaaccggaccggcaaatcacagtttcaaacaattgcggcagggtggttctggtccagttgtttcaaattagcttatccaccgatcaaattttgagcattaccaaagcaattaaagacgtattagttgactgacgaggaggcgggctcttctagaaccgagtcagcacttgcacttccagccctggcaac

SEQ ID NO: 206697 - DNA, 2391 bp, Zea Mays
aagttcgtgtgtgtggagactgaggctgaacttcagctaaacgtcttcggtcactcgtgctggtcgcgcggcgatctacgcctctccgtcctccaaacgaaaccctaacccgcgcatccaacctccatccatcctccgagccccaaactccaaaccctagacccctccccctgccttcgcggccgatgggcgcagatgagcagccatctccgacgcggaaacgcgaccgcgaggaaggggaggacctctccgacgggggcgccgccgagaagcggccgcgcgccgaggtcgcgtccctgctggggctggccacctacgaggacgaggaggaagacgaagcggccaggggtcacacgaatggccgacacgcggtggagcctgagctagaggacgacgaggatgatgatgatgaggacgacgacgtgaggagggctcctgagaggaggcccagacaggtagagctgcgccgggactgcccatacctcgacaccgtgaacagacaggttcttgattttgatttcgagaagttctgttcaatctccttgtcaaatttgaatgtgtatgcgtgcttggtctgtggaaaatatttccaaggaagagggttgaaatctcatgcatatacgcacagccttgaagcaggccatcacgtgttcattaatcttcaaactgagaaggcttactgtcttcctgatggatatgagattaatgatccatcgttagaagatattcgacatgttctgaatccaaggttcactaaggagcaggttctaaatcttgacaaaaataagcagtggtctagagcacttgatggctccaattatctacctggaatggtgggtcttaacaacatcaaggagactgattttgtgaatgtcacaatacagtcattaatgagagttacacctctgagaaatttctttctaatccctgaaaactatcagcatagcaaatcaccattggttcatcgttttggggaattgacacgtaagatttggcatgctaggaacttcaagggccaggttagtccacatgaatttctgcaagcagttatgaaggccagcgacaaaaagtttcagattggtgtacagtcagatccagtggaatttatgacatggctcttaaacacactgcatgcgaaactaaaaagttcaaagaagaaaaacagaagcataatacacgattgttttcagggagaacttgaagttgttaaggaggttcataggaagcatataatggaaaaaagagaggatggcggtgagctgaatggtgaggcaggttcagtggtgggaactgcagatggaattgttactgaaacatccaaggtcccattcctgatgctcggtcttgacctgccacctccacctcttttcaaagacgccatggagaaaaatatcattccacaggtaccattgtttaacatactgaagaagttcgatggtgagacagttacagaggttgtccgaccttccattgcccgaatgaggtaccgagtcactagactgccgaagtatctgatccttcatatgcgaaggtttaccaaaaataacttttttgtcgagaaaaaccctactctagttaattttcctgtgaagaacttggagttgaaggactacattccattacctaagccgaaagagaatcataagctacgttcaaagtatgacctcatagcaaacattgtccatgatggcaaacctggcgagggatgctacagagtatttgtacagcggaaatcagaagaggcctggtatgagatgcaggatctccatgttactgagacccttcctcaaatggttgctctctcagaaacctacatgcaaatatacgagcaacacgaatgagtaatggacagtggtcatcctatggtcagtctgtttgcttaacagagatcagaatatcacaaactaatccttatctttggagcagctttttttggggcagaattttgtagtatcttcacacatgtccagacttaatttcttgacaagcagagatcgagggaatgtacttgggtcatcaagtcaatgctatggaggctgaaacatcgtgaattgtttttagagctgctttgatagaggaacgatttcccacatatttcatgtttgtagtgcagcactgcagcctgtatctgttgtgaaccggtagagcagggttccagctgtatggtttagtattgcttttcgaagccttgagtttgtttctgtacaggaccggcaaatcacagtttcaaacaattgcggcagggtggttctggtccagttgtttcaaattagcttatccaccgatcaaattttgagcattaccaaagcaattaaagacgtattagttgactgacgaggaggcgggctcttctagaaccgagtcagcacttgcacttccagccctggcaac

SEQ ID NO: 206698 - DNA, 2343 bp, Zea Mays
aagttcgtgtgtgtggagactgaggctgaacttcagctaaacgtcttcggtcactcgtgctggtcgcgcggcgatctacgcctctccgtcctccaaacgaaaccctaacccgcgcatccaacctccatccatcctccgagccccaaactccaaaccctagacccctccccctgccttcgcggccgatgggcgcagatgagcagccatctccgacgcggaaacgcgaccgcgaggaaggggaggacctctccgacgggggcgccgccgagaagcggccgcgcgccgaggtcgcgtccctgctggggctggccacctacgaggacgaggaggaagacgaagcggccaggggtcacacgaatggccgacacgcggtggagcctgagctagaggacgacgaggatgatgatgatgaggacgacgacgtgaggagggctcctgagaggaggcccagacaggttcttgattttgatttcgagaagttctgttcaatctccttgtcaaatttgaatgtgtatgcgtgcttggtctgtggaaaatatttccaaggaagagggttgaaatctcatgcatatacgcacagccttgaagcaggccatcacgtgttcattaatcttcaaactgagaaggcttactgtcttcctgatggatatgagattaatgatccatcgttagaagatattcgacatgttctgaatccaaggttcactaaggagcaggttctaaatcttgacaaaaataagcagtggtctagagcacttgatggctccaattatctacctggaatggtgggtcttaacaacatcaaggagactgattttgtgaatgtcacaatacagtcattaatgagagttacacctctgagaaatttctttctaatccctgaaaactatcagcatagcaaatcaccattggttcatcgttttggggaattgacacgtaagatttggcatgctaggaacttcaagggccaggttagtccacatgaatttctgcaagcagttatgaaggccagcgacaaaaagtttcagattggtgtacagtcagatccagtggaatttatgacatggctcttaaacacactgcatgcgaaactaaaaagttcaaagaagaaaaacagaagcataatacacgattgttttcagggagaacttgaagttgttaaggaggttcataggaagcatataatggaaaaaagagaggatggcggtgagctgaatggtgaggcaggttcagtggtgggaactgcagatggaattgttactgaaacatccaaggtcccattcctgatgctcggtcttgacctgccacctccacctcttttcaaagacgccatggagaaaaatatcattccacaggtaccattgtttaacatactgaagaagttcgatggtgagacagttacagaggttgtccgaccttccattgcccgaatgaggtaccgagtcactagactgccgaagtatctgatccttcatatgcgaaggtttaccaaaaataacttttttgtcgagaaaaaccctactctagttaattttcctgtgaagaacttggagttgaaggactacattccattacctaagccgaaagagaatcataagctacgttcaaagtatgacctcatagcaaacattgtccatgatggcaaacctggcgagggatgctacagagtatttgtacagcggaaatcagaagaggcctggtatgagatgcaggatctccatgttactgagacccttcctcaaatggttgctctctcagaaacctacatgcaaatatacgagcaacacgaatgagtaatggacagtggtcatcctatggtcagtctgtttgcttaacagagatcagaatatcacaaactaatccttatctttggagcagctttttttggggcagaattttgtagtatcttcacacatgtccagacttaatttcttgacaagcagagatcgagggaatgtacttgggtcatcaagtcaatgctatggaggctgaaacatcgtgaattgtttttagagctgctttgatagaggaacgatttcccacatatttcatgtttgtagtgcagcactgcagcctgtatctgttgtgaaccggtagagcagggttccagctgtatggtttagtattgcttttcgaagccttgagtttgtttctgtacaggaccggcaaatcacagtttcaaacaattgcggcagggtggttctggtccagttgtttcaaattagcttatccaccgatcaaattttgagcattaccaaagcaattaaagacgtattagttgactgacgaggaggcgggctcttctagaaccgagtcagcacttgcacttccagccctggcaac

SEQ ID NO: 206699 - DNA, 1053 bp, Zea Mays
taactattttgggatggtgtttcttcaatattccttacaccttacatataagaccacctgtgaaggtaccattgtttaacatactgaagaagttcgatggtgagacagttacagaggttgtccgaccttccattgcccgaatgaggtaccgagtcactagactgccgaagtatctgatccttcatatgcgaaggtttaccaaaaataacttttttgtcgagaaaaaccctactctagttaattttcctgtgaagaacttggagttgaaggactacattccattacctaagccgaaagagaatcataagctacgttcaaagtatgacctcatagcaaacattgtccatgatggcaaacctggcgagggatgctacagagtatttgtacagcggaaatcagaagaggcctggtatgagatgcaggatctccatgttactgagacccttcctcaaatggttgctctctcagaaacctacatgcaaatatacgagcaacacgaatgagtaatggacagtggtcatcctatggtcagtctgtttgcttaacagagatcagaatatcacaaactaatccttatctttggagcagctttttttggggcagaattttgtagtatcttcacacatgtccagacttaatttcttgacaagcagagatcgagggaatgtacttgggtcatcaagtcaatgctatggaggctgaaacatcgtgaattgtttttagagctgctttgatagaggaacgatttcccacatatttcatgtttgtagtgcagcactgcagcctgtatctgttgtgaaccggtagagcagggttccagctgtatggtttagtattgcttttcgaagccttgagtttgtttctgtacaggaccggcaaatcacagtttcaaacaattgcggcagggtggttctggtccagttgtttcaaattagcttatccaccgatcaaattttgagcattaccaaagcaattaaagacgtattagttgactgacgaggaggcgggctcttctagaaccgagtcagcacttgcacttccagccctggcaac

SEQ ID NO: 206700 - DNA, 2135 bp, Zea Mays
attacaatgagttgccactagatatacgcgaagcctctcccacctcatctgcctcgcgtgcggcggcggcgactccacctggcttgcgtcctcccgttttccagccagcaagccagactcctcccctctccgaagactccgatcgtccggattcatccagatccgggcgttctgagtcctgccgaggctctagatcgcgtcgcgcacgatgccacgcgacctgtcgcggtcgcggtctccgccgcgccgacgttggcggtcgccgtctcccgcgcggtaccgcggccggagggggcgcagggaccgaagccccagtcccatccgtagcaggtccccctatcgctcctcgtataggtgaccacacctcccgttacacgcagaaatctggcgagtcttcgttttattttttgggggtttgtactgtaaaaaaaagaagtgaggcgatgctgaccgccttcattgaaattttgtactattgcttgcttgatggaaacggggcttggtgctcttatgattatttgatctatcaactgtttgttggtgttactgttagaggtagccagcgcggtagtatattgtgctatgtcatatctgcatgaactatggtttatgaatgtgcaaatttcataatacttcggagcgatcaagatttctgatttccaaaggaagaaaaatgcttcggattcttttgcattacagagttagaataaaaatacttcgatgcagcatggaatatatcagcagatgaagcttagatatagttatgccatgttttgcactacttgcctgtacagactaacaagagttgctttcgtaaaacgcatggaatctacaaagcttttactctgtgctgtattgctgtggaatgctccacccctgtaacagtgtctaaggtaactgcttttgcccatgttttagggcttcaggagctaatgaaggaggagccctttgccttccccaagaaggcacaagagccgttctccgtctcctaggaggcgcaagagtccgtctccatcacaaaagcgttacagaagaaagagaagtccgagtgtcactagctctccagtcgctgcatctcagagttcccaccttgggttggcagagaataagaatgttattgatacacaaaggctagaagaagaaaagaaaagggaacatgcctcagtagaattgatgaaagaaataaaagaagggctttaccgaagggagctactgctatagttccacttgttatatttgatgatgcaattggtgatcatttatctactcttgatcagttttgataattcgtttttggatctggaacgaactagaggcgccaaaaggaagttgaactgagactattagagaaggagacggcaaaaagagttgaacaagctattaggaggaaggttgaggagagtctaaattgtgatgaaatcaaacatgaaatacatcgtcgaattgaggaaggacgaaagaggatacatgaggaggtagcaatccagattgagaaggaaaaggatgcagctttaaatgaagccaagctgaaagtggaacaagaaaaaaagaagcgggaggagctagagaaaaaacttgaagaagaacgaaagaaagctgaagaggcgttgatgaaagaagcgttggaacagcagcagaaagagctagagcggtaccaggagttggagaggcttcagaaagaaagagaggaggccatgaaacggaaaaaaatggaggaagagcagcagaggcaaaaccagatgaagctgctgggcaagaacaagtcgcggcctaagctgtcgtttgcttttgggatgaagtagcgttcgattcaccgaacgaaattagtgctttagtatactgtaaccgtgtagtgtagtacctctgtatgaaactgcccatttctaactctggcagacaaattgcgatgtcataaatgctcctgatctgcttcgtaagttgccggctcttggtggatgtggtttcatctgcttcttgctgttcagttggcgttgccttgcgagaagactgccagagaagaatccggttggtttgatcttgcatgtcaccaagatactatctccgtttgtgttgccccctagttcagcctgttcatatttgaactaaaacgtgataaataaaaaaaacggagggag

SEQ ID NO: 206701 - DNA, 1554 bp, Zea Mays
attacaatgagttgccactagatatacgcgaagcctctcccacctcatctgcctcgcgtgcggcggcggcgactccacctggcttgcgtcctcccgttttccagccagcaagccagactcctcccctctccgaagactccgatcgtccggattcatccagatccgggcgttctgagtcctgccgaggctctagatcgcgtcgcgcacgatgccacgcgacctgtcgcggtcgcggtctccgccgcgccgacgttggcggtcgccgtctcccgcgcggtaccgcggccggagggggcgcagggaccgaagccccagtcccatccgtagcaggtccccctatcgctcctcgtatagaaggaggagccctttgccttccccaagaaggcacaagagccgttctccgtctcctaggaggcgcaagagtccgtctccatcacaaaagcgttacagaagaaagagaagtccgagtgtcactagctctccagtcgctgcatctcagagttcccaccttgggttggcagagaataagaatgttattgatacacaaaggctagaagaagaaaagaaaagggaacatgcctcagtagaattgatgaaagaaataaaagaagggctttaccgaagggagctactgctatagttccacttgttatatttgatgatgcaattggtgatcatttatctactcttgatcagttttgataattcgtttttggatctggaacgaactagaggcgccaaaaggaagttgaactgagactattagagaaggagacggcaaaaagagttgaacaagctattaggaggaaggttgaggagagtctaaattgtgatgaaatcaaacatgaaatacatcgtcgaattgaggaaggacgaaagaggatacatgaggaggtagcaatccagattgagaaggaaaaggatgcagctttaaatgaagccaagctgaaagtggaacaagaaaaaaagaagcgggaggagctagagaaaaaacttgaagaagaacgaaagaaagctgaagaggcgttgatgaaagaagcgttggaacagcagcagaaagagctagagcggtaccaggagttggagaggcttcagaaagaaagagaggaggccatgaaacggaaaaaaatggaggaagagcagcagaggcaaaaccagatgaagctgctgggcaagaacaagtcgcggcctaagctgtcgtttgcttttgggatgaagtagcgttcgattcaccgaacgaaattagtgctttagtatactgtaaccgtgtagtgtagtacctctgtatgaaactgcccatttctaactctggcagacaaattgcgatgtcataaatgctcctgatctgcttcgtaagttgccggctcttggtggatgtggtttcatctgcttcttgctgttcagttggcgttgccttgcgagaagactgccagagaagaatccggttggtttgatcttgcatgtcaccaagatactatctccgtttgtgttgccccctagttcagcctgttcatatttgaactaaaacgtgataaataaaaaaaacggagggag

SEQ ID NO: 206702 - DNA, 2635 bp, Zea Mays
attacaatgagttgccactagatatacgcgaagcctctcccacctcatctgcctcgcgtgcggcggcggcgactccacctggcttgcgtcctcccgttttccagccagcaagccagactcctcccctctccgaagactccgatcgtccggattcatccagatccgggcgttctgagtcctgccgaggctctagatcgcgtcgcgcacgatgccacgcgacctgtcgcggtcgcggtctccgccgcgccgacgttggcggtcgccgtctcccgcgcggtaccgcggccggagggggcgcagggaccgaagccccagtcccatccgtagcaggtccccctatcgctcctcgtatagcttttactctgtgctgtattgctgtggaatgctccacccctgtaacagtgtctaaggtaactgcttttgcccatgttttagggcttcaggagctaatggtaattccttgtctattgttgtgatgactcattgactctaattttattcttacggtgctcatctttgtcttgcagaaggaggagccctttgccttccccaagaaggcacaagagccgttctccgtctcctaggaggcgcaagagtccgtctccatcacaaaagcgttacagaagaaagagaagtccgagtgtcactagctctccagtcgctgcatctcagagttcccaccttgggttggcagagaataagaatgttattgatacacaaaggctagaagaagaaaagaaaaggtgggaagtatctgcttttctatgcagtctacattatttcttctacaaacccagctattcactgttgcaccctttctgtaactcttccgtgatgctaacaatgaaattctactaatctagttgctgtttgcaccggaatatatcacaaggtcagctctatttgataatctgttgaccatctgttttcctgagtacatacgtgcaatattatttttggattttgcaagtactacaaacataaatatgacttgagcatctgactgccggatgtgaatcacgtaggttatatgagacaattgtggcttaaggtgcaagtgcaaattcagtaggagtttctgtattccttgaaatcgcgacgttagttgtagctacctggaaaaaatcacctgcgattaacacagggcaacatgacttcaatgtaaaaaaaaaggtttgggatttaacaaaaaaaattgtaattttgtgtccacaaatttaaattgtttctgagcaagaagtttttttgttttccatgtggtatctactaagaaatgtaatgcctttctactgtacattgaacacttttcaaaggtactctttgtagtttgttttggacttgaattgtagttctggtgaactaatatctgtgatgtaacatatgttccagaagttgtgattcaaaacatttatattcttgttggaaattagtctgaaacccaccattttaacagggaacatgcctcagtagaattgatgaaagaaataaaagaagggctttaccgaagggagctactgctatagttccacttgttatatttgatgatgcaattggtgatcatttatctactcttgatcagttttgataattcgtttttggatctggaacgaactagaggtatgcctgaaatgcattagcttgtagtcaactatgctggaaaggcatagtagatcatagatactgtttagattttaaaccatgtgctttgctttttgctgcttttatggtcttgaagagtttgaacaaacaaatatcggctttggtcacgacttgccttaggtagtgcatttcgttaacttgctatatcaactgcaggcgccaaaaggaagttgaactgagactattagagaaggagacggcaaaaagagttgaacaagctattaggaggaaggttgaggagagtctaaattgtgatgaaatcaaacatgaaatacatcgtcgaattgaggaaggacgaaagaggatacatgaggaggtagcaatccagattgagaaggaaaaggatgcagctttaaatgaagccaagctgaaagtggaacaagaaaaaaagaagcgggaggagctagagaaaaaacttgaagaagaacgaaagaaagctgaagaggcgttgatgaaagaagcgttggaacagcagcagaaagagctagagcggtaccaggagttggagaggcttcagaaagaaagagaggaggccatgaaacggaaaaaaatggaggaagagcagcagaggcaaaaccagatgaagctgctgggcaagaacaagtcgcggcctaagctgtcgtttgcttttgggatgaagtagcgttcgattcaccgaacgaaattagtgctttagtatactgtaaccgtgtagtgtagtacctctgtatgaaactgcccatttctaactctggcagacaaattgcgatgtcataaatgctcctgatctgcttcgtaagttgccggctcttggtggatgtggtttcatctgcttcttgctgttcagttggcgttgccttgcgagaagactgccagagaagaatccggttggtttgatcttgcatgtcaccaagatactatctccgtttgtgttgccccctagttcagcctgttcatatttgaactaaaacgtgataaataaaaaaaacggagggag

SEQ ID NO: 206703 - DNA, 1926 bp, Zea Mays
attacaatgagttgccactagatatacgcgaagcctctcccacctcatctgcctcgcgtgcggcggcggcgactccacctggcttgcgtcctcccgttttccagccagcaagccagactcctcccctctccgaagactccgatcgtccggattcatccagatccgggcgttctgagtcctgccgaggctctagatcgcgtcgcgcacgatgccacgcgacctgtcgcggtcgcggtctccgccgcgccgacgttggcggtcgccgtctcccgcgcggtaccgcggccggagggggcgcagggaccgaagccccagtcccatccgtagcaggtccccctatcgctcctcgtatagactaacaagagttgctttcgtaaaacgcatggaatctacaaagcttttactctgtgctgtattgctgtggaatgctccacccctgtaacagtgtctaaggtaactgcttttgcccatgttttagggcttcaggagctaatggtaattccttgtctattgttgtgatgactcattgactctaattttattcttacggtgctcatctttgtcttgcagaaggaggagccctttgccttccccaagaaggcacaagagccgttctccgtctcctaggaggcgcaagagtccgtctccatcacaaaagcgttacagaagaaagagaagtccgagtgtcactagctctccagtcgctgcatctcagagttcccaccttgggttggcagagaataagaatgttattgatacacaaaggctagaagaagaaaagaaaaggctttaccgaagggagctactgctatagttccacttgttatatttgatgatgcaattggtgatcatttatctactcttgatcagttttgataattcgtttttggatctggaacgaactagaggtatgcctgaaatgcattagcttgtagtcaactatgctggaaaggcatagtagatcatagatactgtttagattttaaaccatgtgctttgctttttgctgcttttatggtcttgaagagtttgaacaaacaaatatcggctttggtcacgacttgccttaggtagtgcatttcgttaacttgctatatcaactgcaggcgccaaaaggaagttgaactgagactattagagaaggagacggcaaaaagagttgaacaagctattaggaggaaggttgaggagagtctaaattgtgatgaaatcaaacatgaaatacatcgtcgaattgaggaaggacgaaagaggatacatgaggaggtagcaatccagattgagaaggaaaaggatgcagctttaaatgaagccaagctgaaagtggaacaagaaaaaaagaagcgggaggagctagagaaaaaacttgaagaagaacgaaagaaagctgaagaggcgttgatgaaagaagcgttggaacagcagcagaaagagctagagcggtaccaggagttggagaggcttcagaaagaaagagaggaggccatgaaacggaaaaaaatggaggaagagcagcagaggcaaaaccagatgaagctgctgggcaagaacaagtcgcggcctaagctgtcgtttgcttttgggatgaagtagcgttcgattcaccgaacgaaattagtgctttagtatactgtaaccgtgtagtgtagtacctctgtatgaaactgcccatttctaactctggcagacaaattgcgatgtcataaatgctcctgatctgcttcgtaagttgccggctcttggtggatgtggtttcatctgcttcttgctgttcagttggcgttgccttgcgagaagactgccagagaagaatccggttggtttgatcttgcatgtcaccaagatactatctccgtttgtgttgccccctagttcagcctgttcatatttgaactaaaacgtgataaataaaaaaaacggagggag

SEQ ID NO: 206704 - DNA, 2920 bp, Zea Mays
attacaatgagttgccactagatatacgcgaagcctctcccacctcatctgcctcgcgtgcggcggcggcgactccacctggcttgcgtcctcccgttttccagccagcaagccagactcctcccctctccgaagactccgatcgtccggattcatccagatccgggcgttctgagtcctgccgaggctctagatcgcgtcgcgcacgatgccacgcgacctgtcgcggtcgcggtctccgccgcgccgacgttggcggtcgccgtctcccgcgcggtaccgcggccggagggggcgcagggaccgaagccccagtcccatccgtagcaggtccccctatcgctcctcgtataggtgaccacacctcccgttacacgcagaaatctggcgagtcttcgttttattttttgggggtttgtactgtaaaaaaaagaagtgaggcgatgctgaccgccttcattgaaattttgtactattgcttgcttgatggaaacggggcttggtgctcttatgattatttgatctatcaactgtttgttggtgttactgttagaggtagccagcgcggtagtatattgtgctatgtcatatctgcatgaactatggtttatgaatgtgcaaatttcataatacttcggagcgatcaagatttctgatttccaaaggaagaaaaatgcttcggattcttttgcattacagagttagaataaaaatacttcgatgcagcatggaatatatcagcagatgaagcttagatatagttatgccatgttttgcactacttgcctgtacagactaacaagagttgctttcgtaaaacgcatggaatctacaaagcttttactctgtgctgtattgctgtggaatgctccacccctgtaacagtgtctaaggtaactgcttttgcccatgttttagggcttcaggagctaatggtaattccttgtctattgttgtgatgactcattgactctaattttattcttacggtgctcatctttgtcttgcagaaggaggagccctttgccttccccaagaaggcacaagagccgttctccgtctcctaggaggcgcaagagtccgtctccatcacaaaagcgttacagaagaaagagaagtccgagtgtcactagctctccagtcgctgcatctcagagttcccaccttgggttggcagagaataagaatgttattgatacacaaaggctagaagaagaaaagaaaaggtgggaagtatctgcttttctatgcagtctacattatttcttctacaaacccagctattcactgttgcaccctttctgtaactcttccgtgatgctaacaatgaaattctactaatctagttgctgtttgcaccggaatatatcacaaggtcagctctatttgataatctgttgaccatctgttttcctgagtacatacgtgcaatattatttttggattttgcaagtactacaaacataaatatgacttgagcatctgactgccggatgtgaatcacgtaggttatatgagacaattgtggcttaaggtgcaagtgcaaattcagtaggagtttctgtattccttgaaatcgcgacgttagttgtagctacctggaaaaaatcacctgcgattaacacagggcaacatgacttcaatgtaaaaaaaaaggtttgggatttaacaaaaaaaattgtaattttgtgtccacaaatttaaattgtttctgagcaagaagtttttttgttttccatgtggtatctactaagaaatgtaatgcctttctactgtacattgaacacttttcaaaggtactctttgtagtttgttttggacttgaattgtagttctggtgaactaatatctgtgatgtaacatatgttccagaagttgtgattcaaaacatttatattcttgttggaaattagtctgaaacccaccattttaacagggaacatgcctcagtagaattgatgaaagaaataaaagaagggctttaccgaagggagctactgctatagttccacttgttatatttgatgatgcaattggtgatcatttatctactcttgatcagttttgataattcgtttttggatctggaacgaactagaggcgccaaaaggaagttgaactgagactattagagaaggagacggcaaaaagagttgaacaagctattaggaggaaggttgaggagagtctaaattgtgatgaaatcaaacatgaaatacatcgtcgaattgaggaaggacgaaagaggatacatgaggaggtagcaatccagattgagaaggaaaaggatgcagctttaaatgaagccaagctgaaagtggaacaagaaaaaaagaagcgggaggagctagagaaaaaacttgaagaagaacgaaagaaagctgaagaggcgttgatgaaagaagcgttggaacagcagcagaaagagctagagcggtaccaggagttggagaggcttcagaaagaaagagaggaggccatgaaacggaaaaaaatggaggaagagcagcagaggcaaaaccagatgaagctgctgggcaagaacaagtcgcggcctaagctgtcgtttgcttttgggatgaagtagcgttcgattcaccgaacgaaattagtgctttagtatactgtaaccgtgtagtgtagtacctctgtatgaaactgcccatttctaactctggcagacaaattgcgatgtcataaatgctcctgatctgcttcgtaagttgccggctcttggtggatgtggtttcatctgcttcttgctgttcagttggcgttgccttgcgagaagactgccagagaagaatccggttggtttgatcttgcatgtcaccaagatactatctccgtttgtgttgccccctagttcagcctgttcatatttgaactaaaacgtgataaataaaaaaaacggagggag

SEQ ID NO: 206705 - DNA, 1686 bp, Zea Mays
attacaatgagttgccactagatatacgcgaagcctctcccacctcatctgcctcgcgtgcggcggcggcgactccacctggcttgcgtcctcccgttttccagccagcaagccagactcctcccctctccgaagactccgatcgtccggattcatccagatccgggcgttctgagtcctgccgaggctctagatcgcgtcgcgcacgatgccacgcgacctgtcgcggtcgcggtctccgccgcgccgacgttggcggtcgccgtctcccgcgcggtaccgcggccggagggggcgcagggaccgaagccccagtcccatccgtagcagaaggaggagccctttgccttccccaagaaggcacaagagccgttctccgtctcctaggaggcgcaagagtccgtctccatcacaaaagcgttacagaagaaagagaagtccgagtgtcactagctctccagtcgctgcatctcagagttcccaccttgggttggcagagaataagaatgttattgatacacaaaggctagaagaagaaaagaaaaggctttaccgaagggagctactgctatagttccacttgttatatttgatgatgcaattggtgatcatttatctactcttgatcagttttgataattcgtttttggatctggaacgaactagaggtatgcctgaaatgcattagcttgtagtcaactatgctggaaaggcatagtagatcatagatactgtttagattttaaaccatgtgctttgctttttgctgcttttatggtcttgaagagtttgaacaaacaaatatcggctttggtcacgacttgccttaggtagtgcatttcgttaacttgctatatcaactgcaggcgccaaaaggaagttgaactgagactattagagaaggagacggcaaaaagagttgaacaagctattaggaggaaggttgaggagagtctaaattgtgatgaaatcaaacatgaaatacatcgtcgaattgaggaaggacgaaagaggatacatgaggaggtagcaatccagattgagaaggaaaaggatgcagctttaaatgaagccaagctgaaagtggaacaagaaaaaaagaagcgggaggagctagagaaaaaacttgaagaagaacgaaagaaagctgaagaggcgttgatgaaagaagcgttggaacagcagcagaaagagctagagcggtaccaggagttggagaggcttcagaaagaaagagaggaggccatgaaacggaaaaaaatggaggaagagcagcagaggcaaaaccagatgaagctgctgggcaagaacaagtcgcggcctaagctgtcgtttgcttttgggatgaagtagcgttcgattcaccgaacgaaattagtgctttagtatactgtaaccgtgtagtgtagtacctctgtatgaaactgcccatttctaactctggcagacaaattgcgatgtcataaatgctcctgatctgcttcgtaagttgccggctcttggtggatgtggtttcatctgcttcttgctgttcagttggcgttgccttgcgagaagactgccagagaagaatccggttggtttgatcttgcatgtcaccaagatactatctccgtttgtgttgccccctagttcagcctgttcatatttgaactaaaacgtgataaataaaaaaaacggagggag

SEQ ID NO: 206706 - DNA, 2468 bp, Zea Mays
attacaatgagttgccactagatatacgcgaagcctctcccacctcatctgcctcgcgtgcggcggcggcgactccacctggcttgcgtcctcccgttttccagccagcaagccagactcctcccctctccgaagactccgatcgtccggattcatccagatccgggcgttctgagtcctgccgaggctctagatcgcgtcgcgcacgatgccacgcgacctgtcgcggtcgcggtctccgccgcgccgacgttggcggtcgccgtctcccgcgcggtaccgcggccggagggggcgcagggaccgaagccccagtcccatccgtagcaggtccccctatcgctcctcgtataggtgaccacacctcccgttacacgcagaaatctggcgagtcttcgttttattttttgggggtttgtactgtaaaaaaaagaagtgaggcgatgctgaccgccttcattgaaattttgtactattgcttgcttgatggaaacggggcttggtgctcttatgattatttgatctatcaactgtttgttggtgttactgttagaggtagccagcgcggtagtatattgtgctatgtcatatctgcatgaactatggtttatgaatgtgcaaatttcataatacttcggagcgatcaagatttctgatttccaaaggaagaaaaatgcttcggattcttttgcattacagagttagaataaaaatacttcgatgcagcatggaatatatcagcagatgaagcttagatatagttatgccatgttttgcactacttgcctgtacagactaacaagagttgctttcgtaaaacgcatggaatctacaaagcttttactctgtgctgtattgctgtggaatgctccacccctgtaacagtgtctaaggtaactgcttttgcccatgttttagggcttcaggagctaatggtaattccttgtctattgttgtgatgactcattgactctaattttattcttacggtgctcatctttgtcttgcagaaggaggagccctttgccttccccaagaaggcacaagagccgttctccgtctcctaggaggcgcaagagtccgtctccatcacaaaagcgttacagaagaaagagaagtccgagtgtcactagctctccagtcgctgcatctcagagttcccaccttgggttggcagagaataagaatgttattgatacacaaaggctagaagaagaaaagaaaagggaacatgcctcagtagaattgatgaaagaaataaaagaagggtatgtgtgaaatattaccagtatcatttcataaattttacagcagtttgtattaactattgtgcacgtcaccttggaaaccattaattttttttaaaaaaaaatcatgaatgcttcttgagatgtttggtgtagttgtcagagctgtcttactgagtcatcaggtcatgggttcgaagcaacttctccacatttatgtgggaaggctcgcctcggcttatcccttcacagacgctactcatgtgggagcctccagcagctttaccgaagggagctactgctatagttccacttgttatatttgatgatgcaattggtgatcatttatctactcttgatcagttttgataattcgtttttggatctggaacgaactagaggcgccaaaaggaagttgaactgagactattagagaaggagacggcaaaaagagttgaacaagctattaggaggaaggttgaggagagtctaaattgtgatgaaatcaaacatgaaatacatcgtcgaattgaggaaggacgaaagaggatacatgaggaggtagcaatccagattgagaaggaaaaggatgcagctttaaatgaagccaagctgaaagtggaacaagaaaaaaagaagcgggaggagctagagaaaaaacttgaagaagaacgaaagaaagctgaagaggcgttgatgaaagaagcgttggaacagcagcagaaagagctagagcggtaccaggagttggagaggcttcagaaagaaagagaggaggccatgaaacggaaaaaaatggaggaagagcagcagaggcaaaaccagatgaagctgctgggcaagaacaagtcgcggcctaagctgtcgtttgcttttgggatgaagtagcgttcgattcaccgaacgaaattagtgctttagtatactgtaaccgtgtagtgtagtacctctgtatgaaactgcccatttctaactctggcagacaaattgcgatgtcataaatgctcctgatctgcttcgtaagttgccggctcttggtggatgtggtttcatctgcttcttgctgttcagttggcgttgccttgcgagaagactgccagagaagaatccggttggtttgatcttgcatgtcaccaagatactatctccgtttgtgttgccccctagttcagcctgttcatatttgaactaaaacgtgataaataaaaaaaacggagggag

SEQ ID NO: 206707 - DNA, 3178 bp, Zea Mays
attacaatgagttgccactagatatacgcgaagcctctcccacctcatctgcctcgcgtgcggcggcggcgactccacctggcttgcgtcctcccgttttccagccagcaagccagactcctcccctctccgaagactccgatcgtccggattcatccagatccgggcgttctgagtcctgccgaggctctagatcgcgtcgcgcacgatgccacgcgacctgtcgcggtcgcggtctccgccgcgccgacgttggcggtcgccgtctcccgcgcggtaccgcggccggagggggcgcagggaccgaagccccagtcccatccgtagcaggtccccctatcgctcctcgtataggtgaccacacctcccgttacacgcagaaatctggcgagtcttcgttttattttttgggggtttgtactgtaaaaaaaagaagtgaggcgatgctgaccgccttcattgaaattttgtactattgcttgcttgatggaaacggggcttggtgctcttatgattatttgatctatcaactgtttgttggtgttactgttagaggtagccagcgcggtagtatattgtgctatgtcatatctgcatgaactatggtttatgaatgtgcaaatttcataatacttcggagcgatcaagatttctgatttccaaaggaagaaaaatgcttcggattcttttgcattacagagttagaataaaaatacttcgatgcagcatggaatatatcagcagatgaagcttagatatagttatgccatgttttgcactacttgcctgtacagactaacaagagttgctttcgtaaaacgcatggaatctacaaagcttttactctgtgctgtattgctgtggaatgctccacccctgtaacagtgtctaaggtaactgcttttgcccatgttttagggcttcaggagctaatggtaattccttgtctattgttgtgatgactcattgactctaattttattcttacggtgctcatctttgtcttgcagaaggaggagccctttgccttccccaagaaggcacaagagccgttctccgtctcctaggaggcgcaagagtccgtctccatcacaaaagcgttacagaagaaagagaagtccgagtgtcactagctctccagtcgctgcatctcagagttcccaccttgggttggcagagaataagaatgttattgatacacaaaggctagaagaagaaaagaaaaggtgggaagtatctgcttttctatgcagtctacattatttcttctacaaacccagctattcactgttgcaccctttctgtaactcttccgtgatgctaacaatgaaattctactaatctagttgctgtttgcaccggaatatatcacaaggtcagctctatttgataatctgttgaccatctgttttcctgagtacatacgtgcaatattatttttggattttgcaagtactacaaacataaatatgacttgagcatctgactgccggatgtgaatcacgtaggttatatgagacaattgtggcttaaggtgcaagtgcaaattcagtaggagtttctgtattccttgaaatcgcgacgttagttgtagctacctggaaaaaatcacctgcgattaacacagggcaacatgacttcaatgtaaaaaaaaaggtttgggatttaacaaaaaaaattgtaattttgtgtccacaaatttaaattgtttctgagcaagaagtttttttgttttccatgtggtatctactaagaaatgtaatgcctttctactgtacattgaacacttttcaaaggtactctttgtagtttgttttggacttgaattgtagttctggtgaactaatatctgtgatgtaacatatgttccagaagttgtgattcaaaacatttatattcttgttggaaattagtctgaaacccaccattttaacagggaacatgcctcagtagaattgatgaaagaaataaaagaagggtatgtgtgaaatattaccagtatcatttcataaattttacagcagtttgtattaactattgtgcacgtcaccttggaaaccattaattttttttaaaaaaaaatcatgaatgcttcttgagatgtttggtgtagttgtcagagctgtcttactgagtcatcaggtcatgggttcgaagcaacttctccacatttatgtgggaaggctcgcctcggcttatcccttcacagacgctactcatgtgggagcctccagcagctttaccgaagggagctactgctatagttccacttgttatatttgatgatgcaattggtgatcatttatctactcttgatcagttttgataattcgtttttggatctggaacgaactagaggcgccaaaaggaagttgaactgagactattagagaaggagacggcaaaaagagttgaacaagctattaggaggaaggttgaggagagtctaaattgtgatgaaatcaaacatgaaatacatcgtcgaattgaggaaggacgaaagaggatacatgaggaggtagcaatccagattgagaaggaaaaggatgcagctttaaatgaagccaagctgaaagtggaacaagaaaaaaagaagcgggaggagctagagaaaaaacttgaagaagaacgaaagaaagctgaagaggcgttgatgaaagaagcgttggaacagcagcagaaagagctagagcggtaccaggagttggagaggcttcagaaagaaagagaggaggccatgaaacggaaaaaaatggaggaagagcagcagaggcaaaaccagatgaagctgctgggcaagaacaagtcgcggcctaagctgtcgtttgcttttgggatgaagtagcgttcgattcaccgaacgaaattagtgctttagtatactgtaaccgtgtagtgtagtacctctgtatgaaactgcccatttctaactctggcagacaaattgcgatgtcataaatgctcctgatctgcttcgtaagttgccggctcttggtggatgtggtttcatctgcttcttgctgttcagttggcgttgccttgcgagaagactgccagagaagaatccggttggtttgatcttgcatgtcaccaagatactatctccgtttgtgttgccccctagttcagcctgttcatatttgaactaaaacgtgataaataaaaaaaacggagggag

SEQ ID NO: 206708 - DNA, 1568 bp, Zea Mays
attacaatgagttgccactagatatacgcgaagcctctcccacctcatctgcctcgcgtgcggcggcggcgactccacctggcttgcgtcctcccgttttccagccagcaagccagactcctcccctctccgaagactccgatcgtccggattcatccagatccgggcgttctgagtcctgccgaggctctagatcgcgtcgcgcacgatgccacgcgacctgtcgcggtcgcggtctccgccgcgccgacgttggcggtcgccgtctcccgcgcggtaccgcggccggagggggcgcagggaccgaagccccagtcccatccgtagcaggtccccctatcgctcctcgtatagcttttactctgtgctgtattgctgtggaatgctccacccctgtaacagtgtctaagaaggaggagccctttgccttccccaagaaggcacaagagccgttctccgtctcctaggaggcgcaagagtccgtctccatcacaaaagcgttacagaagaaagagaagtccgagtgtcactagctctccagtcgctgcatctcagagttcccaccttgggttggcagagaataagaatgttattgatacacaaaggctagaagaagaaaagaaaaggctttaccgaagggagctactgctatagttccacttgttatatttgatgatgcaattggtgatcatttatctactcttgatcagttttgataattcgtttttggatctggaacgaactagaggcgccaaaaggaagttgaactgagactattagagaaggagacggcaaaaagagttgaacaagctattaggaggaaggttgaggagagtctaaattgtgatgaaatcaaacatgaaatacatcgtcgaattgaggaaggacgaaagaggatacatgaggaggtagcaatccagattgagaaggaaaaggatgcagctttaaatgaagccaagctgaaagtggaacaagaaaaaaagaagcgggaggagctagagaaaaaacttgaagaagaacgaaagaaagctgaagaggcgttgatgaaagaagcgttggaacagcagcagaaagagctagagcggtaccaggagttggagaggcttcagaaagaaagagaggaggccatgaaacggaaaaaaatggaggaagagcagcagaggcaaaaccagatgaagctgctgggcaagaacaagtcgcggcctaagctgtcgtttgcttttgggatgaagtagcgttcgattcaccgaacgaaattagtgctttagtatactgtaaccgtgtagtgtagtacctctgtatgaaactgcccatttctaactctggcagacaaattgcgatgtcataaatgctcctgatctgcttcgtaagttgccggctcttggtggatgtggtttcatctgcttcttgctgttcagttggcgttgccttgcgagaagactgccagagaagaatccggttggtttgatcttgcatgtcaccaagatactatctccgtttgtgttgccccctagttcagcctgttcatatttgaactaaaacgtgataaataaaaaaaacggagggag

SEQ ID NO: 206709 - DNA, 3423 bp, Zea Mays
attacaatgagttgccactagatatacgcgaagcctctcccacctcatctgcctcgcgtgcggcggcggcgactccacctggcttgcgtcctcccgttttccagccagcaagccagactcctcccctctccgaagactccgatcgtccggattcatccagatccgggcgttctgagtcctgccgaggctctagatcgcgtcgcgcacgatgccacgcgacctgtcgcggtcgcggtctccgccgcgccgacgttggcggtcgccgtctcccgcgcggtaccgcggccggagggggcgcagggaccgaagccccagtcccatccgtagcaggtccccctatcgctcctcgtataggtgaccacacctcccgttacacgcagaaatctggcgagtcttcgttttattttttgggggtttgtactgtaaaaaaaagaagtgaggcgatgctgaccgccttcattgaaattttgtactattgcttgcttgatggaaacggggcttggtgctcttatgattatttgatctatcaactgtttgttggtgttactgttagaggtagccagcgcggtagtatattgtgctatgtcatatctgcatgaactatggtttatgaatgtgcaaatttcataatacttcggagcgatcaagatttctgatttccaaaggaagaaaaatgcttcggattcttttgcattacagagttagaataaaaatacttcgatgcagcatggaatatatcagcagatgaagcttagatatagttatgccatgttttgcactacttgcctgtacagactaacaagagttgctttcgtaaaacgcatggaatctacaaagcttttactctgtgctgtattgctgtggaatgctccacccctgtaacagtgtctaaggtaactgcttttgcccatgttttagggcttcaggagctaatgaaggaggagccctttgccttccccaagaaggcacaagagccgttctccgtctcctaggaggcgcaagagtccgtctccatcacaaaagcgttacagaagaaagagaagtccgagtgtcactagctctccagtcgctgcatctcagagttcccaccttgggttggcagagaataagaatgttattgatacacaaaggctagaagaagaaaagaaaagggaacatgcctcagtagaattgatgaaagaaataaaagaagggtatgtgtgaaatattaccagtatcatttcataaattttacagcagtttgtattaactattgtgcacgtcaccttggaaaccattaattttttttaaaaaaaaatcatgaatgcttcttgagatgtttggtgtagttgtcagagctgtcttactgagtcatcaggtcatgggttcgaagcaacttctccacatttatgtgggaaggctcgcctcggcttatcccttcacagacgctactcatgtgggagcctccagcagtaagtctgcccaatgctccttgagatgtgccatcagaagagtttttttccacataaacacaaagttacagaaaaaattatgcatgatttttattgactattttttgagcaaagagataagctattgccaggattaaaaaaactagaccaacataggaggaaccaggtggcattttattatcaagaagaaaatagccatgcaaattttccttgacgaggactagaacctaggtggcctgggctagccacagaaccacatgctctaccaattgcgatagatcagcttccttaacagtgagcatacggtcaggattgtctgagcatacaaccaggattatgtcatatatgttgattggaattatatattgtgattgcaactgtttgtttgttttttccatgtaggctatctattttgacacagatgttgtcctcagttgtgtttcaggactaaaagttttttagtaattgttcattattgagttagcactcatgtttttcgcttgatttgttgtgtgttggacttctctgtaatatcactatcatatgaactaggcagtagtatgatagatggaggatttctgagttagtttgacctctgcgctgtaatgttatctttagaaggtaaggaaaccgaaaaggctgaatttcaattatcaattatgtaccatgttgtcattgaaattcacttttttgtgctctaaatatgtaatgtagttattttagttcgtttctgatcgcagttttcctgcatacttgagaaaaaagaagcttgtttctgatcctttttttagtcatgccatgtggtatgagataacctgtcaggataaattatccaaaaatcattcctggttatgcagttccactaattagcagtaggtagtttattctataattgtattgaggcttgaattatgattttggttgggcatgtagtaagtagcatccaagaaatatggtttagttggaatatcttaatgcctcatgattagctctaaacctgccacaaattacttgacattcttctctacaggctttaccgaagggagctactgctatagttccacttgttatatttgatgatgcaattggtgatcatttatctactcttgatcagttttgataattcgtttttggatctggaacgaactagaggcgccaaaaggaagttgaactgagactattagagaaggagacggcaaaaagagttgaacaagctattaggaggaaggttgaggagagtctaaattgtgatgaaatcaaacatgaaatacatcgtcgaattgaggaaggacgaaagaggatacatgaggaggtagcaatccagattgagaaggaaaaggatgcagctttaaatgaagccaagctgaaagtggaacaagaaaaaaagaagcgggaggagctagagaaaaaacttgaagaagaacgaaagaaagctgaagaggcgttgatgaaagaagcgttggaacagcagcagaaagagctagagcggtaccaggagttggagaggcttcagaaagaaagagaggaggccatgaaacggaaaaaaatggaggaagagcagcagaggcaaaaccagatgaagctgctgggcaagaacaagtcgcggcctaagctgtcgtttgcttttgggatgaagtagcgttcgattcaccgaacgaaattagtgctttagtatactgtaaccgtgtagtgtagtacctctgtatgaaactgcccatttctaactctggcagacaaattgcgatgtcataaatgctcctgatctgcttcgtaagttgccggctcttggtggatgtggtttcatctgcttcttgctgttcagttggcgttgccttgcgagaagactgccagagaagaatccggttggtttgatcttgcatgtcaccaagatactatctccgtttgtgttgccccctagttcagcctgttcatatttgaactaaaacgtgataaataaaaaaaacggagggag

SEQ ID NO: 206710 - DNA, 1610 bp, Zea Mays
attacaatgagttgccactagatatacgcgaagcctctcccacctcatctgcctcgcgtgcggcggcggcgactccacctggcttgcgtcctcccgttttccagccagcaagccagactcctcccctctccgaagactccgatcgtccggattcatccagatccgggcgttctgagtcctgccgaggctctagatcgcgtcgcgcacgatgccacgcgacctgtcgcggtcgcggtctccgccgcgccgacgttggcggtcgccgtctcccgcgcggtaccgcggccggagggggcgcagggaccgaagccccagtcccatccgtagcaggtccccctatcgctcctcgtatagcttttactctgtgctgtattgctgtggaatgctccacccctgtaacagtgtctaaggtaactgcttttgcccatgttttagggcttcaggagctaatgaaggaggagccctttgccttccccaagaaggcacaagagccgttctccgtctcctaggaggcgcaagagtccgtctccatcacaaaagcgttacagaagaaagagaagtccgagtgtcactagctctccagtcgctgcatctcagagttcccaccttgggttggcagagaataagaatgttattgatacacaaaggctagaagaagaaaagaaaaggctttaccgaagggagctactgctatagttccacttgttatatttgatgatgcaattggtgatcatttatctactcttgatcagttttgataattcgtttttggatctggaacgaactagaggcgccaaaaggaagttgaactgagactattagagaaggagacggcaaaaagagttgaacaagctattaggaggaaggttgaggagagtctaaattgtgatgaaatcaaacatgaaatacatcgtcgaattgaggaaggacgaaagaggatacatgaggaggtagcaatccagattgagaaggaaaaggatgcagctttaaatgaagccaagctgaaagtggaacaagaaaaaaagaagcgggaggagctagagaaaaaacttgaagaagaacgaaagaaagctgaagaggcgttgatgaaagaagcgttggaacagcagcagaaagagctagagcggtaccaggagttggagaggcttcagaaagaaagagaggaggccatgaaacggaaaaaaatggaggaagagcagcagaggcaaaaccagatgaagctgctgggcaagaacaagtcgcggcctaagctgtcgtttgcttttgggatgaagtagcgttcgattcaccgaacgaaattagtgctttagtatactgtaaccgtgtagtgtagtacctctgtatgaaactgcccatttctaactctggcagacaaattgcgatgtcataaatgctcctgatctgcttcgtaagttgccggctcttggtggatgtggtttcatctgcttcttgctgttcagttggcgttgccttgcgagaagactgccagagaagaatccggttggtttgatcttgcatgtcaccaagatactatctccgtttgtgttgccccctagttcagcctgttcatatttgaactaaaacgtgataaataaaaaaaacggagggag

SEQ ID NO: 206711 - DNA, 1512 bp, Zea Mays
attacaatgagttgccactagatatacgcgaagcctctcccacctcatctgcctcgcgtgcggcggcggcgactccacctggcttgcgtcctcccgttttccagccagcaagccagactcctcccctctccgaagactccgatcgtccggattcatccagatccgggcgttctgagtcctgccgaggctctagatcgcgtcgcgcacgatgccacgcgacctgtcgcggtcgcggtctccgccgcgccgacgttggcggtcgccgtctcccgcgcggtaccgcggccggagggggcgcagggaccgaagccccagtcccatccgtagcaggtccccctatcgctcctcgtatagaaggaggagccctttgccttccccaagaaggcacaagagccgttctccgtctcctaggaggcgcaagagtccgtctccatcacaaaagcgttacagaagaaagagaagtccgagtgtcactagctctccagtcgctgcatctcagagttcccaccttgggttggcagagaataagaatgttattgatacacaaaggctagaagaagaaaagaaaaggctttaccgaagggagctactgctatagttccacttgttatatttgatgatgcaattggtgatcatttatctactcttgatcagttttgataattcgtttttggatctggaacgaactagaggcgccaaaaggaagttgaactgagactattagagaaggagacggcaaaaagagttgaacaagctattaggaggaaggttgaggagagtctaaattgtgatgaaatcaaacatgaaatacatcgtcgaattgaggaaggacgaaagaggatacatgaggaggtagcaatccagattgagaaggaaaaggatgcagctttaaatgaagccaagctgaaagtggaacaagaaaaaaagaagcgggaggagctagagaaaaaacttgaagaagaacgaaagaaagctgaagaggcgttgatgaaagaagcgttggaacagcagcagaaagagctagagcggtaccaggagttggagaggcttcagaaagaaagagaggaggccatgaaacggaaaaaaatggaggaagagcagcagaggcaaaaccagatgaagctgctgggcaagaacaagtcgcggcctaagctgtcgtttgcttttgggatgaagtagcgttcgattcaccgaacgaaattagtgctttagtatactgtaaccgtgtagtgtagtacctctgtatgaaactgcccatttctaactctggcagacaaattgcgatgtcataaatgctcctgatctgcttcgtaagttgccggctcttggtggatgtggtttcatctgcttcttgctgttcagttggcgttgccttgcgagaagactgccagagaagaatccggttggtttgatcttgcatgtcaccaagatactatctccgtttgtgttgccccctagttcagcctgttcatatttgaactaaaacgtgataaataaaaaaaacggagggag

SEQ ID NO: 206712 - DNA, 2842 bp, Zea Mays
attacaatgagttgccactagatatacgcgaagcctctcccacctcatctgcctcgcgtgcggcggcggcgactccacctggcttgcgtcctcccgttttccagccagcaagccagactcctcccctctccgaagactccgatcgtccggattcatccagatccgggcgttctgagtcctgccgaggctctagatcgcgtcgcgcacgatgccacgcgacctgtcgcggtcgcggtctccgccgcgccgacgttggcggtcgccgtctcccgcgcggtaccgcggccggagggggcgcagggaccgaagccccagtcccatccgtagcaggtccccctatcgctcctcgtatagaaggaggagccctttgccttccccaagaaggcacaagagccgttctccgtctcctaggaggcgcaagagtccgtctccatcacaaaagcgttacagaagaaagagaagtccgagtgtcactagctctccagtcgctgcatctcagagttcccaccttgggttggcagagaataagaatgttattgatacacaaaggctagaagaagaaaagaaaagggaacatgcctcagtagaattgatgaaagaaataaaagaagggtatgtgtgaaatattaccagtatcatttcataaattttacagcagtttgtattaactattgtgcacgtcaccttggaaaccattaattttttttaaaaaaaaatcatgaatgcttcttgagatgtttggtgtagttgtcagagctgtcttactgagtcatcaggtcatgggttcgaagcaacttctccacatttatgtgggaaggctcgcctcggcttatcccttcacagacgctactcatgtgggagcctccagcagtaagtctgcccaatgctccttgagatgtgccatcagaagagtttttttccacataaacacaaagttacagaaaaaattatgcatgatttttattgactattttttgagcaaagagataagctattgccaggattaaaaaaactagaccaacataggaggaaccaggtggcattttattatcaagaagaaaatagccatgcaaattttccttgacgaggactagaacctaggtggcctgggctagccacagaaccacatgctctaccaattgcgatagatcagcttccttaacagtgagcatacggtcaggattgtctgagcatacaaccaggattatgtcatatatgttgattggaattatatattgtgattgcaactgtttgtttgttttttccatgtaggctatctattttgacacagatgttgtcctcagttgtgtttcaggactaaaagttttttagtaattgttcattattgagttagcactcatgtttttcgcttgatttgttgtgtgttggacttctctgtaatatcactatcatatgaactaggcagtagtatgatagatggaggatttctgagttagtttgacctctgcgctgtaatgttatctttagaaggtaaggaaaccgaaaaggctgaatttcaattatcaattatgtaccatgttgtcattgaaattcacttttttgtgctctaaatatgtaatgtagttattttagttcgtttctgatcgcagttttcctgcatacttgagaaaaaagaagcttgtttctgatcctttttttagtcatgccatgtggtatgagataacctgtcaggataaattatccaaaaatcattcctggttatgcagttccactaattagcagtaggtagtttattctataattgtattgaggcttgaattatgattttggttgggcatgtagtaagtagcatccaagaaatatggtttagttggaatatcttaatgcctcatgattagctctaaacctgccacaaattacttgacattcttctctacaggctttaccgaagggagctactgctatagttccacttgttatatttgatgatgcaattggtgatcatttatctactcttgatcagttttgataattcgtttttggatctggaacgaactagaggcgccaaaaggaagttgaactgagactattagagaaggagacggcaaaaagagttgaacaagctattaggaggaaggttgaggagagtctaaattgtgatgaaatcaaacatgaaatacatcgtcgaattgaggaaggacgaaagaggatacatgaggaggtagcaatccagattgagaaggaaaaggatgcagctttaaatgaagccaagctgaaagtggaacaagaaaaaaagaagcgggaggagctagagaaaaaacttgaagaagaacgaaagaaagctgaagaggcgttgatgaaagaagcgttggaacagcagcagaaagagctagagcggtaccaggagttggagaggcttcagaaagaaagagaggaggccatgaaacggaaaaaaatggaggaagagcagcagaggcaaaaccagatgaagctgctgggcaagaacaagtcgcggcctaagctgtcgtttgcttttgggatgaagtagcgttcgattcaccgaacgaaattagtgctttagtatactgtaaccgtgtagtgtagtacctctgtatgaaactgcccatttctaactctggcagacaaattgcgatgtcataaatgctcctgatctgcttcgtaagttgccggctcttggtggatgtggtttcatctgcttcttgctgttcagttggcgttgccttgcgagaagactgccagagaagaatccggttggtttgatcttgcatgtcaccaagatactatctccgtttgtgttgccccctagttcagcctgttcatatttgaactaaaacgtgataaataaaaaaaacggagggag

SEQ ID NO: 206713 - DNA, 2216 bp, Zea Mays
gtccccacgcacgcagcaagcacacccggttagcgtccactaatccgcgaaagcttgactgctccaccacgggtcaccggacatccggcttcctcgccccgtcccccgcacgcaggccgccccttaggctcctttgtcattcgaccttcctcttaagcacagcacaagcagctacaaggttctgacctacaagttccaatgacaatctgcagtagtgaagaaatcattgatgagtttgagttgctaacgcgtgatgctaggcgcgtgcagcaggatacactgagaaagattcttgaactgaatggtgatgccgaatatctgaatcgcttcaatcttggaaggagaacagactcaaagagctttaaatcctgcattcctctatgtgtgcatagtgacatagagtcctacatccagaggatagcggatggagatgactcgccggtgctaactgggaagcccatcacttccctctccttaagttctggtacgacgcaggggaaacccaagtttttgccattcaacgatgaattgcttgagagtacatttcaaatattccgaacctcatatgcctttagaaatcgtgaatatcctattgtcaatggaaaagccctgcagtttgtttacggtagcaagcaagtctttacccaagggggcattcttgcggcgactgcgacgacaaatctgtacaggagtcaacgtttcaaggaagcgatgaaggacgtcatgactcagtgctgcagtcctgatgaagtcatctttggtcctgacttccatcagtctttgtactgccatctattgtgtgggttaatcaactcagacgaagtccagtttgttttctcaccgtttgcgcacagcctcgtccatgcatttcacagtctcgaggaggtatgggaagatctgtgtgctgacataagagatggtgttctctcaaagagagtcaccgcgccatctatccgccaagctgtttcgaagatcttgaggccgaatcctgagctggctagctccatttacatcaagtgccagagcttgagcaattggtatggggtgatcccaacactgtggccaaacgtgaagtacatctatggcattatgacggggtccatggagccatacctgaagaaattgagacactatgctggtcacttgccgctgctgagtgctgattatggtgcatctgaaggatgggtcggctctaatataaacccaaccctgccacctgaggagagtcggagcctgtaggcctaactgaggttgaggttggcaaaatctacgaagttgtaataacaaattttgcaggtctataccgatacagactgggagatattgtgaagatagcaggcttccacaacgcaacaccagagctccagttcatctgccggagaagcctagtcctcagcgtcaacatcgacaagaacacagagaaagatctgcagctggccgtggaagccgcggagaagctcttggccgcggagaagctggaggtggtggacttcacgagcctcgtggacaggtcgagcgagccagggcactacgtcatcttctgggagctgagctccgacgacggcgccagcgaagacgtcctgagcggctgcgcgagctgcatggacctggccttcgcggacgcggggtacgtcgggtcgaggaagacccagaccatcggcgccctcgagctccgggtcctccggaagggagccttcgcgcaggtcatgaaccactacctgagcctcggcggcgccgtcagccagttcaagacgccgcggttcgtgagccagtccaacagcaaggtgctgcagatactgagccggaacgtcacccggagctacttcagcactgcgtatgggctctgatcgacgatgctacggcgctacgcaccaagtactggtaataggctggaagtatagtgatcgagagtgcatggcgcacgacgacgatccatcatgctgggagcctgggagttgcacgacgactgacagatgtatcatataattgtcagtgtaaatatagctgttcgacagtgtatgtaggcgaaggttgctgcgttccgtttagcagccgtgtcatcgctcaagaaaactcagaaagatcacatgtgttctgatttctgaatcaaaaagctgtgtacaagaagcagcgaactcactcgatcatattccgcgcgctacagccttcgcatatcagaaataccgccaaaagtttccatgtgctttacatacaaa

SEQ ID NO: 206714 - DNA, 2127 bp, Zea Mays
ctccctctttccccccgggcctcgtctgctctgttcgactgttgttgcagtgccttcgcctctccagcaagcaaagccgacccccacaccagccagtcaggaatcgccgccggcggaagccaagcatcatccccagacaccccgtccgtcatggatccggcggcgtggccgccgtggacgtcgctcctgctgcgggcgctgagccggcggcggacctgggtggcgctcttcctcgcagtgtacgccgcgctgctctcctcctcctggtccctgctggcctccgtccgcgcctggtactacgccgcctcctccgcctccgcctcggcggccgcctcggcagcgcccgcctggcccgcggcgctctacgcctccgtcacgtacggcgccgtgttcggcctactctccatggccgccgcgctcgccgtcgccgcccccgccatgctggtcacctggaccaccgtccttgtgctcctcgccttcgcggggcgccggcccaggtcgctcgtcgccgagggccgacgcgccaccagggacatcgcgggcctcgcgctccgcgtcctcctccgcgagggcaacgccgtcgccgcgctctgcgctgccgccagcttcgccgcgctcctcctcggccggcgcgacgacgatgccgcacgccgcgcttcctagttcgagctggttgtagcctgttgtagcatcgcccccctccccttttacacctcttcctcctcttctctcaagctagatctccagccctgttgttcctctccgggcgtaaccgcctgcgcaagagattatgatttgtttgttgcagctagtaggtgtaaattatcacaccagtttgtttcagttactccacaaattggacactgatggcatctgtaatgaatgtagcttgtcttacagctcttgacgatgaaaatgattccgggggctaactaaccttacatacagcgtacatttgttactgttagcacagctttctttcagatgacgtgatctttttgttaggaacaatattggtcgctgtggtggaacactggaagccatccttaatgggcatgcatctgcgaaagtccagttggagccaactattacagatgaaatctaaattgaaaatgcgtgagctctcccctttgtcatgggtgccatcatcttcacatgctgatctggtggggaaaatcatcttaagttggcttgatgcaaccatctcttgtccgtcatcctgcctccagcctgaggaaagtactaggtatcgaggacttgatgcaagtagcactggcttgttccccattgagtatggctgtaacaattttaaacagacgagcaatagaccagtgatgcccaaagatcattagtgttggctccctttcagaaatgccgcagctttgtcattgtccagtacggaaacacaaacaccgatatttttaagtacttttagtcacctgtttcaccagtggaagaaatgacagatggcacagatgattcatctgtatgaaccagatatcaagctcaacagattatttggatgataaaactgatctcaaggctaactaaccttacatacagcgtaaatttgttactgttagcacagctttctttcagatgacgtgatctttttgttaggaacaagaacaatattggtcgcctacgcaaggatatcaagtacggccttggagaagcttaagggctcgttcgtttctgcaggattgcaccaagaattatttctgttgatcataacttatacaaatcagagaagcaatccgggccggaacagtttcggtcttctattccctgtcaaccgaacgggccctaagctaggtggttattggatcaggcgtctatgctgtgagagaactggcaaagaggatcctccgtttgtccttggcttctggtgttacagaagaaactgcagaacccatgagcgaaaagggtggattagttttagcaaacaagtggttacactagttgtagctgtactatgtgtcctctgaatttccctgtgaaagcaatatgatcaaagactgtcaaatatatccttttttaaaaaaaaaaattgcaatatgtaagtttatccagttggtgtagtgtcgatggttttcttcgtgttattattgttacttcggttttaac

SEQ ID NO: 206715 - DNA, 1415 bp, Zea Mays
ctccctctttccccccgggcctcgtctgctctgttcgactgttgttgcagtgccttcgcctctccagcaagcaaagccgacccccacaccagccagtcaggaatcgccgccggcggaagccaagcatcatccccagacaccccgtccgtcatggatccggcggcgtggccgccgtggacgtcgctcctgctgcgggcgctgagccggcggcggacctgggtggcgctcttcctcgcagtgtacgccgcgctgctctcctcctcctggtccctgctggcctccgtccgcgcctggaacaatattggtcgctgtggtggaacactggaagccatccttaatgggcatgcatctgcgaaagtccagttggagccaactattacagatgaaatctaaattgaaaatgcgtgagctctcccctttgtcatgggtgccatcatcttcacatgctgatctggtggggaaaatcatcttaagttggcttgatgcaaccatctcttgtccgtcatcctgcctccagcctgaggaaagtactaggtatcgaggacttgatgcaagtagcactggcttgttccccattgagtatggctgtaacaattttaaacagacgagcaatagaccagtgatgcccaaagatcattagtgttggctccctttcagaaatgccgcagctttgtcattgtccagtacggaaacacaaacaccgatatttttaagtacttttagtcacctgtttcaccagtggaagaaatgacagatggcacagatgattcatctgtatgaaccagatatcaagctcaacagattatttggatgataaaactgatctcaaggctaactaaccttacatacagcgtaaatttgttactgttagcacagctttctttcagatgacgtgatctttttgttaggaacaagaacaatattggtcgcctacgcaaggatatcaagtacggccttggagaagcttaagggctcgttcgtttctgcaggattgcaccaagaattatttctgttgatcataacttatacaaatcagagaagcaatccgggccggaacagtttcggtcttctattccctgtcaaccgaacgggccctaagctaggtggttattggatcaggcgtctatgctgtgagagaactggcaaagaggatcctccgtttgtccttggcttctggtgttacagaagaaactgcagaacccatgagcgaaaagggtggattagttttagcaaacaagtggttacactagttgtagctgtactatgtgtcctctgaatttccctgtgaaagcaatatgatcaaagactgtcaaatatatccttttttaaaaaaaaaaattgcaatatgtaagtttatccagttggtgtagtgtcgatggttttcttcgtgttattattgttacttcggttttaac

SEQ ID NO: 206716 - DNA, 2223 bp, Zea Mays
ctccctctttccccccgggcctcgtctgctctgttcgactgttgttgcagtgccttcgcctctccagcaagcaaagccgacccccacaccagccagtcaggaatcgccgccggcggaagccaagcatcatccccagacaccccgtccgtcatggatccggcggcgtggccgccgtggacgtcgctcctgctgcgggcgctgagccggcggcggacctgggtggcgctcttcctcgcagtgtacgccgcgctgctctcctcctcctggtccctgctggcctccgtccgcgcctggtactacgccgcctcctccgcctccgcctcggcggccgcctcggcagcgcccgcctggcccgcggcgctctacgcctccgtcacgtacggcgccgtgttcggcctactctccatggccgccgcgctcgccgtcgccgcccccgccatgctggtcacctggaccaccgtccttgtgctcctcgccttcgcggggcgccggcccaggtcgctcgtcgccgagggccgacgcgccaccagggacatcgcgggcctcgcgctccgcgtcctcctccgcgagggcaacgccgtcgccgcgctctgcgctgccgccagcttcgccgcgctcctcctcggccggcgcgacgacgatgccgcacgccgcgcttcctagttcgagctggttgtagcctgttgtagcatcgcccccctccccttttacacctcttcctcctcttctctcaagctagatctccagccctgttgttcctctccgggcgtaaccgcctgcgcaagagattatgatttgtttgttgcagctagtaggtgtaaattatcacaccagtttgtttcagttactccacaaattggacactgatggcatctgtaatgaatgtagcttgtcttacagctcttgacgatgaaaatgattccgggggctaactaaccttacatacagcgtacatttgttactgttagcacagctttctttcagatgacgtgatctttttgttaggaacaatattggtcgctgtggtggaacactggaagccatccttaatgggcatgcatctgcgaaagtccagttggagccaactattacagatgaaatccagtaaattgaaaatgcgtgagctctcccctttgtcatgggtgccatcatcttcacatgctgatctggtggggaaaatcatcttaagttggcttgatgcaaccatctcttgtccgtcatcctgcctccagcctgaggaaagtactaggtatcgaggacttgatgcaagtagcactggcttgttccccattgagtatggctgtaacaattttaaacagacgagcaatagaccagtgatgcccaaagatcattagtgttggctccctttcagaaatgccgcagctttgtcattgtccagtacggaaacacaaacaccgatatttttaagtacttttagtcacctgtttcaccagtggaagaaatgacagatggcacagatgattcatctgtatgaaccagatatcaagctcaacagattatttggatgataaaactgatctcaaggctaactaaccttacatacagcgtaaatttgttactgttagcacagctttctttcagatgacgtgatctttttgttaggaacaagaacaatattggtcgcctacgcaagggtactggacaatgacaaagctgcggcattagcaaatctggtatgaaccagatatcaagtaccgaaacactgatgattcttctgtatgaaccagatatcaagtacggccttggagaagcttaagggctcgttcgtttctgcaggattgcaccaagaattatttctgttgatcataacttatacaaatcagagaagcaatccgggccggaacagtttcggtcttctattccctgtcaaccgaacgggccctaagctaggtggttattggatcaggcgtctatgctgtgagagaactggcaaagaggatcctccgtttgtccttggcttctggtgttacagaagaaactgcagaacccatgagcgaaaagggtggattagttttagcaaacaagtggttacactagttgtagctgtactatgtgtcctctgaatttccctgtgaaagcaatatgatcaaagactgtcaaatatatccttttttaaaaaaaaaaattgcaatatgtaagtttatccagttggtgtagtgtcgatggttttcttcgtgttattattgttacttcggttttaac

SEQ ID NO: 206717 - DNA, 1405 bp, Zea Mays
ctccctctttccccccgggcctcgtctgctctgttcgactgttgttgcagtgccttcgcctctccagcaagcaaagccgacccccacaccagccagtcaggaatcgccgccggcggaagccaagcatcatccccagacaccccgtccgtcatggatccggcggcgtggccgccgtggacgtcgctcctgctgcgggcgctgagccggcggcggacctgggtggcgctcttcctcgcagtgtacgccgcgctgctctcctcctcctggtccctgctggcctccgtccgcgcctggaacaatattggtcgctgtggtggaacactggaagccatccttaatgggcatgcatctgcgaaagtccagttggagccaactattacagatgaaatctaaattgaaaatgcgtgagctctcccctttgtcatgggtgccatcatcttcacatgctgatctggtggggaaaatcatcttaagttggcttgatgcaaccatctcttgtccgtcatcctgcctccagcctgaggaaagtactaggtatcgaggacttgatgcaagtagcactggcttgttccccattgagtatggctgtaacaattttaaacagacgagcaatagaccagtgatgcccaaagatcattagtgttggctccctttcagaaatgccgcagctttgtcattgtccagtacggaaacacaaacaccgatatttttaagtacttttagtcacctgtttcaccagtggaagaaatgacagatggcacagatgattcatctgtatgaaccagatatcaagctcaacagattatttggatgataaaactgatctcaaggctaactaaccttacatacagcgtaaatttgttactgttagcacagctttctttcagatgacgtgatctttttgttaggaacaagaacaatattggtcgcctacgcaagggtactggacaatgacaaagctgcggcattagcaaatctggattgcaccaagaattatttctgttgatcataacttatacaaatcagagaagcaatccgggccggaacagtttcggtcttctattccctgtcaaccgaacgggccctaagctaggtggttattggatcaggcgtctatgctgtgagagaactggcaaagaggatcctccgtttgtccttggcttctggtgttacagaagaaactgcagaacccatgagcgaaaagggtggattagttttagcaaacaagtggttacactagttgtagctgtactatgtgtcctctgaatttccctgtgaaagcaatatgatcaaagactgtcaaatatatccttttttaaaaaaaaaaattgcaatatgtaagtttatccagttggtgtagtgtcgatggttttcttcgtgttattattgttacttcggttttaac

SEQ ID NO: 206718 - DNA, 2240 bp, Zea Mays
ctccctctttccccccgggcctcgtctgctctgttcgactgttgttgcagtgccttcgcctctccagcaagcaaagccgacccccacaccagccagtcaggaatcgccgccggcggaagccaagcatcatccccagacaccccgtccgtcatggatccggcggcgtggccgccgtggacgtcgctcctgctgcgggcgctgagccggcggcggacctgggtggcgctcttcctcgcagtgtacgccgcgctgctctcctcctcctggtccctgctggcctccgtccgcgcctggtactacgccgcctcctccgcctccgcctcggcggccgcctcggcagcgcccgcctggcccgcggcgctctacgcctccgtcacgtacggcgccgtgttcggcctactctccatggccgccgcgctcgccgtcgccgcccccgccatgctggtcacctggaccaccgtccttgtgctcctcgccttcgcggggcgccggcccaggtcgctcgtcgccgagggccgacgcgccaccagggacatcgcgggcctcgcgctccgcgtcctcctccgcgagggcaacgccgtcgccgcgctctgcgctgccgccagcttcgccgcgctcctcctcggccggcgcgacgacgatgccgcacgccgcgcttcctagttcgagctggttgtagcctgttgtagcatcgcccccctccccttttacacctcttcctcctcttctctcaagctagatctccagccctgttgttcctctccgggcgtaaccgcctgcgcaagagattatgatttgtttgttgcagctagtaggtgtaaattatcacaccagtttgtttcagttactccacaaattggacactgatggcatctgtaatgaatgtagcttgtcttacagctcttgacgatgaaaatgattccgggggctaactaaccttacatacagcgtacatttgttactgttagcacagctttctttcagatgacgtgatctttttgttaggaacaatattggtcgctgtggtggaacactggaagccatccttaatgggcatgcatctgcgaaagtccagttggagccaactattacagatgaaatctctttttatgggctcagcagtaaattgaaaatgcgtgagctctcccctttgtcatgggtgccatcatcttcacatgctgatctggtggggaaaatcatcttaagttggcttgatgcaaccatctcttgtccgtcatcctgcctccagcctgaggaaagtactaggtatcgaggacttgatgcaagtagcactggcttgttccccattgagtatggctgtaacaattttaaacagacgagcaatagaccagtgatgcccaaagatcattagtgttggctccctttcagaaatgccgcagctttgtcattgtccagtacggaaacacaaacaccgatatttttaagtacttttagtcacctgtttcaccagtggaagaaatgacagatggcacagatgattcatctgtatgaaccagatatcaagctcaacagattatttggatgataaaactgatctcaaggctaactaaccttacatacagcgtaaatttgttactgttagcacagctttctttcagatgacgtgatctttttgttaggaacaagaacaatattggtcgcctacgcaagggtactggacaatgacaaagctgcggcattagcaaatctggtatgaaccagatatcaagtaccgaaacactgatgattcttctgtatgaaccagatatcaagtacggccttggagaagcttaagggctcgttcgtttctgcaggattgcaccaagaattatttctgttgatcataacttatacaaatcagagaagcaatccgggccggaacagtttcggtcttctattccctgtcaaccgaacgggccctaagctaggtggttattggatcaggcgtctatgctgtgagagaactggcaaagaggatcctccgtttgtccttggcttctggtgttacagaagaaactgcagaacccatgagcgaaaagggtggattagttttagcaaacaagtggttacactagttgtagctgtactatgtgtcctctgaatttccctgtgaaagcaatatgatcaaagactgtcaaatatatccttttttaaaaaaaaaaattgcaatatgtaagtttatccagttggtgtagtgtcgatggttttcttcgtgttattattgttacttcggttttaac

SEQ ID NO: 206719 - DNA, 2122 bp, Zea Mays
gctttctccctctttccccccgggcctcgtctgctctgttcgactgttgttgcagtgccttcgcctctccagcaagcaaagccgacccccacaccagccagtcaggaatcgccgccggcggaagccaagcatcatccccagacaccccgtccgtcatggatccggcggcgtggccgccgtggacgtcgctcctgctgcgggcgctgagccggcggcggacctgggtggcgctcttcctcgcagtgtacgccgcgctgctctcctcctcctggtccctgctggcctccgtccgcgcctggtactacgccgcctcctccgcctccgcctcggcggccgcctcggcagcgcccgcctggcccgcggcgctctacgcctccgtcacgtacggcgccgtgttcggcctactctccatggccgccgcgctcgccgtcgccgcccccgccatgctggtcacctggaccaccgtccttgtgctcctcgccttcgcggggcgccggcccaggtcgctcgtcgccgagggccgacgcgccaccagggacatcgcgggcctcgcgctccgcgtcctcctccgcgagggcaacgccgtcgccgcgctctgcgctgccgccagcttcgccgcgctcctcctcggccggcgcgacgacgatgccgcacgccgcgcttcctagttcgagctggttgtagcctgttgtagcatcgcccccctccccttttacacctcttcctcctcttctctcaagctagatctccagccctgttgttcctctccgggcgtaaccgcctgcgcaagagattatgatttgtttgttgcagctagtaggtgtaaattatcacaccagtttgtttcagttactccacaaattggacactgatggcatctgtaatgaatgtagcttgtcttacagctcttgacgatgaaaatgattccgggggctaactaaccttacatacagcgtacatttgttactgttagcacagctttctttcagatgacgtgatctttttgttaggaacaatattggtcgctgtggtggaacactggaagccatccttaatgggcatgcatctgcgaaagtccagttggagccaactattacagatgaaatctaaattgaaaatgcgtgagctctcccctttgtcatgggtgccatcatcttcacatgctgatctggtggggaaaatcatcttaagttggcttgatgcaaccatctcttgtccgtcatcctgcctccagcctgaggaaagtactaggtatcgaggacttgatgcaagtagcactggcttgttccccattgagtatggctgtaacaattttaaacagacgagcaatagaccagtgatgcccaaagatcattagtgttggctccctttcagaaatgccgcagctttgtcattgtccagtacggaaacacaaacaccgatatttttaagtacttttagtcacctgtttcaccagtggaagaaatgacagatggcacagatgattcatctgtatgaaccagatatcaagctcaacagattatttggatgataaaactgatctcaaggctaactaaccttacatacagcgtaaatttgttactgttagcacagctttctttcagatgacgtgatctttttgttaggaacaagaacaatattggtcgcctacgcaagggtactggacaatgacaaagctgcggcattagcaaatctggattgcaccaagaattatttctgttgatcataacttatacaaatcagagaagcaatccgggccggaacagtttcggtcttctattccctgtcaaccgaacgggccctaagctaggtggttattggatcaggcgtctatgctgtgagagaactggcaaagaggatcctccgtttgtccttggcttctggtgttacagaagaaactgcagaacccatgagcgaaaagggtggattagttttagcaaacaagtggttacactagttgtagctgtactatgtgtcctctgaatttccctgtgaaagcaatatgatcaaagactgtcaaatatatccttttttaaaaaaaaaaattgcaatatgtaagtttatccagttggtgtagtgtcgatggttttcttcgtgttattattgttacttcggttttaac

SEQ ID NO: 206720 - DNA, 558 bp, Zea Mays
atcagcatagtatataaaattccgttctctcagtcctgtttccccgccgccgcctccaagcgccccagcgagccagctccggcgaagtcaatcctgcgctccgcaggcagcatcaagcatggcggacacgaaggcgtcacccgcggtgacgctccgcacgcgcaagttcatgaccaaccgcctcctctcccgcaagcagttcgtgctcgaggttctccacccgggccgcgccaacgtctctaaggcggagctcaaggagaggctggctaagatgtacgaggtgaaggatcccaactgcatcttcgtcttcaagttccgcacccacttcggaggcggcaagtctaccggattcggtctcatctacgacaacgtcgactcagccaagaagttcgagcccaagtacaggcttatcaggaacggtcttgctaccaaggtggagaagtcgcgcaagcagatgaaggagaggaagaacagggcgaagaagatccgcggtgtgaagaagacaaaggctggggacgccaagaagaaatgagcaagaagactctggatcggctctcg

SEQ ID NO: 206721 - DNA, 2483 bp, Zea Mays
agcaaaagcaacagggccaccagcccagcgcgatatcacaggacggtcttgctccgcccaggcccatgtgagtcgcccggcccggcccaacttgaccgcactctcgtgcaggaaatcacccggaccggtaccggcagctgttcctgttcgcgtgtttattctgcgccgagactgaaaacggcatcagtagcagacgcaggcgaccacgaggagtgacggcatcagctgcggcagcgacgcccaacaacggcacctcatgggcgccgacgacgacgacgctgccgcctgccgctgtggcggcgcgagagagggaggcggagatcgagcaggccatgcgcgcccgcgtctcagacttcaagaagcaggccgagctcgaatcaaaaagataatgcaagcagatgaggatgttggaaagattgcactagcagttcctgttttagtttcgaggtctcttgaattgtttttacaagatttaattgaccgtacttatgaaattactcttcaaagtggagcaaagacactgaattccttccacctgtgagttcaatatcagctgacattttgttttttttttcataaaataaaaaggtgatgtgatgtatcttttaaaataaatggatctctttgatgaatttcagctgtgactttatttagcatttgtagtgagggtaatctagatgcttacaatttgcaattgctatgattcgacgtttgaactttggtgtacaatatcccccctgcccaaaataggattttatccaggattcatcttatttgtgttgcttatgccatcaaaataagttggtggataagctgtactgaaacagaattcattaattataggtcatgcttcatataattactacacattcaattgccttttggttgtagattctttggtataaggtttactggttaaaagttgttatctaagttaacatccataatatctgtaggtgggattcatacctggttggtccctgactatgtccagctaatttgtactatataagtaaataaggtacttgagctagagccatctaatgtttttgcatcacctctggaggaagtgatgaacagatcgcttttttggcacaagtctcaacttgaaaataatcttttggggcatgtttggttcgataccttccaggcagctcactggccaggcagcccgaaatcagaagcctgggaacgctgcctgagcgaggcagcttctgtcatgagccaaccaaacagccccttaattcgaaaatggaagcaggttggttttagtaaccaatttggaagttgatatttttctttccactgtaagcgacttcagtgtagtttatggaagttgagctcatggacatttctagagaagatatttgtagaggttatgttatatatccttgaaactgaaactggtcagatagttgtcccatcctgctcatgtagatctagcatacgagcttgtctaatttatttggaattaagtttcatatttaaatgtgagttgtattgaggttaatttcgatggaccatgtttttttcttgttaaggcacttagctgatagtttcaatgcatgcgtcttggtattgtttgcatggcatatcagttttgagccattcatattaacattcatatgtctatcttctgacatctgacgttcaggaagcaatgtgtgaagaggtacagttcttttgatttcctaactgaagttgtcagcaaggtaccagatcttggtggcgctgattcctgtggagatgaaagaggattacctagaagaagaaagtcaaatggcagtgacccagagaatgatgaatcaagatctagtaaaatggccataagaaatgcaaacatcagccccagaggacgtgggaggggtcgaggcagaggacgaggtcggccaccaaccaagagaaaggaggttggttatgtacaatttgaagatgagagcagcatgtttgctgaacaaggtgagcccttgccaggagaggaaacagttcaagagatcaatggcaacgagaccatgcctcaaagcacgcaacctccagtagaggctccgccaacagcccttgcacaagctacaacaagttctaaggcggaagaagcgaacagtgatcatcagtcagattggcctatgccagatgccattggaagcatcggtgtcgtgccatctggttttggacatctgacagtgcaggttgaagatgaggactacgacaatgaggattagtcagggtcatcttctcattgtatgcactaacaggactgttctggtgttgtaaaatgtaaatatagtttgaaatagttgccgcagtttacctgtgattgtctgtcgttttatgcggttatgtagtcctgtgtaactttcgttctccaataattgcttggtagttgcttttttacatgattcaagtgttttgtgacatttaacacagtatttgagcagggattgcctattttaagtatttttgtcttatttcaccgcagtctttga

SEQ ID NO: 206722 - DNA, 2373 bp, Zea Mays
ggcctaacagccttacgtaaacagtccagtccgtttcctttcggccttaacacagctatttcgggccgagaaaacccatgtagagcccggcccactttaccgccactgcttgatgtgacgcggtgagaacacgggcgcctcgggacggacgatgccgtcgcgtcgcgatggtgcgctgcgcgcctctactcctccgtggcttcgtgcgttcaatttgcttgtggaacgtggaagaagagcgagaacgccaaacgagaaaagaaacccaagccttcgccatcaaaaaaaaaagaaaaaaagaaaaaaaagagcagaaaaagtagagtagactacgacagcgtccggcgaggaggcggaggcgaagatgaggaagaagctcggcacccggttccccgcgcgaggtctcttgaattgtttttacaagatttaattgaccgtacttatgaaattactcttcaaagtggagcaaagacactgaattccttccacctgtgagttcaatatcagctgacattttgttttttttttcataaaataaaaaggtgatgtgatgtatcttttaaaataaatggatctctttgatgaatttcagctgtgactttatttagcatttgtagtgagggtaatctagatgcttacaatttgcaattgctatgattcgacgtttgaactttggtgtacaatatcccccctgcccaaaataggattttatccaggattcatcttatttgtgttgcttatgccatcaaaataagttggtggataagctgtactgaaacagaattcattaattataggtcatgcttcatataattactacacattcaattgccttttggttgtagattctttggtataaggtttactggttaaaagttgttatctaagttaacatccataatatctgtaggtgggattcatacctggttggtccctgactatgtccagctaatttgtactatataagtaaataaggtacttgagctagagccatctaatgtttttgcatcacctctggaggaagtgatgaacagatcgcttttttggcacaagtctcaacttgaaaataatcttttggggcatgtttggttcgataccttccaggcagctcactggccaggcagcccgaaatcagaagcctgggaacgctgcctgagcgaggcagcttctgtcatgagccaaccaaacagccccttaattcgaaaatggaagcaggttggttttagtaaccaatttggaagttgatatttttctttccactgtaagcgacttcagtgtagtttatggaagttgagctcatggacatttctagagaagatatttgtagaggttatgttatatatccttgaaactgaaactggtcagatagttgtcccatcctgctcatgtagatctagcatacgagcttgtctaatttatttggaattaagtttcatatttaaatgtgagttgtattgaggttaatttcgatggaccatgtttttttcttgttaaggcacttagctgatagtttcaatgcatgcgtcttggtattgtttgcatggcatatcagttttgagccattcatattaacattcatatgtctatcttctgacatctgacgttcaggaagcaatgtgtgaagaggtacagttcttttgatttcctaactgaagttgtcagcaaggtaccagatcttggtggcgctgattcctgtggagatgaaagaggattacctagaagaagaaagtcaaatggcagtgacccagagaatgatgaatcaagatctagtaaaatggccataagaaatgcaaacatcagccccagaggacgtgggaggggtcgaggcagaggacgaggtcggccaccaaccaagagaaaggaggagaggaaacagttcaagagatcaatggcaacgagaccatgcctcaaagcacgcaacctccagtagaggctccgccaacagcccttgcacaagctacaacaagttctaaggcggaagaagcgaacagtgatcatcagtcagattggcctatgccagatgccattggaagcatcggtgtcgtgccatctggttttggacatctgacagtgcaggttgaagatgaggactacgacaatgaggattagtcagggtcatcttctcattgtatgcactaacaggactgttctggtgttgtaaaatgtaaatatagtttgaaatagttgccgcagtttacctgtgattgtctgtcgttttatgcggttatgtagtcctgtgtaactttcgttctccaataattgcttggtagttgcttttttacatgattcaagtgttttgtgacatttaacacagtatttgagcagggattgcctattttaagtatttttgtcttatttcaccgcagtctttga

SEQ ID NO: 206723 - DNA, 2136 bp, Zea Mays
cagcaattcagcatatatcgcaggctcgaatcaaaaagataatgcaagcagatgaggatgttggaaagattgcactagcagttcctgttttagtttcgaggtctcttgaattgtttttacaagatttaattgaccgtacttatgaaattactcttcaaagtggagcaaagacactgaattccttccacctgtgagttcaatatcagctgacattttgttttttttttcataaaataaaaaggtgatgtgatgtatcttttaaaataaatggatctctttgatgaatttcagctgtgactttatttagcatttgtagtgagggtaatctagatgcttacaatttgcaattgctatgattcgacgtttgaactttggtgtacaatatcccccctgcccaaaataggattttatccaggattcatcttatttgtgttgcttatgccatcaaaataagttggtggataagctgtactgaaacagaattcattaattataggtcatgcttcatataattactacacattcaattgccttttggttgtagattctttggtataaggtttactggttaaaagttgttatctaagttaacatccataatatctgtaggtgggattcatacctggttggtccctgactatgtccagctaatttgtactatataagtaaataaggtacttgagctagagccatctaatgtttttgcatcacctctggaggaagtgatgaacagatcgcttttttggcacaagtctcaacttgaaaataatcttttggggcatgtttggttcgataccttccaggcagctcactggccaggcagcccgaaatcagaagcctgggaacgctgcctgagcgaggcagcttctgtcatgagccaaccaaacagccccttaattcgaaaatggaagcaggttggttttagtaaccaatttggaagttgatatttttctttccactgtaagcgacttcagtgtagtttatggaagttgagctcatggacatttctagagaagatatttgtagaggttatgttatatatccttgaaactgaaactggtcagatagttgtcccatcctgctcatgtagatctagcatacgagcttgtctaatttatttggaattaagtttcatatttaaatgtgagttgtattgaggttaatttcgatggaccatgtttttttcttgttaaggcacttagctgatagtttcaatgcatgcgtcttggtattgtttgcatggcatatcagttttgagccattcatattaacattcatatgtctatcttctgacatctgacgttcaggaagcaatgtgtgaagaggtacagttcttttgatttcctaactgaagttgtcagcaaggtaccagatcttggtggcgctgattcctgtggagatgaaagaggattacctagaagaagaaagtcaaatggcagtgacccagagaatgatgaatcaagatctagtaaaatggccataagaaatgcaaacatcagccccagaggacgtgggaggggtcgaggcagaggacgaggtcggccaccaaccaagagaaaggaggttggttatgtacaatttgaagatgagagcagcatgtttgctgaacaaggtgagcccttgccaggagaggaaacagttcaagagatcaatggcaacgagaccatgcctcaaagcacgcaacctccagtagaggctccgccaacagcccttgcacaagctacaacaagttctaaggcggaagaagcgaacagtgatcatcagtcagattggcctatgccagatgccattggaagcatcggtgtcgtgccatctggttttggacatctgacagtgcaggttgaagatgaggactacgacaatgaggattagtcagggtcatcttctcattgtatgcactaacaggactgttctggtgttgtaaaatgtaaatatagtttgaaatagttgccgcagtttacctgtgattgtctgtcgttttatgcggttatgtagtcctgtgtaactttcgttctccaataattgcttggtagttgcttttttacatgattcaagtgttttgtgacatttaacacagtatttgagcagggattgcctattttaagtatttttgtcttatttcaccgcagtctttga

SEQ ID NO: 206724 - DNA, 1433 bp, Zea Mays
ttggaccaatggctgaagcctaccacggtccacggcagctcttgttccgtgggcgcaagtcgaccgatcggcatattcgccagcagcgcaggcttccattttgatgcctccctccgtccccttccgctccaatcagcggccgagctgctcctctcgcccacgcccgagaccgagaggccgcgccggcgcacccaaataaacccgaggagtgcctacctggcctgggcgcctggttgagcggtaaacaaatccgtgggcgtcctgcggctgcgattagaatagagtagaattcatcagcgggtcgccgtcgccattggcgcggtgcgtgtgcgagcccgagccgtgcgaagcaggtgaggcgaggggacagacgggacacgggagcgaagcaaagcgaaggaaggagtttccagtgagcgcggatcgcggaggcggtttatatagccggagggcgcgcgctccggtccgctaacgtcctgcagggagggaagggcaggattaggcagggcagcgccgcgccggccggaccgcccgcccgcccgcccgtccacgagccacggactttcggccatgggggacgctggcgctgacgcctcctcctcgccgccgccgccgtccgggtccttctcctacttcgccgtcttccgcaactaccccctcgtcgccgccctgctcggcttcgccgtcgcccagtccatcaagttcttcgtcacacggtacaaggagaacagatgggatcccaagcggcttatcggctcgggtggcatgccgtcatcacattccgccacggttacagcactagcagtagcaattggattccaggatggctttagctgctccctctttgcaacagcaactatatttgcaagcgtggtaggctatcagttctccattccaacccatgttccttctgaagagcacaagaggtaatgtatgatgcttctggtatcagactgcatgctggaaagcaagcagaggtattgaatcaaatagtttgtgaacttccttctgaacaccccttgtctgagacaagaccactgcgagaacttttaggccatacaccaactcaggtggttgctggtgcattgcttgggtgtacaatagccacagcaggacaattattcctttgaactacgaaggtgcggcagaaatgttgtagcatttgtatcgcagggacttgagaagaagtttctccagtgttctgctactttaggtattggtaagatttgcatgttggtgctgtagtgttgttgaatgttgtatgttctgatggaatgtggttatatgtcaaaaaggtgacgttcacaggattgctgtacagaacattgttcatggttatgattgatgaaatctaaaatgtgattgaaacagctgcagaactaagggagtgtttggtttgatggacagcaaaaaaaaatgtctgtcgtgtttat

SEQ ID NO: 206725 - DNA, 1886 bp, Zea Mays
ttggaccaatggctgaagcctaccacggtccacggcagctcttgttccgtgggcgcaagtcgaccgatcggcatattcgccagcagcgcaggcttccattttgatgcctccctccgtccccttccgctccaatcagcggccgagctgctcctctcgcccacgcccgagaccgagaggccgcgccggcgcacccaaataaacccgaggagtgcctacctggcctgggcgcctggttgagcggtaaacaaatccgtgggcgtcctgcggctgcgattagaatagagtagaattcatcagcgggtcgccgtcgccattggcgcggtgcgtgtgcgagcccgagccgtgcgaagcaggtgaggcgaggggacagacgggacacgggagcgaagcaaagcgaaggaaggagtttccagtgagcgcggatcgcggaggcggtttatatagccggagggcgcgcgctccggtccgctaacgtcctgcagggagggaagggcaggattaggcagggcagcgccgcgccggccggaccgcccgcccgcccgcccgtccacgagccacggactttcggccatgggggacgctggcgctgacgcctcctcctcgccgccgccgccgtccgggtccttctcctacttcgccgtcttccgcaactaccccctcgtcgccgccctgctcggcttcgccgtcgcccagtccatcaagttcttcgtcacacggtacaaggagaacagatgggatcccaagcggcttatcggctcgggtggcatgccgtcatcacattccgccacggttacagcactagcagtagcaattggattccaggatggctttagctgctccctctttgcaacagcaactatatttgcaagcgtggtaggctatcagttctccattccaacccatgttccttctgaagagcacaagaggttttacttcttcaatcttgattgaaaaaaaaactggtcatttatattgttgtcgcttggatgcaattttcagccttgttggacgttattctgttgcgtgtgggcatattgtgcacacgtttatgctgacttcctccaatttttgaggtctcacgaatttattttttgtgacttggcaggtaatgtatgatgcttctggtatcagactgcatgctggaaagcaagcagaggtattgaatcaaatagtttgtgaacttccttctgaacaccccttgtctgagacaagaccactgcgagaacttttaggccatacaccaactcaggtttgttcacatgtcctttttattgttttttcaagtgaatgcatttcattgttgttggcaaaacgaaagcgatgggttattggcatagacaccaagtgaacctcaaacgggccgaccccacatgcctctttttacttggcaacaatatgtagatatgcctatctactatcaacatcattcagcttcgtcagcaccactatcttctcgtggcacacatttatgaactacctttttttatgttttactaatttcttgggtgtcaaattgctcccaggtggttgctggtgcattgcttgggtgtacaatagccacagcaggacaattattcctttgaactacgaaggtgcggcagaaatgttgtagcatttgtatcgcagggacttgagaagaagtttctccagtgttctgctactttaggtattggtaagatttgcatgttggtgctgtagtgttgttgaatgttgtatgttctgatggaatgtggttatatgtcaaaaaggtgacgttcacaggattgctgtacagaacattgttcatggttatgattgatgaaatctaaaatgtgattgaaacagctgcagaactaagggagtgtttggtttgatggacagcaaaaaaaaatgtctgtcgtgtttat

SEQ ID NO: 206726 - DNA, 1623 bp, Zea Mays
tgcctatatctgtgtaccatacccactgcaaccaatcaatccagtatagatgatgttgcctatatttgtataccttgcccatcacaatcaattaatctactatatttcacgagtctgaaatggccagtgattcttctgctgccctcacatgcctttgcggctgcacatccctttcctacgtgtctccgtggcagcgccctttcccgcacgaagtcaacatttatgttggagaataaggatgttgtgtgtccttgccctcatgatctttggacattatcaaatgagatgcccagatttatggcttagcttcttaatgcaatagtaatataatatgcagctctcattgtgttcattgttcaattgcaaagaaggaacaagtctattttggccatcaaactatagcccagatttatgtatttggtttcacaaatgaaaatccccacagaataaaaaagtgtgctgttggtaggacacgatttacaataacttgcctgaagacatttgcatcacgaattgctgttggtgattgtcgtgatggtgttctcttctattcttataatgagagtcataggaagttggaattggtctattctgatcctgctcatagattggtgggtgatattgctcttttaaattgtgaaactgctgtggtatcagatcgacgtgggagcatatctgtattatcatgcaccagattggaagtttcagaaagtccacagaagaacttagccgtgaattgttcattttatatgggtgaaacagccatgagcattcagaaggctgcattcaggtatcggcttccaattgatgatgatactgacccggtgcttgagacagtttacaactgtatcgtggcaagtaccatgttggggagtctctttgttatgattccactttcaagtgaggagcatcagcttttgcaagatgtccaagaaaaactctcagtacacccattaactgcaccggtcctgggaaatgatcatgcagagttccgtcagcgtggtaccccttcggtagtgcctcccattcttgacggtgatatgcttgtgcaattcttggagctcaccggtgaacaacagcaagccatccttactcatgctttgccagggaaggggcaacataggcccctctcggttttccaggttttgcaaacattagagcgcgtccattacgctcttaactgaggctttcttcaatcacagttactacaaggtttggatattagagctggttgaccttcattgtttgagatgccgtcagagctgaggttttagtgaccttcgcaatctagacggccgattccaagtctgccatgatatttatcagaacgtttgattgatgatgcaactggagcttgatactgggaagtctcatggtggcgagtatcccgtggaggcaccagattcgtcgaacctcctgtgtatatacagtcggccgcttttggtagactgttgtatggcgcattctgcatagaaacgaatattctttccgtttgtttcaatagataatgtaatgtttcttacgtcagctggtcggatgctcaacgagaaataagggaaacaatgaattgcattggccgtcctgctctatcacatgccattactgattagtgatgaatgcatg

SEQ ID NO: 206727 - DNA, 4070 bp, Zea Mays
tgctggtggagttccagtcgagacagttttctgccgagagagcatatataattatttgtgtaagaggttcttcgcaattgccaatattgagttatcgaaaccaggaaatctgaggcatcatctgggaagaattttagcgatagatcgagaatctaatttcgttgctgtcagttcatatgaggataagtttgcccttatacatgtttctgtttcccagagtggttctggcagcggtattatttctgagaagattttgaagatcttccatgtcataatttcagaaatatttttatccaccagaaaatgaagatgacgcaaggatcataacttcgtctaggaccagcatccgtggtacaatttggacaatgcgcttcatatctgtgccccaagatgaagaatactatccagttctggcaatgataattaacaggaaaggctctgatgtgaatgacttgtcgttatttggatatgactccagcagctgtgttatcaaccacctctctagttattcagaaattggacctttggtacttgacgtatcagaaattcctgaaacgtttggctttgcacttctgttgcgtgttggtgatgctttattgttggatcttagaaatccaacaaatgtctgctgtatccaaagagtcagcttgacgactaacctgattggagagccaatcactgttgaagatccctgtccaggattagatgttgatgatgatgtggctgcttgtgctttgctagaattgagagattctggtaataacataatgaaggatgatggttatatggacattgatggtgttgacagcagaagtaatgtgaaaccaaggatcgtttgctcgtggagctgggagccacctgaccctgtcaggcgaggatgtgcaaggcttctattttgtttggatgatggagaatttcatattttggaatttactttggatgttgaaggggcgaagctgtacacatttgaatatattgataggactttgccttgtagacctcttttttggatgaaaaacagaatgataatagggtttgtagagatgggggacggcatgatttttaaacttggtcaccgcaggttgcttcataaaagcactattcagaatgtagcaccaatattggatctagcaattgctgattaccatggtgagaaacaggaccagatgtttgcatgttgtggaatgtcccctgagggctctcttcgagttttaaggaatggtgtcaatgtggacagacttctgaaaactgaagctatttaccagggtgtcactggtttgtggactttgagaatgaaggcaactgatgcctaccattcttttcttgtgttgtcatttgtggaggaaaccagaatactgtcagtaggactaagttttaatgacatcagtgatgccgtgggattccagcctgatgtttgcactttagcatgtggtttggtggctgataatctgctagttcaaatttacagcaaaggtgttaaggtctgtttgcctacagtatacgctcaccctgaaggtgcccctttaacttctccaatttgcactgactggtatcctgctatcactatcagtgttggtgctgtaggacataatattgttgttgttgctacatctaatccttgttgcttatatgtccttggtgttagatcatcatcttcttaccagtacgagttgtatgcaacacatcatgtgcaattgcagtatgaagtatcatgcatatcaatcccacaagaggattgtatacatgataatgtatctttcagctgtggagagggtgatgacatttgtaagaacccccctcctaaagttaatgtttgcaagtttgctgttattggaactcatagaccttcagtggaaatcatctccttggaacctggagaagcattaagggcttgagaaacggaatgctactcagatttgagtcagaaacacgtgattatctccctggttttctctacaaggactcttctattccttctgttaatacattccttcagttgatttcgatacggcgtattggaattactcctgtactgttagtgccaatacatgattcagctaatgctgacatcattgttctcagtgatagaccttggctattacatgcagcaagacatagcctggcatattcgtccatttcatttctttctgcttctcatgtcacacctgtttcatctgttgattgccccaatggtctactgtttgttgctgagagctgtttgcatttggttgaactggttcatgggaagcgattgaatgcacaaaagttttcaattggagggactccaaggaaagtgctataccataatgaaagcagaacactgttggtactgagaactgggctaaatggtgcatcgtcttcttcagatgttgtacaagtagatccacaaaatggggtattactttccagatataaatgtgaacctggcgaaacagcgaaatgcatgcaaattgcaaaaataggaaatgatcaagttttaattgttgggaccactaagtctgctggacggccgatgatgtcaaatggtgaagcagaaagcatcaagggacgcctgattgttttaagcttggaggccgttgaaagtcctcgtgagagcagttcgtttattccaacttttagttttaatccctcttcacattctggttctcctttccacgagattgttggatatacaactgaggaattttctagtaacagcatgtgcagcagtcctgatgagtttagctgcaaccagatccaagctgaacaaatgacagggcaattgagatcattgactcaatatatattgaatggcgcagttcttgctctgtgtccctatctagatcgttatgtgttggcagctgctggtaatatgatttatgtatttggtttcacaaatgaaaatccccacagaataaaaaagtgtgctgttggtaggacacgatttacaataacttgcctgaagacatttgcatcacgaattgctgttggtgattgtcgtgatggtgttctcttctattcttataatgagagtcataggaagttggaattggtctattctgatcctgctcatagattggtgggtgatattgctcttttaaattgtgaaactgctgtggtatcagatcgacgtgggagcatatctgtattatcatgcaccagattggaagtttcagaaagtccacagaagaacttagccgtgaattgttcattttatatgggtgaaacagccatgagcattcagaaggctgcattcaggtatcggcttccaattgatgatgatactgacccggtgcttgagacagtttacaactgtatcgtggcaagtaccatgttggggagtctctttgttatgattccactttcaagtgaggagcatcagcttttgcaagatgtccaagaaaaactctcagtacacccattaactgcaccggtcctgggaaatgatcatgcagagttccgtcagcgtggtaccccttcggtagtgcctcccattcttgacggtgatatgcttgtgcaattcttggagctcaccggtgaacaacagcaagccatccttactcatgctttgccagggaaggggcaacataggcccctctcggttttccaggttttgcaaacattagagcgcgtccattacgctcttaactgaggctttcttcaatcacagttactacaaggtttggatattagagctggttgaccttcattgtttgagatgccgtcagagctgaggttttagtgaccttcgcaatctagacggccgattccaagtctgccatgatatttatcagaacgtttgattgatgatgcaactggagcttgatactgggaagtctcatggtggcgagtatcccgtggaggcaccagattcgtcgaacctcctgtgtatatacagtcggccgcttttggtagactgttgtatggcgcattctgcatagaaacgaatattctttccgtttgtttcaatagataatgtaatgtttcttacgtcagctggtcggatgctcaacgagaaataagggaaacaatgaattgcattggccgtcctgctctatcacatgccattactgattagtgatgaatgcatg

SEQ ID NO: 206728 - DNA, 4211 bp, Zea Mays
tcttttcacaaaatctgggatccatgtggcgtccgctttgctttctacatgtcaatgactcaaggggcaagcacaagactgctggtggagttccagtcgagacagttttctgccgagagagcatatataattatttgtgtaagaggttcttcgcaattgccaatattgagttatcgaaaccaggaaatctgaggcatcatctgggaagaattttagcgatagatcgagaatctaatttcgttgctgtcagttcatatgaggataagtttgcccttatacatgtttctgtttcccagagtggttctggcagcggtattatttctgagaagaaaatgaagatgacgcaaggatcataacttcgtctaggaccagcatccgtggtacaatttggacaatgcgcttcatatctgtgccccaagatgaagaatactatccagttctggcaatgataattaacaggaaaggctctgatgtgaatgacttgtcgttatttggatatgactccagcagctgtgttatcaaccacctctctagttattcagaaattggacctttggtacttgacgtatcagaaattcctgaaacgtttggctttgcacttctgttgcgtgttggtgatgctttattgttggatcttagaaatccaacaaatgtctgctgtatccaaagagtcagcttgacgactaacctgattggagagccaatcactgttgaagatccctgtccaggattagatgttgatgatgatgtggctgcttgtgctttgctagaattgagagattctggtaataacataatgaaggatgatggttatatggacattgatggtgttgacagcagaagtaatgtgaaaccaaggatcgtttgctcgtggagctgggagccacctgaccctgtcaggcgaggatgtgcaaggcttctattttgtttggatgatggagaatttcatattttggaatttactttggatgttgaaggggcgaagctgtacacatttgaatatattgataggactttgccttgtagacctcttttttggatgaaaaacagaatgataatagggtttgtagagatgggggacggcatgatttttaaacttggtcaccgcaggttgcttcataaaagcactattcagaatgtagcaccaatattggatctagcaattgctgattaccatggtgagaaacaggaccagatgtttgcatgttgtggaatgtcccctgagggctctcttcgagttttaaggaatggtgtcaatgtggacagacttctgaaaactgaagctatttaccagggtgtcactggtttgtggactttgagaatgaaggcaactgatgcctaccattcttttcttgtgttgtcatttgtggaggaaaccagaatactgtcagtaggactaagttttaatgacatcagtgatgccgtgggattccagcctgatgtttgcactttagcatgtggtttggtggctgataatctgctagttcaaatttacagcaaaggtgttaaggtctgtttgcctacagtatacgctcaccctgaaggtgcccctttaacttctccaatttgcactgactggtatcctgctatcactatcagtgttggtgctgtaggacataatattgttgttgttgctacatctaatccttgttgcttatatgtccttggtgttagatcatcatcttcttaccagtacgagttgtatgcaacacatcatgtgcaattgcagtatgaagtatcatgcatatcaatcccacaagaggattgtatacatgataatgtatctttcagctgtggagagggtgatgacatttgtaagaacccccctcctaaagttaatgtttgcaagtttgctgttattggaactcatagaccttcagtggaaatcatctccttggaacctggagaagcattaagggtattaactattgggactgtatctgtgaataatgcacttggcgcacctatgagtggttgtatacctgaaaatgtcaggtttgttgcggctgagaggttttacattcttgcaggcttgagaaacggaatgctactcagatttgagtcagaaacacgtgattatctccctggttttctctacaaggactcttctattccttctgttaatacattccttcagttgatttcgatacggcgtattggaattactcctgtactgttagtgccaatacatgattcagctaatgctgacatcattgttctcagtgatagaccttggctattacatgcagcaagacatagcctggcatattcgtccatttcatttctttctgcttctcatgtcacacctgtttcatctgttgattgccccaatggtctactgtttgttgctgagagctgtttgcatttggttgaactggttcatgggaagcgattgaatgcacaaaagttttcaattggagggactccaaggaaagtgctataccataatgaaagcagaacactgttggtactgagaactgggctaaatggtgcatcgtcttcttcagatgttgtacaagtagatccacaaaatggggtattactttccagatataaatgtgaacctggcgaaacagcgaaatgcatgcaaattgcaaaaataggaaatgatcaagttttaattgttgggaccactaagtctgctggacggccgatgatgtcaaatggtgaagcagaaagcatcaagggacgcctgattgttttaagcttggaggccgttgaaagtcctcgtgagagcagttcgtttattccaacttttagttttaatccctcttcacattctggttctcctttccacgagattgttggatatacaactgaggaattttctagtaacagcatgtgcagcagtcctgatgagtttagctgcaaccagatccaagctgaacaaatgacagggcaattgagatcattgactcaatatatattgaatggcgcagttcttgctctgtgtccctatctagatcgttatgtgttggcagctgctggtaatatgatttatgtatttggtttcacaaatgaaaatccccacagaataaaaaagtgtgctgttggtaggacacgatttacaataacttgcctgaagacatttgcatcacgaattgctgttggtgattgtcgtgatggtgttctcttctattcttataatgagagtcataggaagttggaattggtctattctgatcctgctcatagattggtgggtgatattgctcttttaaattgtgaaactgctgtggtatcagatcgacgtgggagcatatctgtattatcatgcaccagattggaagtttcagaaagtccacagaagaacttagccgtgaattgttcattttatatgggtgaaacagccatgagcattcagaaggctgcattcaggtatcggcttccaattgatgatgatactgacccggtgcttgagacagtttacaactgtatcgtggcaagtaccatgttggggagtctctttgttatgattccactttcaagtgaggagcatcagcttttgcaagatgtccaagaaaaactctcagtacacccattaactgcaccggtcctgggaaatgatcatgcagagttccgtcagcgtggtaccccttcggtagtgcctcccattcttgacggtgatatgcttgtgcaattcttggagctcaccggtgaacaacagcaagccatccttactcatgctttgccagggaaggggcaacataggcccctctcggttttccaggttttgcaaacattagagcgcgtccattacgctcttaactgaggctttcttcaatcacagttactacaaggtttggatattagagctggttgaccttcattgtttgagatgccgtcagagctgaggttttagtgaccttcgcaatctagacggccgattccaagtctgccatgatatttatcagaacgtttgattgatgatgcaactggagcttgatactgggaagtctcatggtggcgagtatcccgtggaggcaccagattcgtcgaacctcctgtgtatatacagtcggccgcttttggtagactgttgtatggcgcattctgcatagaaacgaatattctttccgtttgtttcaatagataatgtaatgtttcttacgtcagctggtcggatgctcaacgagaaataagggaaacaatgaattgcattggccgtcctgctctatcacatgccattactgattagtgatgaatgcatg

SEQ ID NO: 206729 - DNA, 4238 bp, Zea Mays
gtccaatttcttttcacaaaatctgggatccatgtggcgtccgctttgctttctacatgtcaatgactcaaggggcaagcacaagactgctggtggagttccagtcgagacagttttctgccgagagagcatatataattatttgtgtaagaggttcttcgcaattgccaatattgagttatcgaaaccaggaaatctgaggcatcatctgggaagaattttagcgatagatcgagaatctaatttcgttgctgtcagttcatatgaggataagtttgcccttatacatgtttctgtttcccagagtggttctggcagcggtattatttctgagaagaaatatttttatccaccagaaaatgaagatgacgcaaggatcataacttcgtctaggaccagcatccgtggtacaatttggacaatgcgcttcatatctgtgccccaagatgaagaatactatccagttctggcaatgataattaacaggaaaggctctgatgtgaatgacttgtcgttatttggatatgactccagcagctgtgttatcaaccacctctctagttattcagaaattggacctttggtacttgacgtatcagaaattcctgaaacgtttggctttgcacttctgttgcgtgttggtgatgctttattgttggatcttagaaatccaacaaatgtctgctgtatccaaagagtcagcttgacgactaacctgattggagagccaatcactgttgaagatccctgtccaggattagatgttgatgatgatgtggctgcttgtgctttgctagaattgagagattctggtaataacataatgaaggatgatggttatatggacattgatggtgttgacagcagaagtaatgtgaaaccaaggatcgtttgctcgtggagctgggagccacctgaccctgtcaggcgaggatgtgcaaggcttctattttgtttggatgatggagaatttcatattttggaatttactttggatgttgaaggggcgaagctgtacacatttgaatatattgataggactttgccttgtagacctcttttttggatgaaaaacagaatgataatagggtttgtagagatgggggacggcatgatttttaaacttggtcaccgcaggttgcttcataaaagcactattcagaatgtagcaccaatattggatctagcaattgctgattaccatggtgagaaacaggaccagatgtttgcatgttgtggaatgtcccctgagggctctcttcgagttttaaggaatggtgtcaatgtggacagacttctgaaaactgaagctatttaccagggtgtcactggtttgtggactttgagaatgaaggcaactgatgcctaccattcttttcttgtgttgtcatttgtggaggaaaccagaatactgtcagtaggactaagttttaatgacatcagtgatgccgtgggattccagcctgatgtttgcactttagcatgtggtttggtggctgataatctgctagttcaaatttacagcaaaggtgttaaggtctgtttgcctacagtatacgctcaccctgaaggtgcccctttaacttctccaatttgcactgactggtatcctgctatcactatcagtgttggtgctgtaggacataatattgttgttgttgctacatctaatccttgttgcttatatgtccttggtgttagatcatcatcttcttaccagtacgagttgtatgcaacacatcatgtgcaattgcagtatgaagtatcatgcatatcaatcccacaagaggattgtatacatgataatgtatctttcagctgtggagagggtgatgacatttgtaagaacccccctcctaaagttaatgtttgcaagtttgctgttattggaactcatagaccttcagtggaaatcatctccttggaacctggagaagcattaagggtattaactattgggactgtatctgtgaataatgcacttggcgcacctatgagtggttgtatacctgaaaatgtcaggtttgttgcggctgagaggttttacattcttgcaggcttgagaaacggaatgctactcagatttgagtcagaaacacgtgattatctccctggttttctctacaaggactcttctattccttctgttaatacattccttcagttgatttcgatacggcgtattggaattactcctgtactgttagtgccaatacatgattcagctaatgctgacatcattgttctcagtgatagaccttggctattacatgcagcaagacatagcctggcatattcgtccatttcatttctttctgcttctcatgtcacacctgtttcatctgttgattgccccaatggtctactgtttgttgctgagagctgtttgcatttggttgaactggttcatgggaagcgattgaatgcacaaaagttttcaattggagggactccaaggaaagtgctataccataatgaaagcagaacactgttggtactgagaactgggctaaatggtgcatcgtcttcttcagatgttgtacaagtagatccacaaaatggggtattactttccagatataaatgtgaacctggcgaaacagcgaaatgcatgcaaattgcaaaaataggaaatgatcaagttttaattgttgggaccactaagtctgctggacggccgatgatgtcaaatggtgaagcagaaagcatcaagggacgcctgattgttttaagcttggaggccgttgaaagtcctcgtgagagcagttcgtttattccaacttttagttttaatccctcttcacattctggttctcctttccacgagattgttggatatacaactgaggaattttctagtaacagcatgtgcagcagtcctgatgagtttagctgcaaccagatccaagctgaacaaatgacagggcaattgagatcattgactcaatatatattgaatggcgcagttcttgctctgtgtccctatctagatcgttatgtgttggcagctgctggtaatatgatttatgtatttggtttcacaaatgaaaatccccacagaataaaaaagtgtgctgttggtaggacacgatttacaataacttgcctgaagacatttgcatcacgaattgctgttggtgattgtcgtgatggtgttctcttctattcttataatgagagtcataggaagttggaattggtctattctgatcctgctcatagattggtgggtgatattgctcttttaaattgtgaaactgctgtggtatcagatcgacgtgggagcatatctgtattatcatgcaccagattggaagtttcagaaagtccacagaagaacttagccgtgaattgttcattttatatgggtgaaacagccatgagcattcagaaggctgcattcaggtatcggcttccaattgatgatgatactgacccggtgcttgagacagtttacaactgtatcgtggcaagtaccatgttggggagtctctttgttatgattccactttcaagtgaggagcatcagcttttgcaagatgtccaagaaaaactctcagtacacccattaactgcaccggtcctgggaaatgatcatgcagagttccgtcagcgtggtaccccttcggtagtgcctcccattcttgacggtgatatgcttgtgcaattcttggagctcaccggtgaacaacagcaagccatccttactcatgctttgccagggaaggggcaacataggcccctctcggttttccaggttttgcaaacattagagcgcgtccattacgctcttaactgaggctttcttcaatcacagttactacaaggtttggatattagagctggttgaccttcattgtttgagatgccgtcagagctgaggttttagtgaccttcgcaatctagacggccgattccaagtctgccatgatatttatcagaacgtttgattgatgatgcaactggagcttgatactgggaagtctcatggtggcgagtatcccgtggaggcaccagattcgtcgaacctcctgtgtatatacagtcggccgcttttggtagactgttgtatggcgcattctgcatagaaacgaatattctttccgtttgtttcaatagataatgtaatgtttcttacgtcagctggtcggatgctcaacgagaaataagggaaacaatgaattgcattggccgtcctgctctatcacatgccattactgattagtgatgaatgcatg

SEQ ID NO: 206730 - DNA, 4527 bp, Zea Mays
gagccagaatccagaggctccgtccttcggctaggcgagatcacgtgtctgaatcaaccaaccaaaccctaacccttgcagaggctgcggatgaagccatccaccgccggcgacgcctctgcggcggcggcggcgtcctcttcggggccctctacctccgcgtcgacatccgcgtccacgtctaccgcggacgccacccactacatcgccaagcgggtgctccggggaagcgccgtgctccacgtcgccgagggctgcttccgctcgcccgactccgcggacgtcgtcctcgccaaggaaacttcactggagttggttgctgttggtgatgatggtgttttacagtcaatatgtgaacaagacatttttgggattataaaagatattggtgtattgcaatggcactctagacataatggtttaattccacagatagaatgcaaagatcttctggttgtcctttcagattctggaaagctttctcttctttacttttgttctgagatgcacaggttcttcgcaattgccaatattgagttatcgaaaccaggaaatctgaggcatcatctgggaagaattttagcgatagatcgagaatctaatttcgttgctgtcagttcatatgaggataagtttgcccttatacatgtttctgtttcccagagtggttctggcagcggtattatttctgagaagaaaatgaagatgacgcaaggatcataacttcgtctaggaccagcatccgtggtacaatttggacaatgcgcttcatatctgtgccccaagatgaagaatactatccagttctggcaatgataattaacagctgtgttatcaaccacctctctagttattcagaaattggacctttggtacttgacgtatcagaaattcctgaaacgtttggctttgcacttctgttgcgtgttggtgatgctttattgttggatcttagaaatccaacaaatgtctgctgtatccaaagagtcagcttgacgactaacctgattggagagccaatcactgttgaagatccctgtccaggattagatgttgatgatgatgtggctgcttgtgctttgctagaattgagagattctggtaataacataatgaaggatgatggttatatggacattgatggtgttgacagcagaagtaatgtgaaaccaaggatcgtttgctcgtggagctgggagccacctgaccctgtcaggcgaggatgtgcaaggcttctattttgtttggatgatggagaatttcatattttggaatttactttggatgttgaaggggcgaagctgtacacatttgaatatattgataggactttgccttgtagacctcttttttggatgaaaaacagaatgataatagggtttgtagagatgggggacggcatgatttttaaacttggtcaccgcaggttgcttcataaaagcactattcagaatgtagcaccaatattggatctagcaattgctgattaccatggtgagaaacaggaccagatgtttgcatgttgtggaatgtcccctgagggctctcttcgagttttaaggaatggtgtcaatgtggacagacttctgaaaactgaagctatttaccagggtgtcactggtttgtggactttgagaatgaaggcaactgatgcctaccattcttttcttgtgttgtcatttgtggaggaaaccagaatactgtcagtaggactaagttttaatgacatcagtgatgccgtgggattccagcctgatgtttgcactttagcatgtggtttggtggctgataatctgctagttcaaatttacagcaaaggtgttaaggtctgtttgcctacagtatacgctcaccctgaaggtgcccctttaacttctccaatttgcactgactggtatcctgctatcactatcagtgttggtgctgtaggacataatattgttgttgttgctacatctaatccttgttgcttatatgtccttggtgttagatcatcatcttcttaccagtacgagttgtatgcaacacatcatgtgcaattgcagtatgaagtatcatgcatatcaatcccacaagaggattgtatacatgataatgtatctttcagctgtggagagggtgatgacatttgtaagaacccccctcctaaagttaatgtttgcaagtttgctgttattggaactcatagaccttcagtggaaatcatctccttggaacctggagaagcattaagggtattaactattgggactgtatctgtgaataatgcacttggcgcacctatgagtggttgtatacctgaaaatgtcaggtttgttgcggctgagaggttttacattcttgcaggcttgagaaacggaatgctactcagatttgagtcagaaacacgtgattatctccctggttttctctacaaggactcttctattccttctgttaatacattccttcagttgatttcgatacggcgtattggaattactcctgtactgttagtgccaatacatgattcagctaatgctgacatcattgttctcagtgatagaccttggctattacatgcagcaagacatagcctggcatattcgtccatttcatttctttctgcttctcatgtcacacctgtttcatctgttgattgccccaatggtctactgtttgttgctgagagctgtttgcatttggttgaactggttcatgggaagcgattgaatgcacaaaagttttcaattggagggactccaaggaaagtgctataccataatgaaagcagaacactgttggtactgagaactgggctaaatggtgcatcgtcttcttcagatgttgtacaagtagatccacaaaatggggtattactttccagatataaatgtgaacctggcgaaacagcgaaatgcatgcaaattgcaaaaataggaaatgatcaagttttaattgttgggaccactaagtctgctggacggccgatgatgtcaaatggtgaagcagaaagcatcaagggacgcctgattgttttaagcttggaggccgttgaaagtcctcgtgagagcagttcgtttattccaacttttagttttaatccctcttcacattctggttctcctttccacgagattgttggatatacaactgaggaattttctagtaacagcatgtgcagcagtcctgatgagtttagctgcaaccagatccaagctgaacaaatgacagggcaattgagatcattgactcaatatatattgaatggcgcagttcttgctctgtgtccctatctagatcgttatgtgttggcagctgctggtaatatgatttatgtatttggtttcacaaatgaaaatccccacagaataaaaaagtgtgctgttggtaggacacgatttacaataacttgcctgaagacatttgcatcacgaattgctgttggtgattgtcgtgatggtgttctcttctattcttataatgagagtcataggaagttggaattggtctattctgatcctgctcatagattggtgggtgatattgctcttttaaattgtgaaactgctgtggtatcagatcgacgtgggagcatatctgtattatcatgcaccagattggaagtttcagaaagtccacagaagaacttagccgtgaattgttcattttatatgggtgaaacagccatgagcattcagaaggctgcattcaggtatcggcttccaattgatgatgatactgacccggtgcttgagacagtttacaactgtatcgtggcaagtaccatgttggggagtctctttgttatgattccactttcaagtgaggagcatcagcttttgcaagatgtccaagaaaaactctcagtacacccattaactgcaccggtcctgggaaatgatcatgcagagttccgtcagcgtggtaccccttcggtagtgcctcccattcttgacggtgatatgcttgtgcaattcttggagctcaccggtgaacaacagcaagccatccttactcatgctttgccagggaaggggcaacataggcccctctcggttttccaggttttgcaaacattagagcgcgtccattacgctcttaactgaggctttcttcaatcacagttactacaaggtttggatattagagctggttgaccttcattgtttgagatgccgtcagagctgaggttttagtgaccttcgcaatctagacggccgattccaagtctgccatgatatttatcagaacgtttgattgatgatgcaactggagcttgatactgggaagtctcatggtggcgagtatcccgtggaggcaccagattcgtcgaacctcctgtgtatatacagtcggccgcttttggtagactgttgtatggcgcattctgcatagaaacgaatattctttccgtttgtttcaatagataatgtaatgtttcttacgtcagctggtcggatgctcaacgagaaataagggaaacaatgaattgcattggccgtcctgctctatcacatgccattactgattagtgatgaatgcatg

SEQ ID NO: 206731 - DNA, 4707 bp, Zea Mays
gtttggtttgttggtttggttccgctcagcggcgtcgctagttcgctgctggatccgctagtttaacttggcctcgttctccctgagccagaatccagaggctccgtccttcggctaggcgagatcacgtgtctgaatcaaccaaccaaaccctaacccttgcagaggctgcggatgaagccatccaccgccggcgacgcctctgcggcggcggcggcgtcctcttcggggccctctacctccgcgtcgacatccgcgtccacgtctaccgcggacgccacccactacatcgccaagcgggtgctccggggaagcgccgtgctccacgtcgccgagggctgcttccgctcgcccgactccgcggacgtcgtcctcgccaaggaaacttcactggagttggttgctgttggtgatgatggtgttttacagtcaatatgtgaacaagacatttttgggattataaaagatattggtgtattgcaatggcactctagacataatggtttaattccacagatagaatgcaaagatcttctggttgtcctttcagattctggaaagctttctcttctttacttttgttctgagatgcacaggttcttcgcaattgccaatattgagttatcgaaaccaggaaatctgaggcatcatctgggaagaattttagcgatagatcgagaatctaatttcgttgctgtcagttcatatgaggataagtttgcccttatacatgtttctgtttcccagagtggttctggcagcggtattatttctgagaagattttgaagatcttccatgtcataatttcagaaatatttttatccaccagaaaatgaagatgacgcaaggatcataacttcgtctaggaccagcatccgtggtacaatttggacaatgcgcttcatatctgtgccccaagatgaagaatactatccagttctggcaatgataattaacaggctctgatgtgaatgacttgtcgttatttggatatgactccagcagctgtgttatcaaccacctctctagttattcagaaattggacctttggtacttgacgtatcagaaattcctgaaacgtttggctttgcacttctgttgcgtgttggtgatgctttattgttggatcttagaaatccaacaaatgtctgctgtatccaaagagtcagcttgacgactaacctgattggagagccaatcactgttgaagatccctgtccaggattagatgttgatgatgatgtggctgcttgtgctttgctagaattgagagattctggtaataacataatgaaggatgatggttatatggacattgatggtgttgacagcagaagtaatgtgaaaccaaggatcgtttgctcgtggagctgggagccacctgaccctgtcaggcgaggatgtgcaaggcttctattttgtttggatgatggagaatttcatattttggaatttactttggatgttgaaggggcgaagctgtacacatttgaatatattgataggactttgccttgtagacctcttttttggatgaaaaacagaatgataatagggtttgtagagatgggggacggcatgatttttaaacttggtcaccgcaggttgcttcataaaagcactattcagaatgtagcaccaatattggatctagcaattgctgattaccatggtgagaaacaggaccagatgtttgcatgttgtggaatgtcccctgagggctctcttcgagttttaaggaatggtgtcaatgtggacagacttctgaaaactgaagctatttaccagggtgtcactggtttgtggactttgagaatgaaggcaactgatgcctaccattcttttcttgtgttgtcatttgtggaggaaaccagaatactgtcagtaggactaagttttaatgacatcagtgatgccgtgggattccagcctgatgtttgcactttagcatgtggtttggtggctgataatctgctagttcaaatttacagcaaaggtgttaaggtctgtttgcctacagtatacgctcaccctgaaggtgcccctttaacttctccaatttgcactgactggtatcctgctatcactatcagtgttggtgctgtaggacataatattgttgttgttgctacatctaatccttgttgcttatatgtccttggtgttagatcatcatcttcttaccagtacgagttgtatgcaacacatcatgtgcaattgcagtatgaagtatcatgcatatcaatcccacaagaggattgtatacatgataatgtatctttcagctgtggagagggtgatgacatttgtaagaacccccctcctaaagttaatgtttgcaagtttgctgttattggaactcatagaccttcagtggaaatcatctccttggaacctggagaagcattaagggtattaactattgggactgtatctgtgaataatgcacttggcgcacctatgagtggttgtatacctgaaaatgtcaggtttgttgcggctgagaggttttacattcttgcaggcttgagaaacggaatgctactcagatttgagtcagaaacacgtgattatctccctggttttctctacaaggactcttctattccttctgttaatacattccttcagttgatttcgatacggcgtattggaattactcctgtactgttagtgccaatacatgattcagctaatgctgacatcattgttctcagtgatagaccttggctattacatgcagcaagacatagcctggcatattcgtccatttcatttctttctgcttctcatgtcacacctgtttcatctgttgattgccccaatggtctactgtttgttgctgagagctgtttgcatttggttgaactggttcatgggaagcgattgaatgcacaaaagttttcaattggagggactccaaggaaagtgctataccataatgaaagcagaacactgttggtactgagaactgggctaaatggtgcatcgtcttcttcagatgttgtacaagtagatccacaaaatggggtattactttccagatataaatgtgaacctggcgaaacagcgaaatgcatgcaaattgcaaaaataggaaatgatcaagttttaattgttgggaccactaagtctgctggacggccgatgatgtcaaatggtgaagcagaaagcatcaagggacgcctgattgttttaagcttggaggccgttgaaagtcctcgtgagagcagttcgtttattccaacttttagttttaatccctcttcacattctggttctcctttccacgagattgttggatatacaactgaggaattttctagtaacagcatgtgcagcagtcctgatgagtttagctgcaaccagatccaagctgaacaaatgacagggcaattgagatcattgactcaatatatattgaatggcgcagttcttgctctgtgtccctatctagatcgttatgtgttggcagctgctggtaatatgatttatgtatttggtttcacaaatgaaaatccccacagaataaaaaagtgtgctgttggtaggacacgatttacaataacttgcctgaagacatttgcatcacgaattgctgttggtgattgtcgtgatggtgttctcttctattcttataatgagagtcataggaagttggaattggtctattctgatcctgctcatagattggtgggtgatattgctcttttaaattgtgaaactgctgtggtatcagatcgacgtgggagcatatctgtattatcatgcaccagattggaagtttcagaaagtccacagaagaacttagccgtgaattgttcattttatatgggtgaaacagccatgagcattcagaaggctgcattcaggtatcggcttccaattgatgatgatactgacccggtgcttgagacagtttacaactgtatcgtggcaagtaccatgttggggagtctctttgttatgattccactttcaagtgaggagcatcagcttttgcaagatgtccaagaaaaactctcagtacacccattaactgcaccggtcctgggaaatgatcatgcagagttccgtcagcgtggtaccccttcggtagtgcctcccattcttgacggtgatatgcttgtgcaattcttggagctcaccggtgaacaacagcaagccatccttactcatgctttgccagggaaggggcaacataggcccctctcggttttccaggttttgcaaacattagagcgcgtccattacgctcttaactgaggctttcttcaatcacagttactacaaggtttggatattagagctggttgaccttcattgtttgagatgccgtcagagctgaggttttagtgaccttcgcaatctagacggccgattccaagtctgccatgatatttatcagaacgtttgattgatgatgcaactggagcttgatactgggaagtctcatggtggcgagtatcccgtggaggcaccagattcgtcgaacctcctgtgtatatacagtcggccgcttttggtagactgttgtatggcgcattctgcatagaaacgaatattctttccgtttgtttcaatagataatgtaatgtttcttacgtcagctggtcggatgctcaacgagaaataagggaaacaatgaattgcattggccgtcctgctctatcacatgccattactgattagtgatgaatgcatg

SEQ ID NO: 206732 - DNA, 5586 bp, Zea Mays
ccattttcaacttttgttgcctgtttggtttgttggtttggttccgctcagcggcgtcgctagttcgctgctggatccgctagtttaacttggcctcgttctccctgagccagaatccagaggctccgtccttcggctaggcgagatcacgtgtctgaatcaaccaaccaaaccctaacccttgcagaggctgcggatgaagccatccaccgccggcgacgcctctgcggcggcggcggcgtcctcttcggggccctctacctccgcgtcgacatccgcgtccacgtctaccgcggacgccacccactacatcgccaagcgggtgctccggggaagcgccgtgctccacgtcgccgagggctgcttccgctcgcccgactccgcggacgtcgtcctcgccaaggaaacttcactggagttggttgctgttggtgatgatggtgttttacagtcaatatgtgaacaagacatttttgggattataaaagatattggtgtattgcaatggcactctagacataatggtttaattccacagatagaatgcaaagatcttctggttgtcctttcagattctggaaagctttctcttctttacttttgttctgagatgcacaggttcttcgcaattgccaatattgagttatcgaaaccaggaaatctgaggcatcatctgggaagaattttagcgatagatcgagaatctaatttcgttgctgtcagttcatatgaggataagtttgcccttatacatgtttctgtttcccagagtggttctggcagcggtattatttctgagaagaaatatttttatccaccagaaaatgaagatgacgcaaggatcataacttcgtctaggaccagcatccgtggtacaatttggacaatgcgcttcatatctgtgccccaagatgaagaatactatccagttctggcaatgataattaacaggaaaggctctgatgtgaatgacttgtcgttatttggatatgactccagcagctgtgttatcaaccacctctctagttattcagaaattggacctttggtacttgacgtatcagaaattcctgaaacgtttggctttgcacttctgttgcgtgttggtgatgctttattgttggatcttagaaatccaacaaatgtctgctgtatccaaagagtcagcttgacgactaacctgattggagagccaatcactgttgaagatccctgtccaggattagatgttgatgatgatgtggctgcttgtgctttgctagaattgagagattctggtaataacataatgaaggatgatggttatatggacattgatggtgttgacagcagaagtaatgtgaaaccaaggatcgtttgctcgtggagctgggagccacctgaccctgtcaggcgaggatgtgcaaggcttctattttgtttggatgatggagaatttcatattttggaatttactttggatgttgaaggggcgaagctgtacacatttgaatatattgataggactttgccttgtagacctcttttttggatgaaaaacagaatgataatagggtttgtagagatgggggacggcatgatttttaaacttggtcaccgcaggttgcttcataaaagcactattcagaatgtagcaccaatattggatctagcaattgctgattaccatggtgagaaacaggaccagatgtttgcatgttgtggaatgtcccctgagggctctcttcgagttttaaggaatggtgtcaatgtggacagacttctgaaaactgaagctatttaccagggtgtcactggtttgtggactttgagaatgaaggcaactgatgcctaccattcttttcttgtgttgtcatttgtggaggaaaccagaatactgtcagtaggactaagttttaatgacatcagtgatgccgtgggattccagcctgatgtttgcactttagcatgtggtttggtggctgataatctgctagttcaaatttacagcaaaggtgttaaggtctgtttgcctacagtatacgctcaccctgaaggtgcccctttaacttctccaatttgcactgactggtatcctgctatcactatcagtgttggtgctgtaggacataatattgttgttgttgctacatctaatccttgttgcttatatgtccttggtgttagatcatcatcttcttaccagtacgagttgtatgcaacacatcatgtgcaattgcagtatgaagtatcatgcatatcaatcccacaagaggattgtatacatgataatgtatctttcagctgtggagagggtgatgacatttgtaagaacccccctcctaaagttaatgtttgcaagtttgctgttattggaactcatagaccttcagtggaaatcatctccttggaacctggagaagcattaagggtattaactattgggactgtatctgtgaataatgcacttggcgcacctatgagtggttgtatacctgaaaatgtcaggtttgttgcggctgagaggttttacattcttgcaggcttgagaaacggaatgctactcagatttgagtcagaaacacgtgattatctccctggttttctctacaaggactcttctattccttctgttaatacattccttcagttgatttcgatacggcgtattggaattactcctgtactgttagtgccaatacatgattcagctaatgctgacatcattgttctcagtgatagaccttggctattacatgcagcaagacatagcctggcatattcgtccatttcatttctttctgcttctcatgtcacacctgtttcatctgttgattgccccaatggtctactgtttgttgctgagagctgtttgcatttggttgaactggttcatgggaagcgattgaatgcacaaaagttttcaattggagggactccaaggaaagtgctataccataatgaaagcagaacactgttggtactgagaactgggctaaatggtgcatcgtcttcttcagatgttgtacaagtagatccacaaaatggggtattactttccagatataaatgtgaacctggcgaaacagcgaaatgcatgcaaattgcaaaaataggaaatgatcaagttttaattgttgggaccactaagtctgctggacggccgatgatgtcaaatggtgaagcagaaagcatcaagggacgcctgattgttttaagcttggaggccgttgaaagtcctcgtgagagcagttcgtttattccaacttttagttttaatccctcttcacattctggttctcctttccacgagattgttggatatacaactgaggaattttctagtaacagcatgtgcagcagtcctgatgagtttagctgcaaccagatccaagctgaacaaatgacagggcaattgagatcattgactcaatatatattgaatggcgcagttcttgctctgtgtccctatctagatcgttatgtgttggcagctgctggtaatatggtatgatgcctatatgctgtttttactatattttctttaaaaaaattccttaaagggagctgaactctcctatgacaaattatctaaaagggaattagtaatgacagaatagtggctaaggcccttagtgggcttgcccagtatgggcatagggttttgtactgtgccatcagattttgggcccagctgcataatgattgtttctttgacaggcaaggttttcccctgacggatatgtttctataaaccccccgggatcttgcctatatctgtgtaccatacccactgcaaccaatcaatccagtatagatgatgttgcctatatttgtataccttgcccatcacaatcaattaatctactatatttcacgagtctgaaatggccagtgattcttctgctgccctcacatgcctttgcggctgcacatccctttcctacgtgtctccgtggcagcgccctttcccgcacgaagtcaacatttatgttggagaataaggatgttgtgtgtccttgccctcatgatctttggacattatcaaatgagatgcccagatttatggcttagcttcttaatgcaatagtaatataatatgcagctctcattgtgttcattgttcaattgcaaagaaggaacaagtctattttggccatcaaactatagcccaggtctgatcttttggccaccaagctccaaaacgggcatctttgtttatggaactctctagtccttgtcttttttggccaccaagcttcaaaacgggcattttttattcatttcttgtttcatatctttgcgatgctaatgaattaataccctttggccttgtttagttgactgcaattgcttatggaagctaacatttgtttacttatttttgacagatttatgtatttggtttcacaaatgaaaatccccacagaataaaaaagtgtgctgttggtaggacacgatttacaataacttgcctgaagacatttgcatcacgaattgctgttggtgattgtcgtgatggtgttctcttctattcttataatgagagtcataggaagttggaattggtctattctgatcctgctcatagattggtgggtgatattgctcttttaaattgtgaaactgctgtggtatcagatcgacgtgggagcatatctgtattatcatgcaccagattggaagtttcagaaagtccacagaagaacttagccgtgaattgttcattttatatgggtgaaacagccatgagcattcagaaggctgcattcaggtatcggcttccaattgatgatgatactgacccggtgcttgagacagtttacaactgtatcgtggcaagtaccatgttggggagtctctttgttatgattccactttcaagtgaggagcatcagcttttgcaagatgtccaagaaaaactctcagtacacccattaactgcaccggtcctgggaaatgatcatgcagagttccgtcagcgtggtaccccttcggtagtgcctcccattcttgacggtgatatgcttgtgcaattcttggagctcaccggtgaacaacagcaagccatccttactcatgctttgccagggaaggggcaacataggcccctctcggttttccaggttttgcaaacattagagcgcgtccattacgctcttaactgaggctttcttcaatcacagttactacaaggtttggatattagagctggttgaccttcattgtttgagatgccgtcagagctgaggttttagtgaccttcgcaatctagacggccgattccaagtctgccatgatatttatcagaacgtttgattgatgatgcaactggagcttgatactgggaagtctcatggtggcgagtatcccgtggaggcaccagattcgtcgaacctcctgtgtatatacagtcggccgcttttggtagactgttgtatggcgcattctgcatagaaacgaatattctttccgtttgtttcaatagataatgtaatgtttcttacgtcagctggtcggatgctcaacgagaaataagggaaacaatgaattgcattggccgtcctgctctatcacatgccattactgattagtgatgaatgcatg

SEQ ID NO: 206733 - DNA, 2443 bp, Zea Mays
atttaatctcaaaatcaaatcaaacgaagcgcggacaccgtcacaccgggtcaccggcacactaattcgttactccccgctctctctcctccgcccccgcctcgtcctccgaccctccgccattcccaaagcacgctccgctttccttttgtttactctcccgcatcctcctctcgtttccctttccgcccatgcggatccgtctcctcgcatccgccgccgtcgcccacctcccccgcgcccgaatctgacccgggcggagttagggatgggggcagaaggggagggggcagtggaggaggccacggggttcgaggtgtgcatcgtgctgcccaagctctcccgcgccgccgcgacggggcccaccgaggactgcgtggcgcggctggtgcgagagctcgagggtgccggcctgctcgtcgagcgcgtccgcggcgtccccgctgagttcatcaagctggctgcaccaatggggaccctggggagagctgctgctgatatgcagatgaaaaagctaacctacatcggaatggagcttcaatttcaatgggaccaggtcgcagcattcgttaggcagccagatggttctctgtttagctggagagagcggtattgctgcttccgctacttgatatatggcattgtgaacaagacaaactctgaaatagctattaaatttgatggtaaggagttccattggaagcaaagtgagtccttattgacaatgctggaagctgaaggagttgtaaagcgaatattccctttgcatgatgaaattaagaggaagcaactcctgagaaattgggcacttaattggcttgacttcacatggcaacctattgatgagatttactcctactttggaacaaagattgcaacatactttgcgttcctaggaatgtatacacgatggcttttcttcccagctgtttttggattgacaactcaactaatagattttgggtcattgcagtggttggttcttcctgctttctttatctttgttatttcttgggccgtcttctttctgcaattttggaaaaggaagaattcagcacttcttgcaagatggggtattaattgttcactatctgaatacaaaaatctgggcatcgaactcagttccttgagtgattctcttactgttgaggaaaagaagttttgtgatgtatctgctgagaaaagcaagttacaaaggaacgaatggtttggtgttctccttagaataaggaacaatgctatcattgtgctggctatcatctgtcttcagttgccatttgagttggcctatgctcatctatatgagattacagaaactgaggctatgaagtatttgttgactgcagtatatcttgttgcaattcaatattacaccagaattggtggcaaggtgtctgtcaatttgataaagtatgaaaacaaccaaggagaagaatcgagttccgctagtttagtttataaggtctttggtctttactttatgcagtcatatattgggttattttaccatgcttcattgtatcgtgatatactggccctccgccaagtcctcatccagcgtctcattgtgtcccaggtattggaaaatctgattgagaattccattccttaccttaagtacagctacaaaaagtacatagctgttcacaagaaaaagcatgagaaagaatcaccagtgggtaggtcagtgcggttatcaacaagagtggagaaagagtatttaaaaccctcttatactgcgagcattggagcagaacttgaagacggtttatttgatgactttctggagctggctcttcagtttggcatgatcatgatgtttgcctgtgcatttccattgatattctgctttgcagctctgaacaatgttactgaaatcagagcagatgcattaaagttgctagtcatgttgaaaagacctgagccgcgtgctgcagctacaattggagcatggttgaacatattccagttcttggttgtgatggcaatatgcaccaactgcttgcttctcgtttgtctgtatgacgaggaggggaaatggaggattgagccaggactagcagcaatcctcataatggagcatgctctcctcttaatcaagtttggtttctcacactttgtgcctgaggagcctgcgtgggtgaaagcaaatcgtgtgcgatatgtagctcaggcacaaaacgtctgctccaaacaacttttgaggagcatttcaaaatttgacggaaaactggattgagaaacatcatgcacagtttagcggttatcgctggttttgtagtttaggtagagcggttttgtatagtacaaagatgtacaaatctaggggtgtaatatcttgatgcatatgaccgttaagtgtagatattaggtgatcgccacctatcttaccagcaaatggtgaagaatgcccacaagtgtaaaaaaaagaaaaaaagaagaa

SEQ ID NO: 206734 - DNA, 1748 bp, Zea Mays
ccggcacactaattcgttactccccgctctctctcctccgcccccgcctcgtcctccgaccctccgccattcccaaagcacgctccgctttccttttgtttactctcccgcatcctcctctcgtttccctttccgcccatgcggatccgtctcctcgcatccgccgccgtcgcccacctcccccgcgcccgaatctgacccgggcggagttagggatgggggcagaaggggagggggcagtggaggaggccacggggttcgaggtgtgcatcgtgctgcccaagctctcccgcgccgccgcgacggggcccaccgaggactgcgtggcgcggctggtgcgagagctcgagggtgccggcctgctcgtcgagcgcgtccgcggcgtccccgctgagttcatcaagctggctgcaccaatggggaccctggggagagctgctgctgatatgcagatgaaaaagctaacctacatcggaatggagcttcaatttcaatgggaccaggtcgcagcattcgttaggcagccagatggttctctgtttagctggagagagcggtattgctgcttccgctacttgatatatggcattgtgaacaagacaaactctgaaatagctattaaatttgatggtaaggagttccattggaagcaaagtgagtccttattgacaatgctggaagctgaaggagttgtaaagcgaatattccctttgcatgatgaaattaagaggaagcaactcctgagaaattgggcacttaattggcttgacttcacatggcaacctattgatgagatttactcctactttggaacaaagattgcaacatactttgcgttcctaggaatgtatacacgatggcttttcttcccagctgtttttggattgacaactcaactaatagattttgggtcattgcagtggttggttcttcctgctttctttatctttgttatttcttgggccgtcttctttctgcaattttggaaaaggaagaattcagcacttcttgcaagatggggtattaattgttcactatctgaatacaaaaatctgggcatcgaactcagttccttgagtgattctcttactgttgaggaaaagaagttttgtgatgtatctgctgagaaaagcaagttacaaaggaacgaatggtttggtgttctccttagaataaggaacaatgctatcattgtgctggctatcatctgtcttcagttgccatttgagttggcctatgctcatctatatgagattacagaaactgaggctatgaagtatttgttgactgcagtatatcttgttgcaattcaatattacaccagaattggtggcaaggtgtctgtcaatttgataaagtatgaaaacaaccaaggagaagaatcgagttccgctagtttagtttataaggtctttggtctttactttatgcagtcatatattgggttattttaccatgcttcattgtatcgtgatatactggccctccgccaagtcctcatccagcgtctcattgtgtcccaggtattggaaaatctgattgagaattccattccttaccttaagtacagctacaaaaagtacatagctgttcacaagaaaaagcatgagaaagaatcaccagtgggtaggtcagtgcggttatcaacaagagtggagaaagagtatttaaaaccctcttatactgcgagcattggagcagaacttgaagacggtttatttgatgtttgaaagcaaatgatggtgttt

SEQ ID NO: 206735 - DNA, 2458 bp, Zea Mays
cggcacactaattcgttactccccgctctctctcctccgcccccgcctcgtcctccgaccctccgccattcccaaagcacgctccgctttccttttgtttactctcccgcatcctcctctcgtttccctttccgcccatgcggatccgtctcctcgcatccgccgccgtcgcccacctcccccgcgcccgaatctgacccgggcggagttagggatgggggcagaaggggagggggcagtggaggaggccacggggttcgaggtgtgcatcgtgctgcccaagctctcccgcgccgccgcgacggggcccaccgaggactgcgtggcgcggctggtgcgagagctcgagggtgccggcctgctcgtcgagcgcgtccgcggcgtccccgctgagttcatcaagctggctgcaccaatggggaccctggggagagctgctgctgatatgcagatgaaaaagctaacctacatcggaatggagcttcaatttcaatgggaccaggtcgcagcattcgttaggcagccagatggttctctgtttagctggagagagcggtattgctgcttccgctacttgatatatggcattgtgaacaagacaaactctgaaatagctattaaatttgatggtaaggagttccattggaagcaaagtgagtccttattgacaatgctggaagctgaaggagttgtaaagcgaatattccctttgcatgatgaaattaagaggaagcaactcctgagaaattgggcacttaattggcttgacttcacatggcaacctattgatgagatttactcctactttggaacaaagattgcaacatactttgcgttcctaggaatgtatacacgatggcttttcttcccagctgtttttggattgacaactcaactaatagattttgggtcattgcagtggttggttcttcctgctttctttatctttgttatttcttgggccgtcttctttctgcaattttggaaaaggaagaattcagcacttcttgcaagatggggtattaattgttcactatctgaatacaaaaatctgggcatcgaactcagttccttgagtgattctcttactgttgaggaaaagaagttttgtgatgtatctgctgagaaaagcaagttacaaaggaacgaatggtttggtgttctccttagaataaggaacaatgctatcattgtgctggctatcatctgtcttcagttgccatttgagttggcctatgctcatctatatgagattacagaaactgaggctatgaagtatttgttgactgcagtatatcttgttgcaattcaatattacaccagaattggtggcaaggtgtctgtcaatttgataaagtatgaaaacaaccaaggagaagaatcgagttccgctagtttagtttataaggtctttggtctttactttatgcagtcatatattgggttattttaccatgcttcattgtatcgtgatatactggccctccgccaagtcctcatccagcgtctcattgtgtcccaggtattggaaaatctgattgagaattccattccttaccttaagtacagctacaaaaagtacatagctgttcacaagaaaaagcatgagaaagaatcaccagtgggtaggtcagtgcggttatcaacaagagtggagaaagagtatttaaaaccctcttatactgcgagcattggagcagaacttgaagacggtttatttgatgactttctggagctggctcttcagtttggcatgatcatgatgtttgcctgtgcatttccattgatattctgctttgcagctctgaacaatgttactgaaatcagagcagatgcattaaagttgctagtcatgttgaaaagacctgagccgcgtgctgcagctacaattggagcatggttgaacatattccaggaggggaaatggaggattgagccaggactagcagcaatcctcataatggagcatgctctcctcttaatcaagtttggtttctcacactttgtgcctgaggagcctgcgtgggtgaaagcaaatcgtgtgcgatatgtagctcaggcacaaaacgtctgctccaaacaacttttgaggagcatttcaaaatttgacggaaaactggattgagaaacatcatgcacagtttagcggttatcgctggttttgtagtttaggtagagcggttttgtatagtacaaagatgtacaaatctaggggtgtaatatcttgatgcatatgaccgttaagtgtagatattaggtgatcgccacctatcttaccagcaaatggtgaagaatgcccacaagtgtaagtcagtttttcccctctttcattttaatggtctgttgaattgaacggaaactcacatgctgcaccatgtaggaggtgtttgtaatgtgctgtgggtgatttcgaagagtaagatggcaccctagccaacagatatcaattagatatcaa

SEQ ID NO: 206736 - DNA, 1215 bp, Zea Mays
ctgcattttgcagagagcagccatggacgagtggattcgccaaaccgaggtgtgggtgcaccaaaccgacagctggatccggcagcagcccccggagcagatctatgtagcggccgcggtggttgccgtcacaatcctgttgcttatcgtagcatcttgtctgaaatcgtctagaccaaacaccatagttctatctgggcttagtggcagtggcaaaaccactatttactaccagcttcgggatggatcatcacatcaaggaactgttacttcaatggaagaaaacagtgatacttttgtgctgcattcggagcaagaaaggaaagacaaagtaaaacctgtgcatattattgatgttcctggtcatgctaggctcaaacccaaacttgatgaagtcctgcctaaagctgctgcggttgtctttgttgttgatgctcaagatttcttgtctagcatgcaagctgctgcagagtacctttatgacattctgacaaaggcaactgtagtgaagaaaaaggtccctgtgcttatattctgcaacaagacagataaagttaccgcccactcgaaggaattcatcaagaagcagttggagaaagaattgaacaagcttagggaatctaggaacgccgtatcgtcagccgacatctctgatgaagtccagcttggggtccctggagaggcattcaacttcagccagtgccagaacaaggtggctgttgcggagggtgctggtttgacaggtgatgtttcggccgtggaacaattcatccgtgaacatgtgaaggcataggttgttcttattgtttttggggctccaaatggctatcctgatgagataagatgtacattgcgtcaatgtggttgttacctttcatgcatgtacaccttcatccggtgctctgaagttgcttagagacagtgaagcacagtcatattttgaactggttcagctgaccttgttatagaggcattgcatgttgcactgcttatgcctgacagtcatcggatatgaacagagcatgttgaaactgactggctttggttgttttccacttttgctccataagttttactagcaaaaatgcctgtgctttgcaacgggtttcaaatagatgatttcatgacaataaatttctcagtgaagcaaaacaaacagaaaatgtcatgctgacagattttaatttgttctcatgtttgtaagttgaatatttg

SEQ ID NO: 206737 - DNA, 1708 bp, Zea Mays
gaggtggcacgccgcacgtgccacggcctcttgtcctggtccgtccatctccctagcagctatactttcccactgccgcagttcgccactctcgccatcggggacgagggactgggagccaggatacttctgccgcgcggcgaccggtcgagcgaaatcgatctaccccaggtgcggcgggcgcggctttattctcaagattttttctgtgttctttagagagcagccatggacgagtggattcgccaaaccgaggtgtgggtgcaccaaaccgacagctggatccggcagcagcccccggagcagatctatgtagcggccgcggtggttgccgtcacaatcctgttgcttatcgtagcatcttgtctgaaatcgtctagaccaaacaccatagttctatctgggcttagtggcagtggcaaaaccactatttactaccagcttcgggatggatcatcacatcaaggaactgttacttcaatggaagaaaacagtgatacttttgtgctgcattcggagcaagaaaggaaagacaaagtaaaacctgtgcatattattgatgttcctggtcatgctaggctcaaacccaaacttgatgaagtcctgcctaaagctgctgcggttgtctttgttgttgatgctcaagatttcttgtctagcatgcaagctgctgcagagtaaattttgcccctccccttccttaatttttaccaaatgcatttggtgtctatttctatttcatctactttcactttcctttgtgctaagtttaagttaacagtgtaattaggagcccttttcatattccgagattgcagaaacaattctgtttgaataatttcctatattatcatttgtgtgaataggaaccttctccactattcccaacattgtagagcattactctgttttatcatttcttacgttgttaacatttcataacaatattatcatctttttgcaggtacctttatgacattctgacaaaggcaactgtagtgaagaaaaaggtccctgtgcttatattctgcaacaagacagataaagttaccgcccactcgaaggaattcatcaagaagcagttggagaaagaattgaacaagcttagggaatctaggaacgccgtatcgtcagccgacatctctgatgaagtccagcttggggtccctggagaggcattcaacttcagccagtgccagaacaaggtggctgttgcggagggtgctggtttgacaggtgatgtttcggccgtggaacaattcatccgtgaacatgtgaaggcataggttgttcttattgtttttggggctccaaatggctatcctgatgagataagatgtacattgcgtcaatgtggttgttacctttcatgcatgtacaccttcatccggtgctctgaagttgcttagagacagtgaagcacagtcatattttgaactggttcagctgaccttgttatagaggcattgcatgttgcactgcttatgcctgacagtcatcggatatgaacagagcatgttgaaactgactggctttggttgttttccacttttgctccataagttttactagcaaaaatgcctgtgctttgcaacgggtttcaaatagatgatttcatgacaataaatttctcagtgaagcaaaacaaacagaaaatgtcatgctgacagattttaatttgttctcatgtttgtaagttgaatatttg

SEQ ID NO: 206738 - DNA, 1602 bp, Zea Mays
gaggtggcacgccgcacgtgccacggcctcttgtcctgcggtcgagcgaaatcgatctaccccaggtgcggcgggcgcggctttattctcaagattttttctgtgttctttagagagcagccatggacgagtggattcgccaaaccgaggtgtgggtgcaccaaaccgacagctggatccggcagcagcccccggagcagatctatgtagcggccgcggtggttgccgtcacaatcctgttgcttatcgtagcatcttgtctgaaatcgtctagaccaaacaccatagttctatctgggcttagtggcagtggcaaaaccactatttactaccagcttcgggatggatcatcacatcaaggaactgttacttcaatggaagaaaacagtgatacttttgtgctgcattcggagcaagaaaggaaagacaaagtaaaacctgtgcatattattgatgttcctggtcatgctaggctcaaacccaaacttgatgaagtcctgcctaaagctgctgcggttgtctttgttgttgatgctcaagatttcttgtctagcatgcaagctgctgcagagtaaattttgcccctccccttccttaatttttaccaaatgcatttggtgtctatttctatttcatctactttcactttcctttgtgctaagtttaagttaacagtgtaattaggagcccttttcatattccgagattgcagaaacaattctgtttgaataatttcctatattatcatttgtgtgaataggaaccttctccactattcccaacattgtagagcattactctgttttatcatttcttacgttgttaacatttcataacaatattatcatctttttgcaggtacctttatgacattctgacaaaggcaactgtagtgaagaaaaaggtccctgtgcttatattctgcaacaagacagataaagttaccgcccactcgaaggaattcatcaagaagcagttggagaaagaattgaacaagcttagggaatctaggaacgccgtatcgtcagccgacatctctgatgaagtccagcttggggtccctggagaggcattcaacttcagccagtgccagaacaaggtggctgttgcggagggtgctggtttgacaggtgatgtttcggccgtggaacaattcatccgtgaacatgtgaaggcataggttgttcttattgtttttggggctccaaatggctatcctgatgagataagatgtacattgcgtcaatgtggttgttacctttcatgcatgtacaccttcatccggtgctctgaagttgcttagagacagtgaagcacagtcatattttgaactggttcagctgaccttgttatagaggcattgcatgttgcactgcttatgcctgacagtcatcggatatgaacagagcatgttgaaactgactggctttggttgttttccacttttgctccataagttttactagcaaaaatgcctgtgctttgcaacgggtttcaaatagatgatttcatgacaataaatttctcagtgaagcaaaacaaacagaaaatgtcatgctgacagattttaatttgttctcatgtttgtaagttgaatatttg

SEQ ID NO: 206739 - DNA, 1197 bp, Zea Mays
gaggtggcacgccgcacgtgccacggcctcttgtcctggtccgtccatctccctagcagctatactttcccactgccgcagttcgccactctcgccatcggggacgagggactgggagccaggatacttctgccgcgcggcgacagagcagccatggacgagtggattcgccaaaccgaggtgtgggtgcaccaaaccgacagctggatccggcagcagcccccggagcagatctatgtagcggccgcggtggttgccgtcacaatcctgttgcttatcgtagcatcttgtctgaaatcgtctagaccaaacaccatagttctatctgggcttagtggcagtggcaaaaccactatttactaccagcttcgggatggatcatcacatcaaggaactgttacttcaatggaagaaaacagtgatacttttgtgctgcattcggagcaagaaagggtacctttatgacattctgacaaaggcaactgtagtgaagaaaaaggtccctgtgcttatattctgcaacaagacagataaagttaccgcccactcgaaggaattcatcaagaagcagttggagaaagaattgaacaagcttagggaatctaggaacgccgtatcgtcagccgacatctctgatgaagtccagcttggggtccctggagaggcattcaacttcagccagtgccagaacaaggtggctgttgcggagggtgctggtttgacaggtgatgtttcggccgtggaacaattcatccgtgaacatgtgaaggcataggttgttcttattgtttttggggctccaaatggctatcctgatgagataagatgtacattgcgtcaatgtggttgttacctttcatgcatgtacaccttcatccggtgctctgaagttgcttagagacagtgaagcacagtcatattttgaactggttcagctgaccttgttatagaggcattgcatgttgcactgcttatgcctgacagtcatcggatatgaacagagcatgttgaaactgactggctttggttgttttccacttttgctccataagttttactagcaaaaatgcctgtgctttgcaacgggtttcaaatagatgatttcatgacaataaatttctcagtgaagcaaaacaaacagaaaatgtcatgctgacagattttaatttgttctcatgtttgtaagttgaatatttg

SEQ ID NO: 206740 - DNA, 2511 bp, Zea Mays
cagcccaactctctcgcagccaatcccgccgctccgccgcccgcacccaatccgtttctctcacccccgccactcgccagcaacgcggacacgccctccgccgctcttcctctgcaccccagtcctctcccacaaccacttccggcggccacgccctcggcttctccgtacttgctgctcgcccgtcccaccaccataattttccaccagcgattgtaaatttgtgggaggcacattcgccgaggatggctgtaaccctacttcgagggatgagaacgccgataccattcagatcgaactccggcttcttctccactgtcctacggcctcggttgtcccgcttcacgactagggcggagagtgcgcaggccacagaacccaaagcggcgcccaggtcaattcagctggcgaccaaggaggcggctgagcagaaaacacaaggcttcgaagccatcatcgggattgagacccatgtccagctctcgaccgtcacgaaggcgttctgctcctgcccttacagctatggttcccagcccaacagcactatctgccccacctgcatgggccacccggggacgctgccggttctgaatgagaaggtggtcgagtgcgccgtgaagctggggctcgccctcaactgcgagatctcaatgacgtccaagtttgatcgcaagcagtatttctacccggacctccccaaggggtaccagatttcccagtttgacatccccattgccaagaagggttgtgtcgatttggaccttccagtggagtttggtggtgggcataggaaatttggggtcacaagggttcacatggaagaagatgctggcaagctgcttcattctgaatccagcagctactctcaggttgacctaaacagggctggcgtacctttgctcgaaattgtctcagagccagacatgagaacagggatagaagctgctgagtatggtgctgaactgcaaaggattgttaggtacctgggagtgagtaatggtaatatgcaagaaggttcccttcgttgtgatgtgaacgtttctgttcgaccagttggacaatcagaatttggtacaaaggtggaaataaagaatatgaactcattttctgcgataaatagggcaatcgattatgagatctcccggcagattctgctccataaagaaggccaggctgatcaaattgtacaagaaacccgcctgtgggatgaatcttctcagaaaacttttacaatgcgaaaaaaggagggacttgccgactatagatattttccagaacctgatcttcctgaagtagttatcactagtgactatattaatgaaatcagcaagtcaatgccggagcttccagaagcaaagcgtaggcgttatgagaatatgggactcagcatgcaagatgttctgttccttgctaatgatgataatattggtcatttctttgattctactcttgagcatggtgctgatgcaaagctggctgccaactggatcatgggtgacatcgctgcttatctcaaagatgaaaaagtatccattgatgaaattaaattaacacctctagagctttctgaactgatagcatcaattaagaatggaactataagtgggaagatcggcaaggagatactggccgagctcattgccaaaggcggaacagttaaggctgtgatagaagagaaagatttggttcagatagcagatccagcagcaattgaggcaatggtagataaagtaattgctgataatccaaagcaacttgagcagtaccgttgaggagagtctaaattgtgatgaaatcaaacatgaaatacatcgtcgaattgaggaaggacgaaagaggatacatgaggaggtagcaatccagattgagaaggaaaaggatgcagctttaaatgaagccaagctgaaagtggaacaagaaaaaaagaagcgggaggagctagagaaaaaacttgaagaagaacgaaagaaagctgaagaggcgttgatgaaagaagcgttggaacagcagcagaaagagctagagcggtaccaggagttggagaggcttcagaaagaaagagaggaggccatgaaacggaaaaaaatggaggaagagcagcagaggcaaaaccagatgaagctgctgggcaagaacaagtcgcggcctaagctgtcgtttgcttttgggatgaagtagcgttcgattcaccgaacgaaattagtgctttagtatactgtaaccgtgtagtgtagtacctctgtatgaaactgcccatttctaactctggcagacaaattgcgatgtcataaatgctcctgatctgcttcgtaagttgccggctcttggtggatgtggtttcatctgcttcttgctgttcagttggcgttgccttgcgagaagactgccagagaagaatccggttggtttgatcttgcatgtcaccaagatactatctccgtttgtgttgccccctagttcagcctgttcatatttgaactaaaacgtgataaataaaaaaaacggagggag

SEQ ID NO: 206741 - DNA, 2989 bp, Zea Mays
cagcccaactctctcgcagccaatcccgccgctccgccgcccgcacccaatccgtttctctcacccccgccactcgccagcaacgcggacacgccctccgccgctcttcctctgcaccccagtcctctcccacaaccacttccggcggccacgccctcggcttctccgtacttgctgctcgcccgtcccaccaccataattttccaccagcgattgtaaatttgtgggaggcacattcgccgaggatggctgtaaccctacttcgagggatgagaacgccgataccattcagatcgaactccggcttcttctccactgtcctacggcctcggttgtcccgcttcacgactagggcggagagtgcgcaggccacagaacccaaagcggcgcccaggtcaattcagctggcgaccaaggaggcggctgagcagaaaacacaaggcttcgaagccatcatcgggattgagacccatgtccagctctcgaccgtcacgaaggcgttctgctcctgcccttacagctatggttcccagcccaacagcactatctgccccacctgcatgggccacccggggacgctgccggttctgaatgagaaggtggtcgagtgcgccgtgaagctggggctcgccctcaactgcgagatctcaatgacgtccaagtttgatcgcaagcagtatttctacccggacctccccaaggggtaccagatttcccagtttgacatccccattgccaagaagggttgtgtcgatttggaccttccagtggagtttggtggtgggcataggaaatttggggtcacaagggttcacatggaagaagatgctggcaagctgcttcattctgaatccagcagctactctcaggtcttccttgtctactaatgattgcttaatttctgtgtactactgtaagatattgtgatattcggatctgcttgtcatgtctttctggcataacagtttcgtaaccacaagatcagttttgacatttaccacggtgcattagaaaacttatagattagtgaatagaaccctagaaaaatattaaagattgtatatcagggaccttaagtgggcatttggatctgaggcaagggggatcctagctttacagcgaaaggattgaagttttataggacatcaaaattcaaaagacttattttggggcaatataatctgcaatcacgagcaaaagcttgctctgtgaagagagccaaatcagtttggcaccaaaagaaaagtagcgctgcagtgaaaaaaaagtctggcaactgctattcagaattatggccaaacattaatccttttctattgctggttgtagaacagatgggggagctaggtataatctcagcagtcccatcttcctggtgaaagtaactatttgaaagtttgaatcatctggctataaatgcatgtgataggctcacacaagaaagggaaatccagagggaatgaaaagaattacacagcgtctcatcacataaaaagccagacatgagaacagggatagaagctgctgagtatggtgctgaactgcaaaggattgttaggtacctgggagtgagtaatggtaatatgcaagaaggttcccttcgttgtgatgtgaacgtttctgttcgaccagttggacaatcagaatttggtacaaaggtggaaataaagaatatgaactcattttctgcgataaatagggcaatcgattatgagatctcccggcagattctgctccataaagaaggccaggctgatcaaattgtacaagaaacccgcctgtgggatgaatcttctcagaaaacttttacaatgcgaaaaaaggagggacttgccgactatagatattttccagaacctgatcttcctgaagtagttatcactagtgactatattaatgaaatcagcaagtcaatgccggagcttccagaagcaaagcgtaggcgttatgagaatatgggactcagcatgcaagatgttctgttccttgctaatgatgataatattggtcatttctttgattctactcttgagcatggtgctgatgcaaagctggctgccaactggatcatgggtgacatcgctgcttatctcaaagatgaaaaagtatccattgatgaaattaaattaacacctctagagctttctgaactgatagcatcaattaagaatggaactataagtgggaagatcggcaaggagatactggccgagctcattgccaaaggcggaacagttaaggctgtgatagaagagaaagatttggttcagatagcagatccagcagcaattgaggcaatggtagataaagtaattgctgataatccaaagcaacttgagcagtaccgtgctggaaaaactaagctacaaggattttttgctggccaggtgatgaaagcatcgaaggggaaggccaacccagttttgttgaataaaattcttggagagaagctaaatgccaaataattatttttacccccatactgaatctcaggcgtccatgaagaatgggacttcaaattcatagaatgagattaatgtgaacgacgtagaagttttgtccacaatacagatattattgtactaagctgatactttaaaagggcgtgttcattatattttatgcgatagcttgccctaatcatttgtgcagtttccatggattgtgtactgacttcgctgtttattttttttcgctctctgcaacccacaatatttataacaattttcattaaaccaaaaatgtattctctgttctaaactataattcgttttagactaaatatacattcattaattaatacaataatttgtatgaacgtctacattcattatcaattatggggaaaaaaaaactagaaaggactatattttggggaggaattattgaacagcagcaatgacctgacctataagaaagagtgtttggtttgaagaatttgaagaataagttagtctattatctacttatctcttactttttaatttcg

SEQ ID NO: 206742 - DNA, 1625 bp, Zea Mays
agacaaatgcaattgcctcagtctcctaggcgtaactagatttttattggtgcattgtccaatattttttgtaacttatatcattatcgatagcaataatggtgaattcatcttcttttgttaaggttgacctaaacagggctggcgtacctttgctcgaaattgtctcagagccagacatgagaacagggatagaagctgctgagtatggtgctgaactgcaaaggattgttaggtacctgggagtgagtaatggtaatatgcaagaaggttcccttcgttgtgatgtgaacgtttctgttcgaccagttggacaatcagaatttggtacaaagggcaatcgattatgagatctcccggcagattctgctccataaagaaggccaggctgatcaaattgtacaagaaacccgcctgtgggatgaatcttctcagaaaacttttacaatgcgaaaaaaggagggacttgccgactatagatattttccagaacctgatcttcctgaagtagttatcactagtgactatattaatgaaatcagcaagtcaatgccggagcttccagaagcaaagcgtaggcgttatgagaatatgggactcagcatgcaagatgttctgttccttgctaatgatgataatattggtcatttctttgattctactcttgagcatggtgctgatgcaaagctggctgccaactggatcatgggtgacatcgctgcttatctcaaagatgaaaaagtatccattgatgaaattaaattaacacctctagagctttctgaactgatagcatcaattaagaatggaactataagtgggaagatcggcaaggagatactggccgagctcattgccaaaggcggaacagttaaggctgtgatagaagagaaagatttggttcagatagcagatccagcagcaattgaggcaatggtagataaagtaattgctgataatccaaagcaacttgagcagtaccgtgctggaaaaactaagctacaaggattttttgctggccaggtgatgaaagcatcgaaggggaaggccaacccagttttgttgaataaaattcttggagagaagctaaatgccaaataattatttttacccccatactgaatctcaggcgtccatgaagaatgggacttcaaattcatagaatgagattaatgtgaacgacgtagaagttttgtccacaatacagatattattgtactaagctgatactttaaaagggcgtgttcattatattttatgcgatagcttgccctaatcatttgtgcagtttccatggattgtgtactgacttcgctgtttattttttttcgctctctgcaacccacaatatttataacaattttcattaaaccaaaaatgtattctctgttctaaactataattcgttttagactaaatatacattcattaattaatacaataatttgtatgaacgtctacattcattatcaattatggggaaaaaaaaactagaaaggactatattttggggaggaattattgaacagcagcaatgacctgacctataagaaagagtgtttggtttgaagaatttgaagaataagttagtctattatctacttatctcttactttttaatttcg

SEQ ID NO: 206743 - DNA, 1982 bp, Zea Mays
agaatggcgtagcctttctctatgacacgtgccccttcccccctcttaagctaagggacccttgggcagcccggcatcttctccaccctctgcccctctcgatttcttcttcccatctcccaatccatcgcaacccaaaccctactccaggcagatctccgtctccgccgccgctgccggcgtgagcacagcatcagatccgctgtgatggcgttccgccgcatcctatccaccgcggtgcgccgccgctcggccgtggccgccgcggcggccgggaacgcgcgcgaggcctccacggccgtcgctgcggcgccaggtgtgctcgcccccgatgcgaccgcggtgcgcgctcccgtgatgccgtatgaccgcatcgccgacgccgtcaacgccaggctccggcggctcgagcacccagacccgcgcttcctccgctacgccagccccgtgccgtcccacgcggaccacatggccatccttgcggcgccagagacccgggtcaccacactgcccaacggcctgcgcatcgccacggagtcttccctcgccgcgcgcacggctacggtcggcgtgtggatcgatgcgggcagcaggtacgagaacgaggaggcggtcggcgtcgcgcattttgtcgagcacatgctgttcaagggcacggggaagcgcagcgccgcgcagctggagctggagatcgaggacatgggtggccaccttaatgcgtacacgtcgcgggagcagacgacctactacgccaaggtgcttgacaaggacgtgccccgtgcgatggaggtcctctcggacatcctccagaactctaatctcgaccaggcccgcattgaacgtgagcgcgaagtgatcctacgagagatgggggaggttgagggacagtctgaggaagttatatttgatcatctccatgcaactgcattccaatatacatctcttggcagaccaatcttgggttctgcagagaatgtcaagtcaatcaccaaagaggaccttgagaactacattgcaactcattatacagctcctagaatggttatcacagctgcaggcaatgtgaaacatgaagacattgttgagcaggcaaagaagttgttcaataagctatcaactgaccctacaacaacaaacatgttggtcgctaagcaaccagcctctttcacgggttctgaggttcgaatcattgacgatgacatgccccttgctcaatttgctgttgctttcaatggagcatcatgggtagatcctgattctgttgcactgatggttatgcaatcaatgcttggttcatggaacaagagtgctggtggaggaaagcacatgggttcggagcttgtacagaaagcagcaatcaatgacattgctgagagtgctgattgcttggatgatttggcttttgcaattatgcatgagatgagcaaattgtcataccgggttacagaggaagatgttatccgtgcacgtaatcagctgaagtcctcaatccaactccaccttgatggttcaactgctgttgtcgaggacattggccgccagctgctgacctatggacgaagaattcctaccccagagctttttgcaagaatagatgctgttgatgcaagcactgtgaagcgtgttgcaaaccgcttcatctttgatcaggatgttgctattgctgcgatgggaccgatccaaggacttccagactacaactggttcagacgccggacctacatgctccgttactaagatcaatctgccggtgtaccatgtttacggtgtgcaaggacaaagataaaatttgcctctttcggcgtctgtatatcaaggcctcagcactgcacatcgcttgctgcgatagaggtttgtagcagatattttctctcacaaaaggttggaaccatgatcgacctcatggttagattggtcgtttttcagtatttttagcaaatacttgctctgacagaaggttgaagccactagtgaaatgtgat

SEQ ID NO: 206744 - DNA, 1693 bp, Zea Mays
gcagactgagttctcttcaattaataatatgtatgccttgttaaatggaggtcaagatggactcgggactgtaaatacacacggaaccgggaacaaagagtctagattttcatttgctagacaggataaccaagggaacttattggattcatctctcagaaactgtggtactggtaccgagcagaatttcagtttgctaccccagaattctcgaggaaatatctaccagaatggccttgcattccaatctttggagaacgatttttcgaacagcaactctcttggtgtattagatatgttaactactggtacatcgaggtctaaaatatctgcgcccccaggattttcagcaccagcaagagtcccccctcctggattttctactgcacttccatcccaggagtttccttctggaatttcgtctcatgatgggtctatagcccttcctagattcccttgggcattttcttctcaaatttcagcccaggaactgtctaagccccctagtagactgccttctccattttcttctggtttttcatctctggatgggcctaattcctcgtctaggtttccttctgcatttccttctggattttcatcacagaatggccctaacccttcatctggattccctttttcttctgggttttcatcacaggatgggtctaatcagtcgtatggctcaacaaacccagaaaatcttctccggaatactgttctgggtggcagtagtaatcattatcaatctcagtttggaaggcactcaagtgacatggagttcgatgatcctgctatattagctgtgggcaaagggctgatgcctggaattggcgattcagggctggagatgaaaaatactcctgcttttcaagcacagttgcaaccagcaagcagtgatccaagatttcacttacatatacagccaaatgtgcagtctcaccaaaacatgggattcgcagaccatatgcaggatggtttgaaccatatgaatgataatagatttttaggtcagaaccatggtcctctatccccttatgtgcagattccgcaacaacccagaaactcgcaggttacaaatggtcactgggatgggtggagtgattcgagacaagggaatagcactcctatgtcagacatgtcgaggatattatatccaagtgaagtgaacaagttgcacatgctgggttcaaatgatatctataacagagcctttggaatgtgatcatctcctgggataatgtgtgagtttgagctgacatgttctgacttgggggcgttctgtggaagtaactggttgcacaacacagtatacctgatgtggataatggtggttgtgcttatgagctggtacacgagtattttttgctattggaatttacaaaaacgaacctgagttttggttcagctatttgaaattaccaggttcgttctcttgtatgatctgtgaagcttgagtgaaaagaaagattatgtgccgagaacaaagcagctgaagttgaaatatattgagatatgtctataatgtagtgtggtgtggctcttgaacgtgagcgactaagaagatttggtgggcttgacttgatgatggcagtgttttcttgtgttggtacatgatgatggtgttggtcggtggctgcctggccagtacatgcgttttgccataataatacccatggtataataataataa

SEQ ID NO: 206745 - DNA, 2229 bp, Zea Mays
catggctgagaaacatgattgtctctatttgcatgatgtaggcagtcaggaggatagttttactaaagatgagataatctcagcatatacgaggaccagagtcccccagatggcatctagtgtttcgcaaagacgtacaggcaacatgttgcctcctccaggagatgatttctcttacagtgcagtggtttcagccaagcataccttcaagaatgcaacacttaataccaccaaccagcccagaccttcacctccaaacagtagttctgggaggtccacacttccaccagctgcctcatggggacaacgtgatgtgaacgccaggacaacagctactggggtgacatcatcacaatctcatacaaaaccaaaatcagaatcacagagtaatccattttcaagttcttcagtaatttccagtacaaaaacaccctcttcatggaatgatgatacaagtacagcagcaaaaatgtctgaaggacagcaagtgtcagaaaaagagtccaaaaccttgcagctgtataagcctggtatttcaatggcaacacaagctacatcatcacttgagttatcactgaacatagacttctcgacaataccttcagcttggaatgacgatgagattgtagtatcagatgggatgtcaaaaggaagcgatgaaaatcaagttgcaaatgaaaatggcgagctaacccatccagcatctaagccactagtcttatctaagaaagacataacaatgaaatctaccagtaccagcaaaagtcctccaaatattgtatcaagtctagcaatatctaaatcagatgtaaatactagtgatggtgaccactcacttaccaatattagccttacttcaaatgctgtagtctgccaatctaatcatgttgctggggcgaaaatattggaggatattagatccagggacactgacatggagaagctatctgttcatatatcttcagtaaaattaggtggcaatgatgagattcagattatggcaggaaatcagcgaccagatgtaatgccatgcacatctgttgatgcgcccatgaatcagaatttcgacagagaccaatctcatctcaatcttaatgagcctttgttaccttcagaaaataaggatactgttctttcttgtcaatatagttctgataagcgtcttgattggagttcagagatgcaaaatggtagtgtgactccttcaaataatatagtagattctacgatgctcactggtaaacttcatagtatactactggatgtttcagagcaaccatcatatgcccgattccctagttcattggatacttcattgtgtaatgatacagaaagtaacactgcagcaacgattgacactacaatttcacatatgcagactgagttctcttcaattaataatatgtatgccttgttaaatggaggtcaagatggactcgggactgtaaatacacacggtaatgtttctgaacagcatcctggaatgggaaatcatcaatgtagagcaatgggttcagtaagaactgaagcaatgggttcagtaagaacagatagtataggaagttttgagaagaccataagcataaataaggatgagagcagaataatttctgatatgttatcatcagagtttaatccatgggatgattcatattcgactgctaacaattttgttaggatgcttagggaatctgaaaataatgatgtccacttcgctgtgccttcatggaaatcaggaaccgggaacaaagagtctagattttcatttgctagacaggataaccaagggaacttattggattcatctctcagaaactgtggtactggtaccgagcagaatttcagtttgctaccccagaattctcgaggaaatatctaccagaatggccttgcattccaatctttggagaacgatttttcgaacagcaactctcttggtgtattagatatgttaactactggttcgttctcttgtatgatctgtgaagcttgagtgaaaagaaagattatgtgccgagaacaaagcagctgaagttgaaatatattgagatatgtctataatgtagtgtggtgtggctcttgaacgtgagcgactaagaagatttggtgggcttgacttgatgatggcagtgttttcttgtgttggtacatgatgatggtgttggtcggtggctgcctggccagtacatgcgttttgccataataatacccatggtataataataataa

SEQ ID NO: 206746 - DNA, 3532 bp, Zea Mays
acagaatttctgcccttgctcaagcaatgactgattcctgtcaaatgtgtacaggtatattacttatgccaaagaagaagaagccatccagtgtattcaagctgtacacaattttgtcttggaagggaaagtgttaagggcatgctttggtactacgaagtattgccatgcatggctgagaaacatgacatgtgggaatccagattgtctctatttgcatgatgtaggcagtcaggaggatagttttactaaagatgagataatctcagcatatacgaggaccagagtcccccagatggcatctagtgtttcgcaaagacgtacaggcaacatgttgcctcctccaggagatgatttctcttacagtgcagtggtttcagccaagcataccttcaagaatgcaacacttaataccaccaaccagcccagaccttcacctccaaacagtagttctgggaggtccacacttccaccagctgcctcatggggacaacgtgatgtgaacgccaggacaacagctactggggtgacatcatcacaatctcatacaaaaccaaaatcagaatcacagagtaatccattttcaagttcttcagtaatttccagtacaaaaacaccctcttcatggaatgatgatacaagtacagcagcaaaaatgtctgaaggacagcaagtgtcagaaaaagagtccaaaaccttgcagctgtataagcctggtatttcaatggcaacacaagctacatcatcacttgagttatcactgaacatagacttctcgacaataccttcagcttggaatgacgatgagattgtagtatcagatgggatgtcaaaaggaagcgatgaaaatcaagttgcaaatgaaaatggcgagctaacccatccagcatctaagccactagtcttatctaagaaagacataacaatgaaatctaccagtaccagcaaaagtcctccaaatattgtatcaagtctagcaatatctaaatcagatgtaaatactagtgatggtgaccactcacttaccaatattagccttacttcaaatgctgtagtctgccaatctaatcatgttgctggggcgaaaatattggaggatattagatccagggacactgacatggagaagctatctgttcatatatcttcagtaaaattaggtggcaatgatgagattcagattatggcaggaaatcagcgaccagatgtaatgccatgcacatctgttgatgcgcccatgaatcagaatttcgacagagaccaatctcatctcaatcttaatgagcctttgttaccttcagaaaataaggatactgttctttcttgtcaatatagttctgataagcgtcttgattggagttcagagatgcaaaatggtagtgtgactccttcaaataatatagtagattctacgatgctcactggtaaacttcatagtatactactggatgtttcagagcaaccatcatatgcccgattccctagttcattggatacttcattgtgtaatgatacagaaagtaacactgcagcaacgattgacactacaatttcacatatgcagactgagttctcttcaattaataatatgtatgccttgttaaatggaggtcaagatggactcgggactgtaaatacacacggtaatgtttctgaacagcatcctggaatgggaaatcatcaatgtagagcaatgggttcagtaagaactgaagcaatgggttcagtaagaacagatagtataggaagttttgagaagaccataagcataaataaggatgagagcagaataatttctgatatgttatcatcagagtttaatccatgggatgattcatattcgactgctaacaattttgttaggatgcttagggaatctgaaaataatgatgtccacttcgctgtgccttcatggaaatcaggaaccgggaacaaagagtctagattttcatttgctagacaggataaccaagggaacttattggattcatctctcagaaactgtggtactggtaccgagcagaatttcagtttgctaccccagaattctcgaggaaatatctaccagaatggccttgcattccaatctttggagaacgatttttcgaacagcaactctcttggtgtattagatatgttaactactggtacatcgaggtctaaaatatctgcgcccccaggattttcagcaccagcaagagtcccccctcctggattttctactgcacttccatcccaggagtttccttctggaatttcgtctcatgatgggtctatagcccttcctagattcccttgggcattttcttctcaaatttcagcccaggaactgtctaagccccctagtagactgccttctccattttcttctggtttttcatctctggatgggcctaattcctcgtctaggtttccttctgcatttccttctggattttcatcacagaatggccctaacccttcatctggattccctttttcttctgggttttcatcacaggatgggtctaatcagtcgtatggctcaacaaacccagaaaatcttctccggaatactgttctgggtggcagtagtaatcattatcaatctcagtttggaaggcactcaagtgacatggagttcgatgatcctgctatattagctgtgggcaaagggctgatgcctggaattggcgattcagggctggagatgaaaaatactcctgcttttcaagcacagttgcaaccagcaagcagtgatccaagatttcacttacatatacagccaaatgtgcagtctcaccaaaacatgggattcgcagaccatatgcaggatggtttgaaccatatgaatgataatagatttttaggtcagaaccatggtcctctatccccttatgtgcagattccgcaacaacccagaaactcgcaggttacaaatggtcactgggatgggtggagtgattcgagacaagggaatagcactcctatgtcagacatgtcgaggatattatatccaagtgaagtgaacaagttgcacatgctgggttcaaatgatatctataacagagcctttggaatgtgatcatctcctgggataatgtgtgagtttgagctgacatgttctgacttgggggcgttctgtggaagtaactggttgcacaacacagtatacctgatgtggataatggtggttgtgcttatgagctggtacacgagtattttttgctattggaatttacaaaaacgaacctgagttttggttcagctatttgaaattaccaggttcgttctcttgtatgatctgtgaagcttgagtgaaaagaaagattatgtgccgagaacaaagcagctgaagttgaaatatattgagatatgtctataatgtagtgtggtgtggctcttgaacgtgagcgactaagaagatttggtgggcttgacttgatgatggcagtgttttcttgtgttggtacatgatgatggtgttggtcggtggctgcctggccagtacatgcgttttgccataataatacccatggtataataataataa

SEQ ID NO: 206747 - DNA, 3523 bp, Zea Mays
gttagatacagaatttctgcccttgctcaagcaatgactgattcctgtcaaatgtgtacaggtatattacttatgccaaagaagaagaagccatccagtgtattcaagctgtacacaattttgtcttggaagggaaagtgttaagggcatgctttggtactacgaagtattgccatgcatggctgagaaacatgattgtctctatttgcatgatgtaggcagtcaggaggatagttttactaaagatgagataatctcagcatatacgaggaccagagtcccccagatggcatctagtgtttcgcaaagacgtacaggcaacatgttgcctcctccaggagatgatttctcttacagtgcagtggtttcagccaagcataccttcaagaatgcaacacttaataccaccaaccagcccagaccttcacctccaaacagtagttctgggaggtccacacttccaccagctgcctcatggggacaacgtgatgtgaacgccaggacaacagctactggggtgacatcatcacaatctcatacaaaaccaaaatcagaatcacagagtaatccattttcaagttcttcagtaatttccagtacaaaaacaccctcttcatggaatgatgatacaagtacagcagcaaaaatgtctgaaggacagcaagtgtcagaaaaagagtccaaaaccttgcagctgtataagcctggtatttcaatggcaacacaagctacatcatcacttgagttatcactgaacatagacttctcgacaataccttcagcttggaatgacgatgagattgtagtatcagatgggatgtcaaaaggaagcgatgaaaatcaagttgcaaatgaaaatggcgagctaacccatccagcatctaagccactagtcttatctaagaaagacataacaatgaaatctaccagtaccagcaaaagtcctccaaatattgtatcaagtctagcaatatctaaatcagatgtaaatactagtgatggtgaccactcacttaccaatattagccttacttcaaatgctgtagtctgccaatctaatcatgttgctggggcgaaaatattggaggatattagatccagggacactgacatggagaagctatctgttcatatatcttcagtaaaattaggtggcaatgatgagattcagattatggcaggaaatcagcgaccagatgtaatgccatgcacatctgttgatgcgcccatgaatcagaatttcgacagagaccaatctcatctcaatcttaatgagcctttgttaccttcagaaaataaggatactgttctttcttgtcaatatagttctgataagcgtcttgattggagttcagagatgcaaaatggtagtgtgactccttcaaataatatagtagattctacgatgctcactggtaaacttcatagtatactactggatgtttcagagcaaccatcatatgcccgattccctagttcattggatacttcattgtgtaatgatacagaaagtaacactgcagcaacgattgacactacaatttcacatatgcagactgagttctcttcaattaataatatgtatgccttgttaaatggaggtcaagatggactcgggactgtaaatacacacggtaatgtttctgaacagcatcctggaatgggaaatcatcaatgtagagcaatgggttcagtaagaactgaagcaatgggttcagtaagaacagatagtataggaagttttgagaagaccataagcataaataaggatgagagcagaataatttctgatatgttatcatcagagtttaatccatgggatgattcatattcgactgctaacaattttgttaggatgcttagggaatctgaaaataatgatgtccacttcgctgtgccttcatggaaatcaggaaccgggaacaaagagtctagattttcatttgctagacaggataaccaagggaacttattggattcatctctcagaaactgtggtactggtaccgagcagaatttcagtttgctaccccagaattctcgaggaaatatctaccagaatggccttgcattccaatctttggagaacgatttttcgaacagcaactctcttggtgtattagatatgttaactactggtacatcgaggtctaaaatatctgcgcccccaggattttcagcaccagcaagagtcccccctcctggattttctactgcacttccatcccaggagtttccttctggaatttcgtctcatgatgggtctatagcccttcctagattcccttgggcattttcttctcaaatttcagcccaggaactgtctaagccccctagtagactgccttctccattttcttctggtttttcatctctggatgggcctaattcctcgtctaggtttccttctgcatttccttctggattttcatcacagaatggccctaacccttcatctggattccctttttcttctgggttttcatcacaggatgggtctaatcagtcgtatggctcaacaaacccagaaaatcttctccggaatactgttctgggtggcagtagtaatcattatcaatctcagtttggaaggcactcaagtgacatggagttcgatgatcctgctatattagctgtgggcaaagggctgatgcctggaattggcgattcagggctggagatgaaaaatactcctgcttttcaagcacagttgcaaccagcaagcagtgatccaagatttcacttacatatacagccaaatgtgcagtctcaccaaaacatgggattcgcagaccatatgcaggatggtttgaaccatatgaatgataatagatttttaggtcagaaccatggtcctctatccccttatgtgcagattccgcaacaacccagaaactcgcaggttacaaatggtcactgggatgggtggagtgattcgagacaagggaatagcactcctatgtcagacatgtcgaggatattatatccaagtgaagtgaacaagttgcacatgctgggttcaaatgatatctataacagagcctttggaatgtgatcatctcctgggataatgtgtgagtttgagctgacatgttctgacttgggggcgttctgtggaagtaactggttgcacaacacagtatacctgatgtggataatggtggttgtgcttatgagctggtacacgagtattttttgctattggaatttacaaaaacgaacctgagttttggttcagctatttgaaattaccaggttcgttctcttgtatgatctgtgaagcttgagtgaaaagaaagattatgtgccgagaacaaagcagctgaagttgaaatatattgagatatgtctataatgtagtgtggtgtggctcttgaacgtgagcgactaagaagatttggtgggcttgacttgatgatggcagtgttttcttgtgttggtacatgatgatggtgttggtcggtggctgcctggccagtacatgcgttttgccataataatacccatggtataataataataa

SEQ ID NO: 206748 - DNA, 1381 bp, Zea Mays
gaaccgcggctccaaccccgaccgatccctcatcctcgccttccgcaccatcgccaacatggctgaccggtccgcctccccccttctccgctgctcccttttctcacgctataggtccgatccgattcgatcaaattatgtggcttgctagtagtttgcgctgatttgtaggatatggcgtgtgcttgttacgttcatgcgtgcggcgcgctgcctgattttacgcctggggctatggaatgtgaccagggttggttatgactgcgggtctagatttggaacatctgattgatatattgcgtctagtatttttgcatgttcttgcagggtttggtgctggatgatttgtcccttggatctactgaaatcccgttctttataatatgggaacccatctaatatccttaatttcttcgggaactgtcaaaggctaggtcttgtggctactattaaggaccgagcaaatgaaatctacaagaaagttgaagatctcaaatctatcaggggaagaaatcaagatgccatattagctgcatgcctatatattgcttgtagacaagaagatcggcctagaactgtgaaagaaatatgttcagttgctaatggggccacaaagaaagaaattggcagagcaaaagaatttatagtgaaacaactggaagttgagatggggcaatctatggagatgggaaccattcacgctggaaattttctgagacgtttctgctcaactcttgggatgaacaatcaagctgttagggcagcccaggatgcagttaagcactcggaggagcttgatataaggaggagccctatctcaattgcagccgctgtcatttatatgataacccaactctcagaggacaagaagccacttaaagatatatccttggctactggtgtagcagaaggcaccatcagaaattcgtacaaggatctgtatccttatgcctcaaggctcatcccgaatacctacgccaaggaagaagacctgaagaatctctgcacaccttaggaggcttacttttttccccctttctgttactacataattcggaattagatttgtcaaagaggagtgagtgaagttgttcctcgttgtgactgtaccgggcaaggtgtcgtccccgccgtgcttaactttatgatggaatttcttttcagagcacctaccacctgaagatttgtgggatacgtatactcacttcggaaagaatgtagatagcaagcagttggacaagcacaagattttaatttaaaacatgattttgttctccatcttctgaagaaaccatcacttgtccatctttattctaagtgcccttggattccaagagaattgttagttggctaaaaattgggtaaaattatgatatgtttg

SEQ ID NO: 206749 - DNA, 1893 bp, Zea Mays
ctcggtttggcgcgctgcaaaaccctaaaccctagcatgtacgcacgcaaagccgcgaaccctaaaaacctcccgcgtaagcacctttgtgtggcgtctgtggcgaaattggacgccatggcgacgcctaggcacgccaggcaacgccatacgcatccaaggcgcggcgggatcgacgcctagaacctaggctcgcctggacgcctaggcgacgccataataaccttgaggataacactacttcaaaggaaaccaaacatcaactcctatctctggtcttcttttcctttggggatgtctgagacagtgcgtacgaagaagggaggcgagaacaaggaagcaccgaatcacacctcaagaagttgtctgccccatcctgatcttgtctcttccactgctgacgctgatctaggaaccaccggaagtaggtaaatggggagtcagaacgaagagttgaaagccaaggccgagattagattggggacaatgttttcaagtcagacgacttgctgatcgttctggctgatcgactagggcgattaattgtgattggtccaaaccgacttggacgattaatgggacaacttgaaaacattgattggggaaagtgcataatatgccttttttactatgtagtgaatagataaggagcattggaagaaaatatttaatgaaatgagtaaagatgttgccttttatgttggtttctcatgttatttagactgatttaataatatataaatttcaatcaaacaataagtcaataatactccactttgtgtattatgatacctgtgttccaaacacctgcttcttcagctttcctgtctttttctattcctctattttgcacgctcattcctttcctattcgtacattttctacagttctgcgttccacattcctaggttccaaacataccctaatggtgtgtttggtttgtggagtcaccatatgcttcatgaggaccgagcaaatgaaatctacaagaaagttgaagatctcaaatctatcaggggaagaaatcaagatgccatattagctgcatgcctatatattgcttgtagacaagaagatcggcctagaactgtgaaagaaatatgttcagttgctaatggggccacaaagaaagaaattggcagagcaaaagaatttatagtgaaacaactggaagttgagatggggcaatctatggagatgggaaccattcacgctggaaattttctgagacgtttctgctcaactcttgggatgaacaatcaagctgttagggcagcccaggatgcagttaagcactcggaggagcttgatataaggaggagccctatctcaattgcagccgctgtcatttatatgataacccaactctcagaggacaagaagccacttaaagatatatccttggctactggtgtagcagaaggcaccatcagaaattcgtacaaggatctgtatccttatgcctcaaggctcatcccgaatacctacgccaaggaagaagacctgaagaatctctgcacaccttaggaggcttacttttttccccctttctgttactacataattcggaattagatttgtcaaagaggagtgagtgaagttgttcctcgttgtgactgtaccgggcaaggtgtcgtccccgccgtgcttaactttatgatggaatttcttttcagagcacctaccacctgaagatttgtgggatacgtatactcacttcggaaagaatgtagatagcaagcagttggacaagcacaagattttaatttaaaacatgattttgttctccatcttctgaagaaaccatcacttgtccatctttattctaagtgcccttggattccaagagaattgttagttggctaaaaattgggtaaaattatgatatgtttg

SEQ ID NO: 206750 - DNA, 2317 bp, Zea Mays
gccaggcaacgccatacgcatccaaggcgcggcgggatcgacgcctagaacctaggctcgcctggacgcctaggcgacgccataataaccttgaggataacactacttcaaaggaaaccaaacatcaactcctatctctggtcttcttttcctttggggatgtctgagacagtgcgtacgaagaagggaggcgagaacaaggaagcaccgaatcacacctcaagaagttgtctgccccatcctgatcttgtctcttccactgctgacgctgatctaggaaccaccggaagtaggtaaatggggagtcagaacgaagagttgaaagccaaggccgagattagattggggacaatgttttcaagtcagacgacttgctgatcgttctggctgatcgactagggcgattaattgtgattggtccaaaccgacttggacgattaatgggacaacttgaaaacattgattggggaaagtgcataatatgccttttttactatgtagtgaatagataaggagcattggaagaaaatatttaatgaaatgagtaaagatgttgccttttatgttggtttctcatgttatttagactgatttaataatatataaatttcaatcaaacaataagtcaataatactccactttgtgtattatgatacctgtgttccaaacacctgcttcttcagctttcctgtctttttctattcctctattttgcacgctcattcctttcctattcgtacattttctacagttctgcgttccacattcctaggttccaaacataccctaatggtgtgtttggtttgtggagtcaccatatgcttcatgaggtgatgcatcataagttcttcccataaattttggtggactcaatccactcatcatgtatatactaattattagcttatgaggaataagatgatgatggatcaactcattctattccataaaccaaataaaaaagtgaggagtgagaagaagatgaaccacttcattcttcaaaccaaacacaccctaagtgattcatgttatgtatatgtatggtagccttttttctctttttgaagatagatgacatgtttaacacttccctaaatactcattgagtcattgaacatattgttgcttcctgtgttcgatagaacaataacttatagcttaattcagctaaattactgatatgtagtactccctccattaaaaaatggtaatcatattagaccagagaaaaagtcattcaaaatagattttgaccatcaatttctcttgtaatgtaaagtcgacggtctaaaaataaataccatcttataggcacttttaacacaaatctattgatgcagattatatgctctaaactttaatggaatttgattagttggtcaaaatttatgaagtttgactttttctctggccaaatatgattaccacttctgaacggagggagtaattatttgtttttgtctttactcttcaaggaccgagcaaatgaaatctacaagaaagttgaagatctcaaatctatcaggggaagaaatcaagatgccatattagctgcatgcctatatattgcttgtagacaagaagatcggcctagaactgtgaaagaaatatgttcagttgctaatggggccacaaagaaagaaattggcagagcaaaagaatttatagtgaaacaactggaagttgagatggggcaatctatggagatgggaaccattcacgctggaaattttctgagacgtttctgctcaactcttgggatgaacaatcaagctgttagggcagcccaggatgcagttaagcactcggaggagcttgatataaggaggagccctatctcaattgcagccgctgtcatttatatgataacccaactctcagaggacaagaagccacttaaagatatatccttggctactggtgtagcagaaggcaccatcagaaattcgtacaaggatctgtatccttatgcctcaaggctcatcccgaatacctacgccaaggaagaagacctgaagaatctctgcacaccttaggaggcttacttttttccccctttctgttactacataattcggaattagatttgtcaaagaggaagcacctaccacctgaagatttgtgggatacgtatactcacttcggaaagaatgtagatagcaagcagttggacaagcacaagattttaatttaaaacatgattttgttctccatcttctgaagaaaccatcacttgtccatctttattctaagtgcccttggattccaagagaattgttagttggctaaaaattgggtaaaattatgatatgtttg

SEQ ID NO: 206751 - DNA, 3015 bp, Zea Mays
cgcacggagacggagtcccaggcacccagccaacctttttctactcttctggcagtctctgtctcccacacattctctctctaaactcccatgtcagcccgtctttatcgattaaggtcactttaccactagttaaagacgagcgccgcgtgcagacggagtggtagaaaaagctggatgtccatcgccttgcttccagcaacagcagcagaagtggcgcactgtgctttgcggtggcggaggctgcgagagaggaggaacttgcaagccgacttccatggctgccgccttctccgccgctatcctcttccacctgctgctgctcctcttctcgccgtccgctgcgcagcctggtttcattagcttggactgcgggggagctcgtgatcacacggatgccattgggatccagtggacctctgatgccagcttcgtctctggcggccaggccgcgcagctgctggtccagaatggcctgcagcagacccagcagcagctgaccaccgtgcgctacttccccgcggacaacaggaagcactgctacaccatgaacgtcaggaacaggacgcgctaccttgtcagggccactttcctctacggcaacttcgataacagcaacgtctacccgaagttcgatatctccctcggagcgtctccctggtccaccatcgtcgtcgacgacgccaccacccccgtcgttgaggaagccatcatcttggctgctgctcccacgctcagtgtatgtctctccaatgccagcacgggacagcccttcatctctactctggagcttcgacagtttaacggttcgctctactacaccactgacgagacacgcttctttcttggactgtctgcgaggataaattttggcgcaggaagcaatgattcagtgagatatcctgatgatccatttgatagaatctgggaatctgattctgtgaggagagcaaattaccttgttgatgttgctccagggactgaaagaatatcaactacaaaacccatatttgtcggtaccaacgaagaaccacctgaaaaggtcatgcaaacagcagtagttggccaggatgggtcattgaactaccgccttgatttggaaggtttcccagcaaatgcttggggagtctcgtattttgcagaaattgaagatttggcaccaaatgaaacgaggaaatttaagttagaggtccctggcatgccagcactcagtaaaccaactgttgatgtggaggagaatgctcaagggaaataccgtttgtatgaaccaggctacacgaatttgtcacttccgtttgttttctcctttgggttcaggaagacgaatgattcttcaaaggggcctattttgaatgccctggagatttacaaatatgtccaaattactatgggatcacaggatgcaaatatcatggccagcatggtatcacgatatccacaggaaggttgggcacaagagggtggtgatccgtgcttaccagcatcatggtcctgggtgcaatgcagttcagaaacttctccaaggatattctcaatcacattgtctgggaagaacattaccggaagtatcccggtggaactgacaaagctatcagggttggttgagctaaggcttgatggtaattcattttctggccaaattcctgatttcagagaatgtgggaatttgcagtatattcaccttgagaacaatcagttaactggtgaattgccatcttctttgggtgacctacctaacctgaaagagttgtatgttcaaaataacaagctgtctgggcaggttccaaaagcacttttcaagagaagcattattttgaacttctcaggtaacagtggccttcacatagtaagcaatggcattagccacaccataattgttatatgtctggtgattggagccgttgtcttactgggtgttgctattgggtgctatttcattacatgtaggagaaagaagaaatctcatgaagacactgttgtcattgcagcagcaccagctaaaaaacttggttcatattttagtgaagtggctacagaatcagcacacagattttctttatctgaaattgaaaatgctactggcaaatttgagagaagaattgggtctggaggctttggcatagtatactatggaaagttggctgatgggagagagattgcagtcaaacttctcacgaatgactcgtatcagggaatcagagaattcttgaatgaggtgacattgctttccagaatacatcatagacacctggttacattccttggttacagtcagcaagatggcaaaaacatactagtgtatgagttcatgcataatgggacactaaaagagcaccttcgtggagctgataatgaaaagataactagctggctgaagcgtcttgagattgcagaagattctgcgaaaggtatagagtatctccacacgggatgctccccaacaatcatccatagagacctgaagagcagtaacattctcctagacaagaacatgagagcaaaagtggcagacttcggtctttcgaaacctgcagtggatgggtctcatgtgtcaagtatagttcgagggacagttggatacctggacccagagtactacatctcgcagcagctgacggagaagagcgacatctacagcttcggcgtgattttgctggagctcatctctgggcatgaacccatctcgaatgacaactttgggctcaactgccggaacattgttgcgtgggcccgatcgcacatcgagagcgggaacatccacgccatcattgatgagtcgttggacagaggctgctatgacctgcagtcggtgtggaagatcgcggaggtagcgtggagcagaatggaggagcatctttcgacgagctgctcatgcagccgggtctcagatgagatgagaacaacctactcgtaccttgagtccattgtatgtagtaattaatgtgtttactacattttttttgagaaacaaattaagtaatgctagcaaaggaaccagtatattattattattat

SEQ ID NO: 206752 - DNA, 1978 bp, Zea Mays
cttgtgcatacgctgttggaacccctaacccagcatgccagattataaaacgccaaccgtaaccgaaggtggcacacgacaaaatcaccaaccagtccagtcaccactgggtgctaaggagaaatggccacttccgcgcctgcggccaacgccgacggcgctgctcccggaggtgtagatggtcgcagcggcttctgtgaggtgaccaggacgttccgcagcctgcgcccgccggtgccgctgccgccgacggactcaccgctctcgtttccggagtttgcgttctcgctcctggcgtcgtccccgacccccgcgcacccggctctcctcgacgccgccaccggcgaggccgtgtcgttcccggcgttcctgtcccaggtacgcgcgctcgcgggggcgctgcgctccgtggtccggctcggccgcggcgacgtcgcgttcgtcctcgctccgacacggctggacgtgccggtgctctacttcgcgctgctctcattcggcgccgtggtgtcgccggtaaaccctgcgctgaccgcggacgaggtcgcgcgcctcgtggcactgtcaggcgcgtccgtcgccttcgccgtgtcgtcgaccgccgcaaagctgccggctggcctccccgccgtgctcctcgattcggaccacttccgctcctttctgcagaagcagagcgacggccgtggggaggagggacttgcggcggacacggcggtggtgcggcagtcggatacggcggcgatccagtactcgtcggggacaaccgggagggtgaaggccgcggcgctgccgcaccggagcttcatcgcgatggcggcgggatcccatgctctgctggggaaaccgaggcgcggtcgcgagaggtcgctgctgggcgcgcccatgttccactcgatggggttctactacacgctgaagggggtggcgctggggcacacgacggtgatgctgaccgacgcggtggcgcggcgcggcgtgaagggggtgatcgaggcggcggggaggtgggccgtcagtgagatgacggcgtcgccaccggtggtggtggccatggtcaaggagcggtgccacctagaggcgctggagcgcgtggtatgtggcggcgcgccgctgccgaggacggcagccgagagtttccgacgacggttccccaacgtggatctctgcatgggctacggttcaactgaggctggtggcatatcgctgatgatccagcgggaggagtgcggccgcatctgctccgccggccgtgtctcggagaacgtggaggtgaagatcgtggaccacgtgaccggcgaagctctgtccgtgggccagaaaggggagcttctggtgagagggcctgccgtcatggccgggtatgttggcgacgaggaggccaacgctagcagctttgattctgaaggctggctgaggactggggacctttgctacatcgaccaggacgggttcctgttcgtggtggacaggctgaaagagctcatcaagtacaagggctatcaggttccacctgcagagctggagcttgtcctgcagtcgttgccggaagttatcgatgccgcagtcatgccgtatcctcatgaggaggcagggcagatcccagtagcgcttgtggtcaggcagcctggtagcaaggtcacggaggctcaagtcatggaccacgtcgcccagagggtggcgccttacaagaagatccgcaaggtgctctttgtcgactccattcccaagtctccggctggcaagatactgaggaggcagctgaccaaccatgtgcaggctggcgctgtttctagaatgtaattcttctttatttacttgattgtgtgatgcgtgcaagagacacagaatgacgcgacgatgggttagaacgcgatcgactttttaaacaaataatagtggcatgctgtggaactctatctatgtatgtaaggtccgtttgcatccttggaattaaattttattctaataatagtaa

SEQ ID NO: 206753 - DNA, 1806 bp, Zea Mays
acaaagttcaccaaatccctgacttttatgtgtcgaagaaaggtaggctgtagtgcgacatctgctctgccacgtttctgctatggtggtgccgtggtggtgtgactaatcatcagagataagtagcaaaccgtcaaccaccagggagacgagccaggttgagaaggaaagcatcgcgagttcgccatacggatgggttccaaagcgcctttctgtctcacgctcctcttgctgctcgctgcggcctgtggacctgcagcacatgcccacgatgctgtcgagctcccgcatcatggcttagccttgaaggaacaaatttcttcaaccaagattcctgcccgtctcaagagtggcagcggactatgctcggcctgtgaaaacttcacgagcgaagccgtcacttatctcggcaaggaacagacacaggacaggatcatggagttccttcatgatgcttgctcccaatcattctcctttgaacagaagtgtgtcgagctgatggactcttatgcgactctcctgtttgccaagatcacggagatcagaccggaagcgttctgcaaacggtatggcctgtgcagggacacagctcttctctccggtgtgggaagtgacagcacgtgtgtgttctgccaccatctgctcgatgaaatcatgtccaaactgaaagatccagatgcggagtttgagataattcagattcttgtcaaggagtgcaataagatcgaaggtcacgtccagcaggtaggctttttggctcttcctctgtccttgtgattctgtgcaaaaggcgagctcgtcctcttccttaatgaggttcttaagagtgtttcctcagctgtattggttacccttactactttggattttggaaacagtccgagacccttattagttaacaatatcatagttgttgcaaagatactctactttttttcatcatctcttctttaccattcatatctcccagttgttgcaagggaaaattaactccagtaattctttcttgaggggtagaacaggagtgtcgttctcagattcaatgattatcaaacaacatgtactaattatattttagcaagctggcagttgatgtgattctctatgtttacattttgtcaaattaacgacaagagggttaagttttagaagcaactaccctgcactggttaataatatctgtgaggacccaagttggtcccagtcctcttcgattggtgctctgttcctgtgatttgaggaaagtttcagtacaacacattgtattttgattagtgaatgaagcatttagacgatattgttgcaggttgagcagatagtggttgaaaggtctgaaggttggcattgtggatatttttgctatcatgcatggattcccagacaatgtgaggacgaaccagaagggcgagttctgggtggcgatccactgtcggagaaggacagcccgatggccagatgcttcacatcatggaggacgacaagggagaggtggtgagagttatcatcgaagtggagggtctgtctgatgccattcatcgctgtctttgacctcgtgaaggcgtcttagccacttcaatttgattggaaatattgttgttttaagatacgggtccatggttaatgttgtacgcttctctgagaagacctgtcattccaataatttggttctggagcaacctggagctgtatactgatctagcttcttttagtaacaaatgtaagttgctcacattttctttagattgtctatagaactttgaacaaccagctcgtcccttctaatttttatttggccagcaaacaaat

SEQ ID NO: 206754 - DNA, 5190 bp, Zea Mays
cacagacttgttgtctgtctccccttggttctcggcggctcaagcagcgacagactcatcatcgagttgtcatcgattcctcgtggaggtcttgctcgcggcggaggtatatatttatatatctcaggtgaattcagacatggcagatgccctatttgtagttcttagtaaacttgctgattccttgggagaacagacactagagaggattagcacaaagctgattgaagtagcaccagttttgacagattttgagcatagcatgaagcaaatcgaggctgagctattgattcttcaggcttttattgcacaggttgggacaaaagtcggtgataaggcatttgatgcctggctggaccaagtgagagatgttgcccatgaggtagaagacatcattgatgagtatgcttaccttgaggttcaagccgtggatactggcagcttctttaagaggaagttccttcagataaaaaagttcgctgcatggcagaagtttcatagccagatcagtcatgtagaagctcgaattcagaggctaggtgaaattaggaatcgatatggcatcttgtcaggtgaaatagacaggagtaagaaattgaggagccccaatcggctctttatgtcagattcttcttacttaactgataactctgaaatagtggggcatgttgatgaaattggaagattgacacagtggttacttgagtacaaacaagagcgaactcttattgccgtttttggtatgggaggttcaggaaaaactactattgcaagcagtgcatacaagagtcaaaagatcacaaggactttcaattgtcatgcatgggttactgtatctcagacttaccaagttgaagaactactaagagaaatcataaatcagctaatagatcagagagcaagcatgtcaagtgggtttatgactatgagcggcttgaggctagttgaggtaatacaaagctatttgcaagataaaaaatatttcattgtcttggatgatgtatgggataaagatgcatggctatttctaaactatgcatttgtcagaaacaattgtggaagcaaagtgctgataactactcggagaaaggacgtatctagcttggcagttgatcagtatacaattgagcttaaaactcttcaatatgctgaatcctgggaacttttctgtaaaaaggcatttcgtgcatcaaaggataaccaatgtcctgagaaccttaggttttgtgcagagaaaattgttgctaggtgtcagggattgcccctggctattgtaaccattggaagtgttctatcataccatgaattcgaagagcagggatgggaatctttctacagccaacttagctggcagttagctaacaatccggagctgaattggatatctaatgttctgaatatgagcttgaatgatctcccgagttatctgaggaactgctttctgtactgcagtctttatcctgaagattacaagattaaaagaaaagtgatttccaagctatggatagcagaaggtttagtggaagatagagaagatggaacaacaatggaggaggttgccaattattaccttgtggagctcactcagcgttgtcttcttcgagtcacagaaagtaatgcatgtggaaggccgagagcttttgttatgcatgatcttgtgcgagagttaacctccaacattgctaaaaaggagaagtttggtattgcatatggcgatgctagtacaacccaagttccccctgaagttcgccgcttatgcatacaaagagaagtgcctggcgtggtcacagaattgtataacttgcgctatattgatttttcatacacaaaagtgaagacaataccagcatcattcagaaaacttgtcaacctacaagttttggatctcagattcacctacgtagaggagttgccactggaaataactacgctaactaacttgcgtcatctacatgtgtttgcagtccatgattttcaacaaagatcattgaattgtttaggcgcaacaaaaattcctgttaacatttgtcatctaaagaatctgcaagctatacagatcgttttggccaacaaagatttggtttcacaacttgggaacttgaaattaatgagaagtttggctatagcggaagtgcggcaaagctacattgcagaattatggaagtccctgacaaagatgcctaacctgaataggttggctatttcaacatgcaacatggaggagattcttgattttaaaatgctaaagcccttatcaaatctggttttcttcaagcttgcaggaaagttggagtcaggcgtgcttcctttgatgttgtattattttgagaagttaacatggttacaattagactggtccggtctaaagaaggaccctatgagctccttatctcacatgtcgaaccttgttcatctgttcatgtgcgggtcatattgtggggaacagctaactttttgttcaggatggttccccaagctcaattatctgcaattatctaaaatggagaatctgaattggattgagatagaggatggaacaatgatgtgtctaaataatttgtacttagttgatttagggaatctaaaggctgtgccctatggcatcaagtacatcaggacactgcaccagatgcatctgacagatatgtcaaaggagtttctaggaagtctgcaaggaagcgcgagtcccgttgttcaacatatatgcaacatccatatttttgaatcctctgattctgaagcagtaaataaattcttctttgagccataccttgccaccaagttcggccctggtgcaactaagcatgcccctacttacctgggatcatctggcatctgacagtcggtgagaattcttcttcaatgaaccagccgcgcaatatgctgttcatcttggtgccggaacttgagacggaactgattgttcgtgttgtgcctcgtttatggcttttgaacctagctagtggcctgctatggacttcctccacacaggtgttgcttaatggatctccagggcagcatatatctcatcggcgtgggctcagacaagatgacccactttccccaatgttattcattttggtgatggacgttctgggctttcttattaccaaggctgagaatgaagggttgcttcggccccttgctacaagaactctccatcacagattctctatttatgttgatgatgtggttatatttatccaaccaacagtcggggatatcaggactgtactggacattcttcatatctttggggaggcttccaggttgcgaactaatatccagaaaagcaatgtatgcccaattagatgcggggaacaagacttgaccttactgcaaagcttgctgccttgtgagatctcacaatttccctgcaaatacttgggtctacttcttgccatcaagaaacttaccaaggaccaagtacaaacgattattgataaaattgccaaccaactatcggggtggaaatctgatttgatgactaaggctggatggaaggtccatgtgcagtttgtcctcacagggatggtcatatatctcgcaatggctgtggatttacctccttgggctctcaaagctattgacaagatccgccgaggctttctttggcgatggcgcaaagaagcgagggggggacactgtcttgttgcttggggaaaagtttgtcggccgcttgagcttggtgggctagggatttccaatctcattgatcttgcttgggcacttcgtatgcgttggttttggttagcaaaaactgatccgggacggccatgggcctcccttgctatacaagttcccagcaaggctaaagttttcttctcggtggctatgcaaactgaaattggtaatggagcctctactcttttttggtctgaccgttggttgatgggacacagggtcatggacattgccccaagattactccagaatgttcctaaaaggagggttaataagaggactgttttggatgctctcactaatcagacttggatttcagacatacaaggagctcttgctgttggggttatttctgaataccttgctctatgggatattgtcacctcggttcagcttagacgcgaagtgaatgacactcacttctttcgtctcgccgccaatgggaagtattcaacaaaggcagtctatgagggtttttttccttgggtcgacgatttttgaaccgtaccacataatttggaaaacccgggctcctccaaaggccaagttcttcatgtggctggtcgcgacggctttggacagctaacaggttggaaaagagaggcatggatcaccctacgagctgccctttgtcaggagcaggccatttgctgattgggtgtgtgttcgcccgagatttctggtttaaactactatctcaagttaatctccaaaacatggcctctcagcttgttgatgcatcttttatgggctggtggagatggctgggcaatcagatacatggagtcagtggcaggggaagcagtaaactccctggtaatttcaggagcttggacaatatggaaacgtcggaatagctgtgtcttcgacagaaacagacctaatgtggctcttgctgtcagaatggcgatcaagagcgagagaagcgggagctgactggggcaagaaaactatccttgctgactagtcacatcccgggtctgtaggaatttgtagttttgggtgctttattcatggatgagtatcagtatgtctgtatttggccccctgtgaggtggctgttttgtattatctctgtttttttcttcttaatggaatgaaacacaactctcctgcgttttttagaaaaaaaaaacaatttgcagccaccaacaatgctggattcaggaaacatccgccatctgtctgcatggcggctgaagcatgggtcttgcttgaagattccgtgtttgctgaaaacggccagcaggaaaacagtagacgtttggttgaacagggtgccactgccagagatttgagataggagagtggcagtggttttgcttgagctccgtgtcacctgaaatactttgttgtagcaaggcctgtaggagaatttctcattgtaccatcgctagacttggtcagtctgtactttatacggttagtcgcatgtaaactgtgagtttaccaaaaaagaattaccagaccctcactactatataaaacaccatttttcattggttc

SEQ ID NO: 206755 - DNA, 5031 bp, Zea Mays
cacagacttgttgtctgtctccccttggttctcggcggctcaagcagcgacagactcatcatcgagttgtcatcgattcctcgtggaggtcttgctcgcggcggaggtatatatttatatatctcaggtgaattcagacatggcagatgccctatttgtagttcttagtaaacttgctgattccttgggagaacagacactagagaggattagcacaaagctgattgaagtagcaccagttttgacagattttgagcatagcatgaagcaaatcgaggctgagctattgattcttcaggcttttattgcacaggttgggacaaaagtcggtgataaggcatttgatgcctggctggaccaagtgagagatgttgcccatgaggtagaagacatcattgatgagtatgcttaccttgaggttcaagccgtggatactggcagcttctttaagaggaagttccttcagataaaaaagttcgctgcatggcagaagtttcatagccagatcagtcatgtagaagctcgaattcagaggctaggtgaaattaggaatcgatatggcatcttgtcaggtgaaatagacaggagtaagaaattgaggagccccaatcggctctttatgtcagattcttcttacttaactgataactctgaaatagtggggcatgttgatgaaattggaagattgacacagtggttacttgagtacaaacaagagcgaactcttattgccgtttttggtatgggaggttcaggaaaaactactattgcaagcagtgcatacaagagtcaaaagatcacaaggactttcaattgtcatgcatgggttactgtatctcagacttaccaagttgaagaactactaagagaaatcataaatcagctaatagatcagagagcaagcatgtcaagtgggtttatgactatgagcggcttgaggctagttgaggtaatacaaagctatttgcaagataaaaaatatttcattgtcttggatgatgtatgggataaagatgcatggctatttctaaactatgcatttgtcagaaacaattgtggaagcaaagtgctgataactactcggagaaaggacgtatctagcttggcagttgatcagtatacaattgagcttaaaactcttcaatatgctgaatcctgggaacttttctgtaaaaaggcatttcgtgcatcaaaggataaccaatgtcctgagaaccttaggttttgtgcagagaaaattgttgctaggtgtcagggattgcccctggctattgtaaccattggaagtgttctatcataccatgaattcgaagagcagggatgggaatctttctacagccaacttagctggcagttagctaacaatccggagctgaattggatatctaatgttctgaatatgagcttgaatgatctcccgagttatctgaggaactgctttctgtactgcagtctttatcctgaagattacaagattaaaagaaaagtgatttccaagctatggatagcagaaggtttagtggaagatagagaagatggaacaacaatggaggaggttgccaattattaccttgtggagctcactcagcgttgtcttcttcgagtcacagaaagtaatgcatgtggaaggccgagagcttttgttatgcatgatcttgtgcgagagttaacctccaacattgctaaaaaggagaagtttggtattgcatatggcgatgctagtacaacccaagttccccctgaagttcgccgcttatgcatacaaagaggtgcccaaaccttgaattctataggtagttcgcggttccatgattttcaacaaagatcattgaattgtttaggcgcaacaaaaattcctgttaacatttgtcatctaaagaatctgcaagctatacagatcgttttggccaacaaagatttggtttcacaacttgggaacttgaaattaatgagaagtttggctatagcggaagtgcggcaaagctacattgcagaattatggaagtccctgacaaagatgcctaacctgaataggttggctatttcaacatgcaacatggaggagattcttgattttaaaatgctaaagcccttatcaaatctggttttcttcaagcttgcaggaaagttggagtcaggcgtgcttcctttgatgttgtattattttgagaagttaacatggttacaattagactggtccggtctaaagaaggaccctatgagctccttatctcacatgtcgaaccttgttcatctgttcatgtgcgggtcatattgtggggaacagctaactttttgttcaggatggttccccaagctcaattatctgcaattatctaaaatggagaatctgaattggattgagatagaggatggaacaatgatgtgtctaaataatttgtacttagttgatttagggaatctaaaggctgtgccctatggcatcaagtacatcaggacactgcaccagatgcatctgacagatatgtcaaaggagtttctaggaagtctgcaaggaagcgcgagtcccgttgttcaacatatatgcaacatccatatttttgaatcctctgattctgaagcagtaaataaattcttctttgagccataccttgccaccaagttcggccctggtgcaactaagcatgcccctacttacctgggatcatctggcatctgacagtcggtgagaattcttcttcaatgaaccagccgcgcaatatgctgttcatcttggtgccggaacttgagacggaactgattgttcgtgttgtgcctcgtttatggcttttgaacctagctagtggcctgctatggacttcctccacacaggtgttgcttaatggatctccagggcagcatatatctcatcggcgtgggctcagacaagatgacccactttccccaatgttattcattttggtgatggacgttctgggctttcttattaccaaggctgagaatgaagggttgcttcggccccttgctacaagaactctccatcacagattctctatttatgttgatgatgtggttatatttatccaaccaacagtcggggatatcaggactgtactggacattcttcatatctttggggaggcttccaggttgcgaactaatatccagaaaagcaatgtatgcccaattagatgcggggaacaagacttgaccttactgcaaagcttgctgccttgtgagatctcacaatttccctgcaaatacttgggtctacttcttgccatcaagaaacttaccaaggaccaagtacaaacgattattgataaaattgccaaccaactatcggggtggaaatctgatttgatgactaaggctggatggaaggtccatgtgcagtttgtcctcacagggatggtcatatatctcgcaatggctgtggatttacctccttgggctctcaaagctattgacaagatccgccgaggctttctttggcgatggcgcaaagaagcgagggggggacactgtcttgttgcttggggaaaagtttgtcggccgcttgagcttggtgggctagggatttccaatctcattgatcttgcttgggcacttcgtatgcgttggttttggttagcaaaaactgatccgggacggccatgggcctcccttgctatacaagttcccagcaaggctaaagttttcttctcggtggctatgcaaactgaaattggtaatggagcctctactcttttttggtctgaccgttggttgatgggacacagggtcatggacattgccccaagattactccagaatgttcctaaaaggagggttaataagaggactgttttggatgctctcactaatcagacttggatttcagacatacaaggagctcttgctgttggggttatttctgaataccttgctctatgggatattgtcacctcggttcagcttagacgcgaagtgaatgacactcacttctttcgtctcgccgccaatgggaagtattcaacaaaggcagtctatgagggtttttttccttgggtcgacgatttttgaaccgtaccacataatttggaaaacccgggctcctccaaaggccaagttcttcatgtggctggtcgcgacggctttggacagctaacaggttggaaaagagaggcatggatcaccctacgagctgccctttgtcaggagcaggccatttgctgattgggtgtgtgttcgcccgagatttctggtttaaactactatctcaagttaatctccaaaacatggcctctcagcttgttgatgcatcttttatgggctggtggagatggctgggcaatcagatacatggagtcagtggcaggggaagcagtaaactccctggtaatttcaggagcttggacaatatggaaacgtcggaatagctgtgtcttcgacagaaacagacctaatgtggctcttgctgtcagaatggcgatcaagagcgagagaagcgggagctgactggggcaagaaaactatccttgctgactagtcacatcccgggtctgtaggaatttgtagttttgggtgctttattcatggatgagtatcagtatgtctgtatttggccccctgtgaggtggctgttttgtattatctctgtttttttcttcttaatggaatgaaacacaactctcctgcgttttttagaaaaaaaaaacaatttgcagccaccaacaatgctggattcaggaaacatccgccatctgtctgcatggcggctgaagcatgggtcttgcttgaagattccgtgtttgctgaaaacggccagcaggaaaacagtagacgtttggttgaacagggtgccactgccagagatttgagataggagagtggcagtggttttgcttgagctccgtgtcacctgaaatactttgttgtagcaaggcctgtaggagaatttctcattgtaccatcgctagacttggtcagtctgtactttatacggttagtcgcatgtaaactgtgagtttaccaaaaaagaattaccagaccctcactactatataaaacaccatttttcattggttc

SEQ ID NO: 206756 - DNA, 4888 bp, Zea Mays
aaataactcgccacagacttgttgtctgtctccccttggttctcggcggctcaagcagcgacagactcatcatcgagttgtcatcgattcctcgtggaggtcttgctcgcggcggaggtatatatttatatatctcaggtgaattcagacatggcagatgccctatttgtagttcttagtaaacttgctgattccttgggagaacagacactagagaggattagcacaaagctgattgaagtagcaccagttttgacagattttgagcatagcatgaagcaaatcgaggctgagctattgattcttcaggcttttattgcacaggttgggacaaaagtcggtgataaggcatttgatgcctggctggaccaagtgagagatgttgcccatgaggtagaagacatcattgatgagtatgcttaccttgaggttcaagccgtggatactggcagcttctttaagaggaagttccttcagataaaaaagttcgctgcatggcagaagtttcatagccagatcagtcatgtagaagctcgaattcagaggctaggtgaaattaggaatcgatatggcatcttgtcaggtgaaatagacaggagtaagaaattgaggagccccaatcggctctttatgtcagattcttcttacttaactgataactctgaaatagtggggcatgttgatgaaattggaagattgacacagtggttacttgagtacaaacaagagcgaactcttattgccgtttttggtatgggaggttcaggaaaaactactattgcaagcagtgcatacaagagtcaaaagatcacaaggactttcaattgtcatgcatgggttactgtatctcagacttaccaagttgaagaactactaagagaaatcataaatcagctaatagatcagagagcaagcatgtcaagtgggtttatgactatgagcggcttgaggctagttgaggtaatacaaagctatttgcaagataaaaaatatttcattgtcttggatgatgtatgggataaagatgcatggctatttctaaactatgcatttgtcagaaacaattgtggaagcaaagtgctgataactactcggagaaaggacgtatctagcttggcagttgatcagtatacaattgagcttaaaactcttcaatatgctgaatcctgggaacttttctgtaaaaaggcatttcgtgcatcaaaggataaccaatgtcctgagaaccttaggttttgtgcagagaaaattgttgctaggtgtcagggattgcccctggctattgtaaccattggaagtgttctatcataccatgaattcgaagagcagggatgggaatctttctacagccaacttagctggcagttagctaacaatccggagctgaattggatatctaatgttctgaatatgagcttgaatgatctcccgagttatctgaggaactgctttctgtactgcagtctttatcctgaagattacaagattaaaagaaaagtgatttccaagctatggatagcagaaggtttagtggaagatagagaagatggaacaacaatggaggaggttgccaattattaccttgtggagctcactcagcgttgtcttcttcgagtcacagaaagtaatgcatgtggaaggccgagagcttttgttatgcatgatcttgtgcgagagttaacctccaacattgctaaaaaggagaagtttggtattgcatatggcgatgctagtacaacccaagttccccctgaagttcgccgcttatgcatacaaagagtccatgattttcaacaaagatcattgaattgtttaggcgcaacaaaaattcctgttaacatttgtcatctaaagaatctgcaagctatacagatcgttttggccaacaaagatttggtttcacaacttgggaacttgaaattaatgagaagtttggctatagcggaagtgcggcaaagctacattgcagaattatggaagtccctgacaaagatgcctaacctgaataggttggctatttcaacatgcaacatggaggagattcttgattttaaaatgctaaagcccttatcaaatctggttttcttcaagcttgcaggaaagttggagtcaggcgtgcttcctttgatgttgtattattttgagaagttaacatggttacaattagactggtccggtctaaagaaggaccctatgagctccttatctcacatgtcgaaccttgttcatctgttcatgtgcgggtcatattgtggggaacagctaactttttgttcaggatggttccccaagctcaattatctgcaattatctaaaatggagaatctgaattggattgagatagaggatggaacaatgatgtgtctaaataatttgtacttagttgatttagggaatctaaaggctgtgccctatggcatcaagtacatcaggacactgcaccagatgcatctgacagatatgtcaaaggagtttctaggaagtctgcaaggaagcgcgagtcccgttgttcaacatatatgcaacatccatatttttgaatcctctgattctgaagcagtaaataaattcttctttgagccataccttgccaccaagttcggccctggtgcaactaagcatgcccctacttacctgggatcatctggcatctgacagtcgtggcctgctatggacttcctccacacaggtgttgcttaatggatctccagggcagcatatatctcatcggcgtgggctcagacaagatgacccactttccccaatgttattcattttggtgatggacgttctgggctttcttattaccaaggctgagaatgaagggttgcttcggccccttgctacaagaactctccatcacagattctctatttatgttgatgatgtggttatatttatccaaccaacagtcggggatatcaggactgtactggacattcttcatatctttggggaggcttccaggttgcgaactaatatccagaaaagcaatgtatgcccaattagatgcggggaacaagacttgaccttactgcaaagcttgctgccttgtgagatctcacaatttccctgcaaatacttgggtctacttcttgccatcaagaaacttaccaaggaccaagtacaaacgattattgataaaattgccaaccaactatcggggtggaaatctgatttgatgactaaggctggatggaaggtccatgtgcagtttgtcctcacagggatggtcatatatctcgcaatggctgtggatttacctccttgggctctcaaagctattgacaagatccgccgaggctttctttggcgatggcgcaaagaagcgagggggggacactgtcttgttgcttggggaaaagtttgtcggccgcttgagcttggtgggctagggatttccaatctcattgatcttgcttgggcacttcgtatgcgttggttttggttagcaaaaactgatccgggacggccatgggcctcccttgctatacaagttcccagcaaggctaaagttttcttctcggtggctatgcaaactgaaattggtaatggagcctctactcttttttggtctgaccgttggttgatgggacacagggtcatggacattgccccaagattactccagaatgttcctaaaaggagggttaataagaggactgttttggatgctctcactaatcagacttggatttcagacatacaaggagctcttgctgttggggttatttctgaataccttgctctatgggatattgtcacctcggttcagcttagacgcgaagtgaatgacactcacttctttcgtctcgccgccaatgggaagtattcaacaaaggcagtctatgagggtttttttccttgggtcgacgatttttgaaccgtaccacataatttggaaaacccgggctcctccaaaggccaagttcttcatgtggctggtcgcgacggctttggacagctaacaggttggaaaagagaggcatggatcaccctacgagctgccctttgtcaggagcaggccatttgctgattgggtgtgtgttcgcccgagatttctggtttaaactactatctcaagttaatctccaaaacatggcctctcagcttgttgatgcatcttttatgggctggtggagatggctgggcaatcagatacatggagtcagtggcaggggaagcagtaaactccctggtaatttcaggagcttggacaatatggaaacgtcggaatagctgtgtcttcgacagaaacagacctaatgtggctcttgctgtcagaatggcgatcaagagcgagagaagcgggagctgactggggcaagaaaactatccttgctgactagtcacatcccgggtctgtaggaatttgtagttttgggtgctttattcatggatgagtatcagtatgtctgtatttggccccctgtgaggtggctgttttgtattatctctgtttttttcttcttaatggaatgaaacacaactctcctgcgttttttagaaaaaaaaaacaatttgcagccaccaacaatgctggattcaggaaacatccgccatctgtctgcatggcggctgaagcatgggtcttgcttgaagattccgtgtttgctgaaaacggccagcaggaaaacagtagacgtttggttgaacagggtgccactgccagagatttgagataggagagtggcagtggttttgcttgagctccgtgtcacctgaaatactttgttgtagcaaggcctgtaggagaatttctcattgtaccatcgctagacttggtcagtctgtactttatacggttagtcgcatgtaaactgtgagtttaccaaaaaagaattaccagaccctcactactatataaaacaccatttttcattggttc

SEQ ID NO: 206757 - DNA, 2546 bp, Zea Mays
gttgaaggtcctagaggtctcactccccactaaaatatccaatttggactgcatggggggcagtgggcagtagaaatcttatctattttgtctactacctacagatttggacaaagtgatatttatgtgtgggagctgagccaacgaggtgtagtgcttgtatgccacgtttttgaacctttggtgtgctggcactctaggaatcctccttcatcaagcgtggctgagctccactgcacctgcccctatattcagtaccttgggctgccgtattgagtgaagatttcttccttgccctcaaattctagccaaagttcactgcttgagtgtgcagtccttatgtactgctggtataaccccctccctagcccaggtttgcccccttctccccatggactggatgcgctcagtgacccctccccctgcctatttattcagtgtgttccacggctgagttcagaaaagcttttctcccttgttctcgagctgtagtcccagtccactacaaaggtgttggagtcctggtattcttgctggtgtgcatcctctctttcagccaccaagtttgttttactctagagctgaatgccaacctcttgcctgtggtgaccaaacccaaccgtttttcacctccccgtggacaaggtttcccacaagtattcttggtcgtgtactacttgttccatgctcggcaaaggcgaagttttattcccttatctttgggttagttacttcatgtggaagacttcaagcttagaaggtttttatatatctcttatgaaaaggcttcacccttccaattattgtagttaagttatgcccttcgagtactatcaggacttgtaataaatacatctctttctaccatgtaaaacttgtgttctagaatgtaaagtgtactttgtaaaagtcttccgctctatctccaatgtgtgcgtatcaaatgtgattactgtaatatacctgttatgtgggagatccttgggatgatgagttccagttggcgaactcgatagccttgttaagttacccggtacacgtgcacagccatctgaggcctgtaaggcaaggattggtgcatgtgggcctgataacttgggagggctgtcacacagcccccacacagcaaacggccaggtgatgggtatcgtttgcagggcctgagcgggcaggtaggtctgccttacgtagaattgacacccttggcaggtgcggacaattctagtggcgtcagccaccgcggtcagccagtagaaaccttgtcggaaggcgtttccaacaagggctcggggcgccgcgtgatgaccgcaagcccccgagtgtatctcttgtaagagctcctggccttcggcgatggatatgcatcgctggaggatgcccgaggggctgcggtggtagagctccttttcgtctcccagcaagacgaacgacttggcgcgccgcgccaaccgtcgagcttcggctcggtcgaggggtagctctcctcggtggagatattgcaggtacggggtctgccagtttcgattaggcgtgaccccgctccgctcctccttgacgtgcattgcctcaccttcgggggccgagggtgcctcgggctgggccgaggccttctcgggctcgggcgtgtcgtcggtcttgacggagggttgatgcaggtctcgggagaagacgtccgggggaaccgttgttcgccccgaagctatcttagccagcttgtccgcagtctcgttgtagagtcgggcgatgtggttgagctcgagcccgtagaacttgtcttccaggcgccgaacctcatcgtagtaggcttccatctttgggtcgcggcagtgggagttcttcatgacttggtcgatgacgagctgtgagtcaccgcgagcgtcgaggcgtcggacccctagctcgatggcgatgcgcaacccgttgactagagcctcgtactcagccacattgttggacgccgggaagtggaggcgtagcacgtagcgtaggtgcttctcgaggggcgagatgaagagcaggcccgtgcctgcccctgtcttcatcagcgacccgtcgaaaaacatggtccagagttccggttggatcggagctgttgggagctgggtatcgacccattcagccacaaagtccaccaagacttgggacttgatggccttacgaggggcgaacgagattgttgagagcacctagagggggggtgaataggtgatcctgtaaaagcttaaacttatagccacaaaactttgattaagcgttagcacagtttatgccaagtggctagagaggagtcaaaaacacaataaccacaagaattcaatcgcagagatgacacggtggttatcccgtggttcggccaagtacaaaacttgcctactccacgttgtggcgtcccaacggacgagagttgcactcaactcctctcaagtgatccaatgatcaacttgaataccacagtgttcttgcttttcttttctcaatcccgtttgcgaggaatctccacagcttggagcctctcgcccttacaaaagatgttcacagagaatcac

SEQ ID NO: 206758 - DNA, 1700 bp, Zea Mays
ccgcgtcccaccatccgatcttatggaccgcgtccaccgaaccgcgcagacaagtagtgtcaacaccgaagacacatcccgatacaccgcgtccatgcagcagaactcctttcccctccgcccttccctctccagctccctcccgccacgagccccttatcctccaacggccaacgatcaccccggcatcctcccgcccatgtccgccgcggccgatgaccgcgcgcgccgcgccgccgcgttccgccccgccccgctccctccgcctgcgcagaagcagcagctctccggcgtggccgccgccgtgctcgacgccgggggacgcctgggccgcgccgtgggcgacgtcttccgccgcctccgcatcgacgacaccttctactccggcggcggcggcggcggcggcggcgcgccgaatcggagctggcgcgacgccgggaacaatggcgggaggccggcggccgccggagccccggctgcggccagcagggaggaggccacaggcggcggcgcctcctccgggcggttcgcgcgggcgcaggggagcatgaacctgtcggcgacgtacgacagcaggacgcacgacgtggagagctcggtggtggccagaggcgacctgtggcgcgcggaggcgtcgcacagcagcagcagcagcgccggcgccggcggcaatggagccaataacaacctgttcctcgtgcagctcggtcctgtcctcttcgtccgcgacacgacgctactcttcccggtgcacctctccaagcggcacctcatctgaacggagtgcactcggtctgccccgcgtactggtcggcccacaagagatggttcttcatgtccatgctatgcctgaacccgttcgctttttcgttcatggacatgcaattcccaaacgggcaactgaggtacgtcgccggcgacggcttcacggcgcgtgctttcctgcccctccgtggcggggtcttgcaagcccacggaaagttcccgggggagaagaggctcagcttctctttcaagaacaggaatggcggcagcgtcgtcccgatggttcagtggccggataagtcactctcggtgggggtcgtccaggcgttgtcttggaggagatccggcctgatgctgcagccagcaacacagatcagcatatgtcctacgatcggcgggcgccatcctggggtgtgcgtggagctgatccactcggcggacgacaacgtcggcgtagtctgcggctactcccacaccgcttcttcccctgcttccgcatacgcctccatatcgatcggaaggtcgaagctgaacggcggagcggcaaggtcagggttagcgttcagagtagacgctccactactccacggttttggccggccatggttctcggtccagatgaacagcggcatcgagttctgattccccactgtcttgccgttgccatgactgaacgaacgaacttactgtacagtagttgatgttgtgtataaagcttgacgacgactcactgatgccatgagtatacgcagtaaacgctacaacactatatgtttggtcgctggctaacttatcataatatgtctattttttattgagaaattagacattttctaaattaaatttcgaatataaattatagataacagtagcagactagtaagcagtacatagaacaacactgcgtcaaaaaggctcaaagggacgtctgagac

SEQ ID NO: 206759 - DNA, 1605 bp, Zea Mays
tttcccctccgcccttccctctccagctccctcccgccacgagccccttatcctccaacggccaacgatcaccccggcatcctcccgcccatgtccgccgcggccgatgaccgcgcgcgccgcgccgccgcgttccgccccgccccgctccctccgcctgcgcagaagcagcagctctccggcgtggccgccgccgtgctcgacgccgggggacgcctgggccgcgccgtgggcgacgtcttccgccgcctccgcatcgacgacaccttctactccggcggcggcggcggcggcggcggcgcgccgaatcggagctggcgcgacgccgggaacaatggcgggaggccggcggccgccggagccccggctgcggccagcagggaggaggccacaggcggcggcgcctcctccgggcggttcgcgcgggcgcaggggagcatgaacctgtcggcgacgtacgacagcaggacgcacgacgtggagagctcggtggtggccagaggcgacctgtggcgcgcggaggcgtcgcacagcagcagcagcagcgccggcgccggcggcaatggagccaataacaacctgttcctcgtgcagctcggtcctgtcctcttcgtccgcgacacgacgctactcttcccggtgcacctctccaagcggcacctcatctggtacggattcgagcgcaagaacggagtgcactcggtctgccccgcgtactggtcggcccacaagagatggttcttcatgtccatgctatgcctgaacccgttcgctttttcgttcatggacatgcaattcccaaacgggcaactgaggtacgtcgccggcgacggcttcacggcgcgtgctttcctgcccctccgtggcggggtcttgcaagcccacggaaagttcccgggggagaagaggctcagcttctctttcaaggaatggcggcagcgtcgtcccgatggttcagtggccggataagtcactctcggtgggggtcgtccaggcgttgtcttggaggagatccggcctgatgctgcagccagcaacacagatcagcatatgtcctacgatcggcgggcgccatcctggggtgtgcgtggagctgatccactcggcggacgacaacgtcggcgtagtctgcggctactcccacaccgcttcttcccctgcttccgcatacgcctccatatcgatcggaaggtcgaagctgaacggcggagcggcaaggtcagggttagcgttcagagtagacgctccactactccacggttttggccggccatggttctcggtccagatgaacagcggcatcgagttctgattccccactgtcttgccgttgccatgactgaacgaacgaacttactgtacagtagttgatgttgtgtataaagcttgacgacgactcactgatgccatgagtatacgcagtaaacgctacaacactatatgtttggtcgctggctaacttatcataatatgtctattttttattgagaaattagacattttctaaattaaatttcgaatataaattatagataacagtagcagactagtaagcagtacatagaacaacactgcgtcaaaaaggctcaaagggacgtctgagac

SEQ ID NO: 206760 - DNA, 1530 bp, Zea Mays
cctcccgcccatgtccgccgcggccgatgaccgcgcgcgccgcgccgccgcgttccgccccgccccgctccctccgcctgcgcagaagcagcagctctccggcgtggccgccgccgtgctcgacgccgggggacgcctgggccgcgccgtgggcgacgtcttccgccgcctccgcatcgacgacaccttctactccggcggcggcggcggcggcggcggcgcgccgaatcggagctggcgcgacgccgggaacaatggcgggaggccggcggccgccggagccccggctgcggccagcagggaggaggccacaggcggcggcgcctcctccgggcggttcgcgcgggcgcaggggagcatgaacctgtcggcgacgtacgacagcaggacgcacgacgtggagagctcggtggtggccagaggcgacctgtggcgcgcggaggcgtcgcacagcagcagcagcagcgccggcgccggcggcaatggagccaataacaacctgttcctcgtgcagctcggtcctgtcctcttcgtccgcgacacgacgctactcttcccggtgcacctctccaagcggcacctcatctggtacggattcgagcgcaagaacggagtgcactcggtctgccccgcgtactggtcggcccacaagagatggttcttcatgtccatgctatgcctgaacccgttcgctttttcgttcatggacatgcaattcccaaacgggcaactgaggtacgtcgccggcgacggcttcacggcgcgtgctttcctgcccctccgtggcggggtcttgcaagcccacggaaagttcccgggggagaagaggctcagcttctctttcaagaacaggaatggcggcagcgtcgtcccgatggttcagtggccggataagtcactctcggtgggggtcgtccaggcgttgtcttggaggagatccggcctgatgctgcagccagcaacacagatcagcatatgtcctacgatcggcgggcgccatcctggggtgtgcgtggagctgatccactcggcggacgacaacgtcggcgtagtctgcggctactcccacaccgcttcttcccctgcttccgcatacgcctccatatcgatcggaaggtcgaagctgaacggcggagcggcaaggtcagggttagcgttcagagtagacgctccactactccacggttttggccggccatggttctcggtccagatgaacagcggcatcgagttctgattccccactgtcttgccgttgccatgactgaacgaacgaacttactgtacagtagttgatgttgtgtataaagcttgacgacgactcactgatgccatgagtatacgcagtaaacgctacaacactatatgtttggtcgctggctaacttatcataatatgtctattttttattgagaaattagacattttctaaattaaatttcgaatataaattatagataacagtagcagactagtaagcagtacatagaacaacactgcgtcaaaaaggctcaaagggacgtctgagac

SEQ ID NO: 206761 - DNA, 1882 bp, Zea Mays
aggattattccgacctttttcatcccacgcccaaacgccaaactccatctccatcacctcgcacttatcggtgaaaccgcgcgatgattacggcggcgcccgcgctgcccatgttcctccggctgtgcccggcctcgcccttcctcctccgccccagcctacacgtccccagctcaaggcgccccactccgtcgcgcctgagctcttttcgccctgcaaggccactcttccccatctcagctgtggagaaaaccaacgaggctgctgcggctggggagggtgagctcgaggggatgccgcccgagttctacgacgaggagtggcaggcccgtcagcgggagaggactaaggagtggcatgcatatcggcagaaagaggaggccgaggaggaaagaataacaaatgagtaccgagagataggcatgcgcctgaaagcttatccgcaagaagaagttcgcaaagctaggattttagtttcaagtttcataagagctggtggagatgttgaggaggaaattgagaaggctgctgaaagaggagagcttactgaacttgtccttatggtcatctggaatcgacttgatattgctcggcgtgatgatgagcgggatgccatcagaagccttgatctcttgtatagaagggtagagacagagattctgaagagtgaagcaactcctgccatgagattgctcaatgatcttcttaatcttcatgatggaggcgacaatgagaagtggttaaagaaatgtagaaagcgcatgcttgaagtctttccaagagaggacccattcactgtggtctttcctgctgggttcaacatggagaataagtatatataaaagaacgacctgcagggaaagaccgttcccatggccattgacttcagacttgcacagaagtatactataatatagtaaaagtaggacagatacaatacacctgtaattggttcttcaacacatatattgttgagtcctttgtcatgcagatctcttagtttttgttgaaagttttgaaatcattgaaataagaaacagcttgatttcttgctgaagaaaagcatacatgataaacaatatagacatcattgccacatcacccttagcaaaatagttgagtctcaatgaaatcaatatatccttttcgatcaatgattggatttaggatctcttgtttccttttaaaatgacttctctatgttttcatggttctaagtctatctccagcacctctcttatcttattccatatctcacctcttattttcaaactccactttgcaaacagttttatctacagtgcaaaacaatattttgcacgatctgttggagacaacttaacgtggtaaagaaatattctgagtatttttttttatatatcattctgtttttttggtcagcgtgaagggcgaattgagctaccgcctcaggatgatgatcttcttctgagagtggactttgtcagggaagttgatgagctgctgaaagaggttcgtgctgtggaagacaagaacaagcaacaaattgggtttgacccagaatcagttgcatatatgctgaagcagcaggagaagatgcagacgatgcgtcaggtggaatctctcctggacttggcgtcctccttgaaatggtgaggattgagtactatcgaacaactgaacaactatgctgtttgcttggaagctagacgtcattgacttgacatttatactcaacagttagagggggtatctgttttcagctagttagaccaataaccgttctgggtagagccatgcagtttacttggacatccatgtacatttgtatgtgtagagatatcttactatatatcaatgtatgtctacacttctaatgaaaaaactatctgacccattttct

SEQ ID NO: 206762 - DNA, 435 bp, Zea Mays
tgatagtaggcgtttacgtatttgttgtccttccggccttcagattcctgcccgctccatctaatccaacccgcccgataaaaactctacggccagatcaacaacattcccacgccactcccagagctcctaacccggaaccacgaaggggatccatggcggcggcgggttggctccgacgtgcggcggcggtatcgctgccccgcctgccttccggacttcccctcataccgcctcctccttccggccctctcaccgaggcgcagtcgctcgtggtccccggcctcggcgccgccgccgggccagccatggagctcatggccgtccctaagaagaaggtctccaagtacaagaaaggtttgaggaatggacccaaagctttgaagcctgtgccggtgattgttcgttgcagagtaattctgattttgtttaaca

SEQ ID NO: 206763 - DNA, 1380 bp, Zea Mays
tccctgcccgtcctccacctgtccgagacacttacaataatccttgcccaatcccgtctttagccgctagggttacgcgtccacggcgacgacctctgcgcagagcgtgctgcgattggccggccttcctgggatcctccccgcgcccgacacccggaaacgcgcgcgcgcgcgagggagagacagagtgaggaaacgagggaaggagacgacgcgctcgcctattggccgccggctccgctccttcgcgcccagtgcgacggccacggcctgagcggcgctgccagcaaggcggctagtatgagcagcatggagtcgcggccgggccgaacgaacctggtggagcccatagggcacggcgccgcgctgccgtccggcggccaggcagtgcagccgtggtggacgagctccggggctgtgctcggtgcagtctcgccagccgtcgtggcggtggcgcccgggagcgggacggggattagcctgtcgagcagcccggcaggtggtagtggtggtggcggcgcggctaaaggagccgcgagtgacgagagcagcgaggattcacggagatctggggaaccaaaaggctcattttcagctacctggactaactcaatctcgaatgccattacctcttgaagtatccgaggagcctgtttatgtaaatgccaagcagtaccatggtatcttaagacgacggcagtcccgtgctaaggctgaacttgagaaaaaggtggtcaaagccagaaagccataccttcacgagtctcgtcatcagcacgcgatgaggagggcaagaggaaacgggggacgcttcctgaacacaaagaaaagtgacagtggtgctcccaatggcgaaaacgccgagcatctccatgtccctcccgacttactacagctacgacagaacgaggcttgaagtagcggtatggctctggcatccttgaacagcagttcctgtccacgggcgtaggcattcgagaccggattcatatagctctccacagcatacgcgcagccatctctgcggtaacgcacgttctcctgaacgagctttgtagcgagataggtatgcaagtgcaatctgggcgcaggaatccatcatcaagtgcccaatgcccatggggtaggtacgctgtttcaggcaattcattcttggctttcacgttccacccttgtgtaactggtgtgttgtaaatgtgtggaaaactaagcttgtgctctgtatcgggccgttcagcggaactgcaaaacgcctgtataattaagatcgaactttggattaactcggtaatgctttgtctggttttcttttagcttttcaactgtaacacggccacagctgattcatgtgatgtgcttgcatatctttccttgtgccaa

SEQ ID NO: 206764 - DNA, 2896 bp, Zea Mays
gcgggtgtgctctctgggctgcaaaattccggactgggctacggcccgtccgccgcacggccctttctgtccacggttcaccacttcaccgccccgcaacccgcagcgttctgtctccgacgactccgccgcccccgtcgtacgccaggtgcggaggcctttgctggtctcttcgccggcgacgaacacccaccagcagctgctgtagatgtgcacattcatctccctttactgggtccgcccctggagcatatcatttgactgccgtggccacaactgcgctagttttgctttgatcatccggccttaataatccagcagatatctggtatatagattaacatattcagtacctgagatcttccttcaactagcaaagggaattgggattccactccccagtcctcatcaacagagcgaagtagtgcaatattattcaggaaagatggttgccagctgccctagtttgaccggagagatcaaatatgaagtggctagcagttatttggttggtatggtgattagtgtatatgccaagcttttacagataggcaagaattgacagtagcaaattcttgactagctccgccacctacaggaaaatctagaagaataaaagaaagtcagagatggcgatgtttcttggttgctgtcattagctgccgcttgacacctcggcgacgaaaaaggagccgtccactcactgagccttttgtccccctggacatgcaggtgagtggcatgtaaccaacctgaatgacaggaggatcattgtggtggcaacgccaggaggcagttggatattcaagatcatgacatgaaagactttgggaaggggagagggcaatctccatggatcaaggtgtctgcacatgatccaagcgcacaactgctcaaagcacacaagagatcgtgttgtgtgttgtgtttttgggccgtaccaggaccagagcgggcccctatagctatagctatagcagcaatgagctgggtcgtactctctccacgacaacactgaaccgtccgtgtgcgttcctgttgccgtactgaaatccacagagaggatagctgggctctgatccgggatttatgtcaggcccattggggaggtcatgtgactcagcaggtcagtgcgtttccgctcaccagctaccattgcgagatcagtaggatgtgtcactctctctctgctgctcttttggattcttggcgaggtttcagattctctccagtacccacttgcattgcagctctgatggtcgccaggtaccaagagcacgcctctgcgtaatccactgtgctaataggcacctttgaattgatgcatgcatgatctatctgctgccagtttgctccatcggcaccagcagcaacagctcgtcacgtcacacatgactaggcatatgtattgcaacagccttgttcagttcaccgcagtgagatgtactgatcccccctcacagctgaaatcctgcacacagcaaggccaccaccagtggaataaaggacagccaacattgcaagcgttcccagccactcaaaggctaaattcacgtttgcaccagatctcggaggaaacaaaaaagatggcccctaaattagtctttgttcttcctgttgtgctcctcgccttggcgctgcaggcgatcctccggccaccgccgccaaagctctgtggctccccaggtggccctcctctgacatctcccaggatcaagctcagggacggaaggtaccttgcgtacaaagaggatggagtacagagagacaaggccaggtacaagatcatcacagtgcacgcatttgatagcaccaaggacttcccctcgcctgtttctaaggagctcgtggaaggactgggaatttacctccttgcttatgacagagctggatatggggaaagtgaccccaatcccaaccggcatgtcaagagcgaggcgctagatatcgaggagcttgccgaccagctgggccttggccacaagttctatgtgctaggggcctcaatgggaggatactcggtttggggatgcctccagtatatacctcacaggcttgcaggagctgcgctggttgtgccaattatcaactactggtggccttcgttcccagctgaattatccaagcaggccttcaacagactgattgtgccagagcagagaactctttggattgcacacaacataccttccttgctttacctgtggatgacccagaggtggttcccttcttctgcagcagccatgcaccaccctgaaatatttagcaagcatgacatggaggttcttcagaagatgatggcaatgccaagaaccattgagaacaaatcaaggcagcaaggcatttatgaatcgatccaccgtgatttacttgtcgcttttggaacttgggagttcgatccaatgaatgtcaccaatccatttcctcaaaatgagggctctgtgcacatctggcaaggacgcgaagataggttggtgcttgttgagctgcagaggtacattgccaagaagcttccgtggatcaagtatcatgaagtcccagaaggtggacacatgttcgtgatggtagatggatggacagaccgaattctcaaggcactcttgttaggagaagagcccctagatgtgtgacagtagttccattttcaaaatgtcaaaaactgcagctgccagctgttattttacttaattttattcccaatttgtacacttgtattcctacaacaccaagactagtctaattcataatccgatagactttccatcatgtcaactcattacaacagcagtgataccattgtactcatcccatacgcatatgcctttggtccaaaattgatgtcaacccagaaagcacgtagtcaaaacattcaaattggagagaggggtgttttgag

SEQ ID NO: 206765 - DNA, 2781 bp, Zea Mays
gcgggtgtgctctctgggctgcaaaattccggactgggctacggcccgtccgccgcacggccctttctgtccacggttcaccacttcaccgccccgcaacccgcagcgttctgtctccgacgactccgccgcccccgtcgtacgccaggtgcggaggcctttgctggtctcttcgccggcgacgaacacccaccagcagctgctgtagatgtgcacattcatctccctttactgggtccgcccctggagcatatcatttgactgccgtggccacaactgcgctagttttgctttgatcatccggccttaataatccagcagatatctggtatatagattaacatattcagtacctgagatcttccttcaactagcaaagggaattgggattccactccccagtcctcatcaacagagcgaagtagtgcaatattattcaggaaagatggttgccagctgccctagtttgaccggagagatcaaatatgaagtggctagcagttatttggttggtatggtgattagtgtatatgccaagcttttacagataggcaagaattgacagtagcaaattcttgactagctccgccacctacaggaaaatctagaagaataaaagaaagtcagagatggcgatgtttcttggttgctgtcattagctgccgcttgacacctcggcgacgaaaaaggagccgtccactcactgagccttttgtccccctggacatgcaggtgagtggcatgtaaccaacctgaatgacaggaggatcattgtggtggcaacgccaggaggcagttggatattcaagatcatgacatgaaagactttgggaaggggagagggcaatctccatggatcaaggtgtctgcacatgatccaagcgcacaactgctcaaagcacacaagagatcgtgttgtgtgttgtgtttttgggccgtaccaggaccagagcgggcccctatagctatagctatagcagcaatgagctgggtcgtactctctccacgacaacactgaaccgtccgtgtgcgttcctgttgccgtactgaaatccacagagaggatagctgggctctgatccgggatttatgtcaggcccattggggaggtcatgtgactcagcaggtcagtgcgtttccgctcaccagctaccattgcgagatcagtaggatgtgtcactctctctctgctgctcttttggattcttggcgaggtttcagattctctccagtacccacttgcattgcagctctgatggtcgccaggtaccaagagcacgcctctgcgtaatccactgtgctaataggcacctttgaattgatgcatgcatgatctatctgctgccagtttgctccatcggcaccagcagcaacagctcgtcacgtcacacatgactaggcatatgtattgcaacagccttgttcagttcaccgcagtgagatgtactgatcccccctcacagctgaaatcctgcacacagcaaggtccccaccccactcatcataaactcatgcggtgaaatgcaatgcgatcctccggccaccgccgccaaagctctgtggctccccaggtggccctcctctgacatctcccaggatcaagctcagggacggaaggtaccttgcgtacaaagaggatggagtacagagagacaaggccaggtacaagatcatcacagtgcacgcatttgatagcaccaaggacttcccctcgcctgtttctaaggagctcgtggaaggactgggaatttacctccttgcttatgacagagctggatatggggaaagtgaccccaatcccaaccggcatgtcaagagcgaggcgctagatatcgaggagcttgccgaccagctgggccttggccacaagttctatgtgctaggggcctcaatgggaggatactcggtttggggatgcctccagtatatacctcacaggcttgcaggagctgcgctggttgtgccaattatcaactactggtggccttcgttcccagctgaattatccaagcaggccttcaacagactgattgtgccagagcagagaactctttggattgcacacaacataccttccttgctttacctgtggatgacccagaggtggttcccttcttctgcagcagccatgcaccaccctgaaatatttagcaagcatgacatggaggttcttcagaagatgatggcaatgccaagaaccattgagaacaaatcaaggcagcaaggcatttatgaatcgatccaccgtgatttacttgtcgcttttggaacttgggagttcgatccaatgaatgtcaccaatccatttcctcaaaatgagggctctgtgcacatctggcaaggacgcgaagataggttggtgcttgttgagctgcagaggtacattgccaagaagcttccgtggatcaagtatcatgaagtcccagaaggtggacacatgttcgtgatggtagatggatggacagaccgaattctcaaggcactcttgttaggagaagagcccctagatgtgtgacagtagttccattttcaaaatgtcaaaaactgcagctgccagctgttattttacttaattttattcccaatttgtacacttgtattcctacaacaccaagactagtctaattcataatccgatagactttccatcatgtcaactcattacaacagcagtgataccattgtactcatcccatacgcatatgcctttggtccaaaattgatgtcaacccagaaagcacgtagtcaaaacattcaaattggagagaggggtgttttgag

SEQ ID NO: 206766 - DNA, 2379 bp, Zea Mays
gcgggtgtgctctctgggctgcaaaattccggactgggctacggcccgtccgccgcacggccctttctgtccacggttcaccacttcaccgccccgcaacccgcagcgttctgtctccgacgactccgccgcccccgtcgtacgccaggtgcggaggcctttgctggtctcttcgccggcgacgaacacccaccagcagctgctgtagatgtgcacattcatctccctttactgggtccgcccctggagcatatcatttgactgccgtggccacaactgcgctagttttgctttgatcatccggccttaataatccagcagatatctggtatatagattaacatattcagtacctgagatcttccttcaactagcaaagggaattgggattccactccccagtcctcatcaacagagcgaagtagtgcaatattattcaggaaagatggttgccagctgccctagtttgaccggagagatcaaatatgaagtggctagcagttatttggttggtatggtgattagtgtatatgccaagcttttacagataggcaagaattgacagtagcaaattcttgactagctccgccacctacaggaaaatctagaagaataaaagaaagtcagagatggcgatgtttcttggttgctgtcattagctgccgcttgacacctcggcgacgaaaaaggagccgtccactcactgagccttttgtccccctggacatgcaggtgagtggcatgtaaccaacctgaatgacaggaggatcattgtggtggcaacgccaggaggcagttggatattcaagatcatgacatgaaagactttgggaaggggagagggcaatctccatggatcaaggtgtctgcacatgatccaagcgcacaactgctcaaagcacacaagagatcgtgttgtgtgttgtgtttttgggccgtaccaggaccagagcgggcccctatagctatagctatagcagcaatgagctgggtcgtactctctccacgacaacactgaaccgtccgtgtgcgttcctgttgccgtactgaaatccacagagaggatagctgggctctgatccgggatttatgtcaggcccattggggaggtcatgtgactcagcaggcgatcctccggccaccgccgccaaagctctgtggctccccaggtggccctcctctgacatctcccaggatcaagctcagggacggaaggtaccttgcgtacaaagaggatggagtacagagagacaaggccaggtacaagatcatcacagtgcacgcatttgatagcaccaaggacttcccctcgcctgtttctaaggagctcgtggaaggactgggaatttacctccttgcttatgacagagctggatatggggaaagtgaccccaatcccaaccggcatgtcaagagcgaggcgctagatatcgaggagcttgccgaccagctgggccttggccacaagttctatgtgctaggggcctcaatgggaggatactcggtttggggatgcctccagtatatacctcacaggcttgcaggagctgcgctggttgtgccaattatcaactactggtggccttcgttcccagctgaattatccaagcaggccttcaacagactgattgtgccagagcagagaactctttggattgcacacaacataccttccttgctttacctgtggatgacccagaggtggttcccttcttctgcagcagccatgcaccaccctgaaatatttagcaagcatgacatggaggttcttcagaagatgatggcaatgccaagaaccattgagaacaaatcaaggcagcaaggcatttatgaatcgatccaccgtgatttacttgtcgcttttggaacttgggagttcgatccaatgaatgtcaccaatccatttcctcaaaatgagggctctgtgcacatctggcaaggacgcgaagataggttggtgcttgttgagctgcagaggtacattgccaagaagcttccgtggatcaagtatcatgaagtcccagaaggtggacacatgttcgtgatggtagatggatggacagaccgaattctcaaggcactcttgttaggagaagagcccctagatgtgtgacagtagttccattttcaaaatgtcaaaaactgcagctgccagctgttattttacttaattttattcccaatttgtacacttgtattcctacaacaccaagactagtctaattcataatccgatagactttccatcatgtcaactcattacaacagcagtgataccattgtactcatcccatacgcatatgcctttggtccaaaattgatgtcaacccagaaagcacgtagtcaaaacattcaaattggagagaggggtgttttgag

SEQ ID NO: 206767 - DNA, 2738 bp, Zea Mays
gcgggtgtgctctctgggctgcaaaattccggactgggctacggcccgtccgccgcacggccctttctgtccacggttcaccacttcaccgccccgcaacccgcagcgttctgtctccgacgactccgccgcccccgtcgtacgccaggtgcggaggcctttgctggtctcttcgccggcgacgaacacccaccagcagctgctgtagatgtgcacattcatctccctttactgggtccgcccctggagcatatcatttgactgccgtggccacaactgcgctagttttgctttgatcatccggccttaataatccagcagatatctggtatatagattaacatattcagtacctgagatcttccttcaactagcaaagggaattgggattccactccccagtcctcatcaacagagcgaagtagtgcaatattattcaggaaagatggttgccagctgccctagtttgaccggagagatcaaatatgaagtggctagcagttatttggttggtatggtgattagtgtatatgccaagcttttacagataggcaagaattgacagtagcaaattcttgactagctccgccacctacaggaaaatctagaagaataaaagaaagtcagagatggcgatgtttcttggttgctgtcattagctgccgcttgacacctcggcgacgaaaaaggagccgtccactcactgagccttttgtccccctggacatgcaggtgagtggcatgtaaccaacctgaatgacaggaggatcattgtggtggcaacgccaggaggcagttggatattcaagatcatgacatgaaagactttgggaaggggagagggcaatctccatggatcaaggtgtctgcacatgatccaagcgcacaactgctcaaagcacacaagagatcgtgttgtgtgttgtgtttttgggccgtaccaggaccagagcgggcccctatagctatagctatagcagcaatgagctgggtcgtactctctccacgacaacactgaaccgtccgtgtgcgttcctgttgccgtactgaaatccacagagaggatagctgggctctgatccgggatttatgtcaggcccattggggaggtcatgtgactcagcaggtcagtgcgtttccgctcaccagctaccattgcgagatcagtaggatgtgtcactctctctctgctgctcttttggattcttggcgaggtttcagattctctccagtacccacttgcattgcagctctgatggtcgccaggtaccaagagcacgcctctgcgtaatccactgtgctaataggcacctttgaattgatgcatgcatgatctatctgctgccagtttgctccatcggcaccagcagcaacagctcgtcacgtcacacatgactaggcatatgtattgcaacagccttgttcagttcaccgcagtgagatgtactgatcccccctcacagctgaaatcctgcacacagcaaggcgatcctccggccaccgccgccaaagctctgtggctccccaggtggccctcctctgacatctcccaggatcaagctcagggacggaaggtaccttgcgtacaaagaggatggagtacagagagacaaggccaggtacaagatcatcacagtgcacgcatttgatagcaccaaggacttcccctcgcctgtttctaaggagctcgtggaaggactgggaatttacctccttgcttatgacagagctggatatggggaaagtgaccccaatcccaaccggcatgtcaagagcgaggcgctagatatcgaggagcttgccgaccagctgggccttggccacaagttctatgtgctaggggcctcaatgggaggatactcggtttggggatgcctccagtatatacctcacaggcttgcaggagctgcgctggttgtgccaattatcaactactggtggccttcgttcccagctgaattatccaagcaggccttcaacagactgattgtgccagagcagagaactctttggattgcacacaacataccttccttgctttacctgtggatgacccagaggtggttcccttcttctgcagcagccatgcaccaccctgaaatatttagcaagcatgacatggaggttcttcagaagatgatggcaatgccaagaaccattgagaacaaatcaaggcagcaaggcatttatgaatcgatccaccgtgatttacttgtcgcttttggaacttgggagttcgatccaatgaatgtcaccaatccatttcctcaaaatgagggctctgtgcacatctggcaaggacgcgaagataggttggtgcttgttgagctgcagaggtacattgccaagaagcttccgtggatcaagtatcatgaagtcccagaaggtggacacatgttcgtgatggtagatggatggacagaccgaattctcaaggcactcttgttaggagaagagcccctagatgtgtgacagtagttccattttcaaaatgtcaaaaactgcagctgccagctgttattttacttaattttattcccaatttgtacacttgtattcctacaacaccaagactagtctaattcataatccgatagactttccatcatgtcaactcattacaacagcagtgataccattgtactcatcccatacgcatatgcctttggtccaaaattgatgtcaacccagaaagcacgtagtcaaaacattcaaattggagagaggggtgttttgag

SEQ ID NO: 206768 - DNA, 1199 bp, Zea Mays
gttcatgtgatgttcatgagcatgatgtatgtcttcagtatcatgtcaaagtcatgaaagaagtttcattgcctgctcctgcacctcctactaggactgcaccgcccaaaccagagaagcagtctcctgctcttgctcctgtcaaagatgtgctgccttttagttccaaccctgagaacggcaatatccaagagcctgaagatgacgcgcatgcaatctatgtgaggaatttacctctaaatgccactgaaactcaactggaggatgagttcaagaagtttggtaccatcaagcaaaatggcattcaagtcagaagcaataagatccaagggttctgttacggatttgttgagtttgaggattctacatctgtccagagtgctatagaggcttcccctgtgatgattggtggtcgtcaatgttacattgaggaaaagaggacacctggttcacgaggtcagtctatatacaaattgatacttaatcttatgcagtgtctatgccaatcatagttcttaaggcggtaaggtgagacaaggcgttgggccaccgcctggacgcctaggcgacgcctaggcgcttactaaggcgagcaaggcgacgccttaccaattaaacaaaagacagaacaacaacatatatgaggaagaaaaagaaaaagggagaaagaaaaaaaagaaggaaggggtagaaggagatggcccagcccaccaggcaggcaggcagcccatatatcctccggttagggttgctgagttgctcccatctcactgtcgccgctcgtccacaaccatgcatcgctgctcctgctcccccaagctcggcggcgctcccctgagtctcagcggcggcgcttccccgagctctgcaccgccgctcccccgagctctgcgccgccgctcgcccgagctcggcactccctgcgccgccgctcccccgagctcggcactctctgcgccgccgctccctcgatcccgctccccaaagtcgtctctgctaggcttcttccccctcccctcttgccgactcttggctaggcgacggggacgcctagactttttggccgcctggacgcctaggcgtcgcctaggcgacgcctttgaaaccatgatgccaattatatcattgaatcatatgaatctgatgactcactaaatgactgatgatcctgctgatcctaggagaatggagatggacga

SEQ ID NO: 206769 - DNA, 1828 bp, Zea Mays
atgtcatccgaggcggtgaaggtgacaatgctagaatcgatgttccgcagacggaagcgtgaggagcagtgggctgtcaagaagaagaaggccatgcccgagaagaagaagtccatcgagagacgcaagctcatattcagtcgtgcaaagcggtgtattccggggtcaatcggactacagtgctgttggaggaagggaaccggacaaatcaccccgtcgtctcgtcccgtagtcactcgcagagtcgcagtcgcagcccctgcgcccaccgggatcgtgatggagagctgggtccgcgcggtggtggaggccatccactcctctcgctcccagacagtcatctacctcgccggcggtgcatcccaggcgctcggttggctcctctccgtgcccggcgcttcgggcaccgtcctcgaggtcgtcgtgccctactctagggcctccatggcgcagctccttggcaagatgcccctgcaattcactagcaagcaggctgcagaggacatggcactggccgcatacaatcgagcactcaagctttctggaccagcaatgagtcggagtatgtgtaggtctgcaagttatgggtgttggatttactgggtcactggcgagctcacgtccaaaacatggtgaccacaggttttacgtgtcaacatggacacataattgtctcaggacatcacatgttaccttgtcgaagggtttacggagtagggaggaagaagacaaggtttcaagctactttttgcttaaggcaatagcagatacctgcagagtttctgcaaccattcagtcagacattcacaaatctgaaattccagaagaaatcatggaacaatttgatgaagatcaagaactccagcaagttattaatgggcaagtttgcatgaaagtatataattttgctgctccggcggaaagtaacttgaacagaaaaataattctgcctggttcgttcaaccccttgcacgatggtcaccttagattgctagaagctgcagtaagaaattaagaggcgtgttgagcaatttagaaaagcagggaagaatgtgattatatctaaccagccatacttctataagaaagcagaacttttcccaggaagcgcttttataattggtgcagacactgcagcaaggcttgttaaccctaagtactatggaggagattacaacagaatgctggagatacttctcgaatgtaagagcatagggactacttttcttgttggtggtcgaaagattgaaggagatttcaaggtccttgagaacttagacattccagaagagctgagagaaatgttcatttctattccggaggaaaagtttcgcatagatatttcatctactgaaataagaaagagccaagggctctgatgtatcaagtggtcgtattctacagcagatttgggatgattctccacgactatagaaggtacatttggatgctagcagtcaagtctgaattctccaagcttacttttttcacatttgtggggttgtattcacgcattctattgcagattatgataggtccattcatgcatccttgcaaaggaactgttgatgtattctcagggagaatattttatttaacttttgtcttgactgggccccttggtattttgttcagcaaattggaatcaatcctcttgtagaacctcttgatgtcttcactaccccttgcggctaggtggtcaacctctgtctcatatctttggtacaacgctggcaaagtgtgggcgcagagaaatcctgtggatgaaatataagaattgttaaatgaggaatttcttcagatccttcccgcatgcaatgtcataaag

SEQ ID NO: 206770 - DNA, 1902 bp, Zea Mays
atgtcatccgaggcggtgaaggtgacaatgctagaatcgatgttccgcagacggaagcgtgaggagcagtgggctgtcaagaagaagaaggccatgcccgagaagaagaagtccatcgagagacgcaagctcatattcagtcgtgcaaagcggtgtattccggggtcaatcggactacagtgctgttggaggaagggaaccggacaaatcaccccgtcgtctcgtcccgtagtcactcgcagagtcgcagtcgcagcccctgcgcccaccgggatcgtgatggagagctgggtccgcgcggtggtggaggccatccactcctctcgctcccagacagtcatctacctcgccggcggtgcatcccaggcgctcggttggctcctctccgtgcccggcgcttcgggcaccgtcctcgaggtcgtcgtgccctactctagggcctccatggcgcagctccttggcaagatgcccctgcaattcactagcaagcaggctgcagaggacatggcactggccgcatacaatcgagcactcaagctttctggaccagcaatgagtcggagtatgtgtaggtctgcaagttatgggtgttggatttactgggtcactggcgagctcacgtccaaaacatggtgaccacaggttttacgtgtcaacatggacacataattgtctcaggacatcacatgttaccttgtcgaagggtttacggagtagggaggaagaagacaaggtttcaagctactttttgcttaaggcaatagcagatacctgcagagtttctgcaaccattcagtcagacattcacaaatctgaaattccagaagaaatcatggaacaatttgatgaagatcaagaactccagcaagttattaatgggcaagtttgcatgaaagtatataattttgctgctccggcggaaagtaacttgaacagaaaaataattctgcctggttcgttcaaccccttgcacgatggtcaccttagattgctagaagctgcagtaagcatgtgtgatgatgggcttccattctttgagatatcagcaattaatgctgataaacctccactatctattgcagaaattaagaggcgtgttgagcaatttagaaaagcagggaagaatgtgattatatctaaccagccatacttctataagaaagcagaacttttcccaggaagcgcttttataattggtgcagacactgcagcaaggcttgttaaccctaagtactatggaggagattacaacagaatgctggagatacttctcgaatgtaagagcatagggactacttttcttgttggtggtcgaaagattgaaggagatttcaaggtccttgagaacttagacattccagaagagctgagagaaatgttcatttctattccggaggaaaagtttcgcatagatatttcatctactgaaataagaaagagccaagggctctgatgtatcaagtggtcgtattctacagcagatttgggatgattctccacgactatagaaggtacatttggatgctagcagtcaagtctgaattctccaagcttacttttttcacatttgtggggttgtattcacgcattctattgcagattatgataggtccattcatgcatccttgcaaaggaactgttgatgtattctcagggagaatattttatttaacttttgtcttgactgggccccttggtattttgttcagcaaattggaatcaatcctcttgtagaacctcttgatgtcttcactaccccttgcggctaggtggtcaacctctgtctcatatctttggtacaacgctggcaaagtgtgggcgcagagaaatcctgtggatgaaatataagaattgttaaatgaggaatttcttcagatccttcccgcatgcaatgtcataaag

SEQ ID NO: 206771 - DNA, 1506 bp, Zea Mays
atgtcatccgaggcggtgaaggtgacaatgctagaatcgatgttccgcagacggaagcgtgaggagcagtgggctgtcaagaagaagaaggccatgcccgagaagaagaagtccatcgagagacgcaagctcatattcagtcgtgcaaagcggtgtattccggggtcaatcggactacagtgctgttggaggaagggaaccggacaaatcaccccgtcgtctcgtcccgtagtcactcgcagagtcgcagtcgcagcccctgcgcccaccgggatcgtgatggagagctgggtccgcgcggtggtggaggccatccactcctctcgctcccagacagtcatctacctcgccggcggtgcatcccaggcgctcggttggctcctctccgtgcccggcgcttcgggcaccgtcctcgaggtcgtcgtgccctactctagggcctccatggcgcagctccttggcaagatgcccctgcaattcactagcaagcaggctgcagaggacatggcactggccgcatacaatcgagcactcaagctttctggaccaggtctgcaagttatgggtgttggatttactgggtcactggcgagctcacgtccaaaacatggtgaccacaggttttacgtgtcaacatggacacataattgtctcaggacatcacatgttaccttgtcgaagggtttacggagtagggaggaagaagacaaggtttcaagctactttttgcttaaggcaatagcagatacctgcagagtttctgcaaccattcagtcagacattcacaaatctgaaattccagaagaaatcatggaacaatttgatgaagatcaagaactccagcaagttattaatgggcaagtttgcatgaaagtatataattttgctgctccggcggaaagtaacttgaacagaaaaataattctgcctggttcgttcaaccccttgcacgatggtcaccttagattgctagaagctgcagtaagcatgtgtgatgatgggcttccattctttgagatatcagcaattaatgctgataaacctccactatctattgcagaaattaagaggcgtgttgagcaatttagaaaagcagggaagaatgtgattatatctaaccagccatacttctataagaaagcagaacttttcccaggaagcgcttttataattggtgcagacactgcagcaaggcttgttaaccctaagtactatggaggagattacaacagaatgctggagatacttctcgaatgtaagagcatagggactacttttcttgttggtggtcgaaagattgaaggagatttcaaggtccttgagaacttagacattccagaagagctgagagaaatgttcatttctattccggaggaaaagtttcgcatagatatttcatctactgaaataagaaagagccaagggctctgatgtatcaagtggtcgtattctacagcagatttgggatgattctccacgactatagaagcaaagtaaatgtaccag

SEQ ID NO: 206772 - DNA, 3672 bp, Zea Mays
gttcagtccatctccactgtcaaaacactgagggtgacagacatggctttctttgctgaggatgtccatcgtttggcaagtgcgagcgtagatgggcggatatttgtgtggaggatagatgaagggcccgatgaggaaaacaaaccacaaattactggaaagattgaaatcgccatccagattgtaggtgaagctgaagcttaccatccaaggatatgttggcactcacataagcaagagattctttttgttgggattgggaactgtgtcttaagaatagacacaactaaagtgggtagaggaaaagactttactgtggaaggacctgtaaaatgtcatcttgaaaagcttattgatggtgtccgcttagttggtaagcatgatggtggtgtgactgatttgtccatatctcaatggatgagcacccgcctggcttccggatccaaggatggcacggttaaaatctgggatgatcgcaagcaagtgccattatctatttttaagccccatgatggtcaagcggtttattcagttgcttttcttacagcgcctgaacgaccaaatcatattaatctaataactgcgggtcctgttaaccgagaagttaaaatttgggcttctactaatgaagatggctggttgttgccaagtgattctgagacttggaagtgcactcagactttggaacttgttagctctctggaacctagagttgaagaggcatttttcaaccaggttgcagtgctgcatcaagctagcctgattttgcttgcgaatgctaaaaagaattctatttatgccgtgcatgttgagtatggcccagatcctgcctctactcgattagactatatagctgatttcacagttgcaatgcctattttaagcctaactggaacacacgaaagccaacctgatggtgaacaagttgttcaagtctattgtgttcaaactatggccattcagcaatatggtctagagttatcactctgttcgcctcctacagctgatagtactgggtttggtagagatcctgctatttcccgtgtttatgaggcagctctggaaatggcaggaacagagccatctataggaactagttgcacagactcttactctgtcactgctttgagtaaacaaccaaatgttgaccagtctgcagagcttgatctgaaaccatcagctccaccgcttgcatactcagaaggtgatagttccatgcctcttccatttacagctcttgcacctaagattgaggttcctggatcaggaccagcacctggaactcgtgatatagagcaatcagcttttaactatacgaatacgacaaacagaaacatggagcgtgatgctctgaaaagacaagataccccgatgcccattagaaaggatatcttaggaaaagatgagccaagagatggtcaaagtaatgttccaatgcttccaaatccccatatggtgtttcaagttggagggaatgctacacgcttggttactccatctgaaataatatcgggtactctctcatctgctgaaaacaatgatgtttctgaatctggtggggaaaatcgagatgtttccagcggaagttcttgggttgcagaagtggaaccaaagcatattgatgagagtaaaccagatcaaaacttgggacttgaagcagtcaaggaaactcagattgtttgtgagaacatggcgaaaacttccatggagcaaactgttgaaatgatcactaagcgctcagttacaactgataagcacagtgtggaagaatcacagtcatcatctgatcgaccagcatcagatcagacttgtggcactgatgaaaatgttctgaagaagtttgtggaaatgcctgagaaaattgattactctgcttccagggagcaaccatctttgtttacaaaagagaaagttttgcaccctcaaacatctggtcagccatctcctcctgtgagtgctttcaattcaactgagccacatgagcctttgagctctacatacctacctgtcagctccttcccagaagatgctgccacacaaggaatgctgcaacagctcttggatcaccagaaggacatggaaaagcagctgagtactgtggttcctgtgtccatcgcaaaggagggcaaaagacttgagacattattagggcgcactgtagagaaatcattcaaggctaatattgatgcgttttgggttcgtctccaggaggaaaacactaagcgtgaaaaggctgatagagagcgaatgcagcaactgtgtactctcattacaagctcaataaataaggacttaccttctaatctggagaagtcacttaagaaagaaatttcttcactcgggcctgttgttgctcgcgcaattacacctgttgttgagaagtccataacctctgttgtttctgattcagttcagaaaggggtgggtgacaaggtgtgcaatcagctggagaagtctattactggaaaacttgaagctacgcttgccaagcaaatccaaatgcagttccatacatctggaagacaggctcttcaggatgctttgcgtactagctttgaatcattgcttgttccagcatttgagcaagcatgcaagacaatgtttgagcaagtagatggtgcatttcaaaagggaatgtctgagcactccaatgctattcagcagcaagttgaggctgcacatactccgttagcgctaactctaaaagaaaccatcaattctgcttcatcaatcacccagagtttttcatcggagttacttgatggcaatcgcaagctattggcacttgttacttctgggaatgccaaggcacataataccagtgctttgcagcccattaatggtcctatgggtggtccccaagaggttgaggctccgttagatccgatgagagagctgagcagactgatatctgaacgcaagtttgacgaagcatttacaatggctcttcaaaggagtgatgtttccatagtgtcgtggctgtgctcccaggttgatttgcgggcactatgtgcaatggttccagtacctcttaaccagggggtccttctggccttattgcagcagctagcaattgacattcacaatgagacatcacggaaggttcaatggatgacagatgttgccatggcaatcaacccagcagaccagatcatcgcggtgcatgtgcgaccaatctttgagcaagtctacagccaattggcccaccaacggacactccccaccacgaccgcatcagatggcaccagtatccgtgtgatcatgcatgtaattaactcggttctgcttagctacaagtgattgcagctatgcaactgtgggaagtatggcctatttgatatcttgtatagagaaattttgaatggcaaatagaacacaacccacgagagtatacttggaagagggtggaggttactctctagtgtaaattttgcctttgaaattaaaatatttgtagtaattgggcatcctctaattttctaggtcatgttcatttgtcgtatgatcaatgggtcttgtatttcagtcataacttgtagctcggacagtttggaaccaacagcagctgcttggtgttggttggtccacacaaaattttgaagtcccatgtggacattgtttctggtggcaactgcaaaattggtgttattctaatcgagtactcgatgacgg

SEQ ID NO: 206773 - DNA, 4688 bp, Zea Mays
cacaaattcaggtaaattttacaactcaatcacattgtataaaagtgttattttttcttaatttcgtttcaaacattttatacttactgtgtattatatattaacttatacataatatttatgtatatttaaaatcttagatacgaatttgatatcgcgcatagtatgtgaaaaaaccaataaaaaatgaccataacggtagggtgcaacgcgaaatgacaagcacctccactccaactgaatttacccccttccacggcacctccagtccacttcgtcttcctctcttccccagttcagatctactccattgccaccttcctctcccggccgcttctcatgacgtctccgagcgaaaaccctaaccctaatcctaatacaccatttgagatcgggaagcttttcaggccaacgaatcccatgcccaacgccacccccaaccccatcttccccggcgtcgctggaggcccggcgccatccggcccctactcctaccctccggtgaccccgcccttccaccgcggaccctacatccactacccgcaggacccccacgccatgacccgcccagttgtctccttccccatgccaaacccaaacctcaaccccaacccgaacgctaaccccaacgccgtcgccccgggccccaaccccggcgcgcgcctcatgcagctgctcgggaactccgggccgacacaattcgagaccgccgtctccatgcccccgcccacatcggaattcgcacaactgcagttgctcccagcgatgccatccgcgccgccggccaggatgctgagcagcaccagcagcaaggtgcccaggggggcggttacttggcaccggggaacgagcggtgcacgatgttgactcgaggctgcccggggaagcgcagccaccgcagctggaggtaacaccgattaccaagtacacatcggatcccgggctcgtgctgggcagacagatcgctgtgaaccggacgtacatcgtgtatggcctcaagctcggtaacatccgtgtgctgaacatcaacaccgcactccgttcactcctccgtggtcacacacagagggtgacagacatggctttctttgctgaggatgtccatcgtttggcaagtgcgagcgtagatgggcggatatttgtgtggaggatagatgaagggcccgatgaggaaaacaaaccacaaattactggaaagattgaaatcgccatccagattgtaggtgaagctgaagcttaccatccaaggatatgttggcactcacataagcaagagattctttttgttgggattgggaactgtgtcttaagaatagacacaactaaagtgggtagaggaaaagactttactgtggaaggacctgtaaaatgtcatcttgaaaagcttattgatggtgtccgcttagttggtaagcatgatggtggtgtgactgatttgtccatatctcaatggatgagcacccgcctggcttccggatccaaggatggcacggttaaaatctgggatgatcgcaagcaagtgccattatctatttttaagccccatgatggtcaagcggtttattcagttgcttttcttacagcgcctgaacgaccaaatcatattaatctaataactgcgggtcctgttaaccgagaagttaaaatttgggcttctactaatgaagatggctggttgttgccaagtgattctgagacttggaagtgcactcagactttggaacttgttagctctctggaacctagagttgaagaggcatttttcaaccaggttgcagtgctgcatcaagctagcctgattttgcttgcgaatgctaaaaagaattctatttatgccgtgcatgttgagtatggcccagatcctgcctctactcgattagactatatagctgatttcacagttgcaatgcctattttaagcctaactggaacacacgaaagccaacctgatggtgaacaagttgttcaagtctattgtgttcaaactatggccattcagcaatatggtctagagttatcactctgttcgcctcctacagctgatagtactgggtttggtagagatcctgctatttcccgtgtttatgaggcagctctggaaatggcaggaacagagccatctataggaactagttgcacagactcttactctgtcactgctttgagtaaacaaccaaatgttgaccagtctgcagctcttgcacctaagattgaggttcctggatcaggaccagcacctggaactcgtgatatagagcaatcagcttttaactatacgaatacgacaaacagaaacatggagcgtgatgctctgaaaagacaagataccccgatgcccattagaaaggatatcttaggaaaagatgagccaagagatggtcaaagtaatgttccaatgcttccaaatccccatatggtgtttcaagttggagggaatgctacacgcttggttactccatctgaaataatatcgggtactctctcatctgctgaaaacaatgatgtttctgaatctggtggggaaaatcgagatgtttccagcggaagttcttgggttgcagaagtggaaccaaagcatattgatgagagtaaaccagatcaaaacttgggacttgaagcagtcaaggaaactcagattgtttgtgagaacatggcgaaaacttccatggagcaaactgttgaaatgatcactaagcgctcagttacaactgataagcacagtgtggaagaatcacagtcatcatctgatcgaccagcatcagatcagacttgtggcactgatgaaaatgttctgaagaagtttgtggaaatgcctgagaaaattgattactctgcttccagggagcaaccatctttgtttacaaaagagaaagttttgcaccctcaaacatctggtcagccatctcctcctgtgagtgctttcaattcaactgagccacatgagcctttgagctctacatacctacctgtcagctccttcccagaagatgctgccacacaaggaatgctgcaacagaaattgttaaacattttagtgcaacattgttcgctgcagcttgcagccacagcagctcttggatcaccagaaggacatggaaaagcagctgagtactgtggttcctgtgtccatcgcaaaggagggcaaaagacttgagacattattagggcgcactgtagagaaatcattcaaggctaatattgatgcgttttgggttcgtctccaggaggaaaacactaagcgtgaaaaggctgatagagagcgaatgcagcaactgtgtactctcattacaagctcaataaataaggacttaccttctaatctggagaagtcacttaagaaagaaatttcttcactcgggcctgttgttgctcgcgcaattacacctgttgttgagaagtccataacctctgttgtttctgattcagttcagaaaggggtgggtgacaaggtgtgcaatcagctggagaagtctattactggaaaacttgaagctacgcttgccaagcaaatccaaatgcagttccatacatctggaagacaggctcttcaggatgctttgcgtactagctttgaatcattgcttgttccagcatttgagcaagcatgcaagacaatgtttgagcaagtagatggtgcatttcaaaagggaatgtctgagcactccaatgctattcagcagcaagttgaggctgcacatactccgttagcgctaactctaaaagaaaccatcaattctgcttcatcaatcacccagagtttttcatcggagttacttgatggcaatcgcaagctattggcacttgttacttctgggaatgccaaggcacataataccagtgctttgcagcccattaatggtcctatgggtggtccccaagaggttgaggctccgttagatccgatgagagagctgagcagactgatatctgaacgcaagtttgacgaagcatttacaatggctcttcaaaggagtgatgtttccatagtgtcgtggctgtgctcccaggttgatttgcgggcactatgtgcaatggttccagtacctcttaaccagggggtccttctggccttattgcagcagctagcaattgacattcacaatgagacatcacggaaggttcaatggatgacagatgttgccatggcaatcaacccagcagaccagatcatcgcggtgcatgtgcgaccaatctttgagcaagtctacagccaattggcccaccaacggacactccccaccacgaccgcatcagatggcaccagtatccgtgtgatcatgcatgtaattaactcggttctgcttagctacaagtgattgcagctatgcaactgtgggaagtatggcctatttgatatcttgtatagagaaattttgaatggcaaatagaacacaacccacgagagtatacttggaagagggtggaggttactctctagtgtaaattttgcctttgaaattaaaatatttgtagtaattgggcatcctctaattttctaggtcatgttcatttgtcgtatgatcaatgggtcttgtatttcagtcataacttgtagctcggacagtttggaaccaacagcagctgcttggtgttggttggtccacacaaaattttgaagtcccatgtggacattgtttctggtggcaactgcaaaattggtgttattctaatcgagtactcgatgacgg

SEQ ID NO: 206774 - DNA, 4633 bp, Zea Mays
cacaaattcaggtaaattttacaactcaatcacattgtataaaagtgttattttttcttaatttcgtttcaaacattttatacttactgtgtattatatattaacttatacataatatttatgtatatttaaaatcttagatacgaatttgatatcgcgcatagtatgtgaaaaaaccaataaaaaatgaccataacggtagggtgcaacgcgaaatgacaagcacctccactccaactgaatttacccccttccacggcacctccagtccacttcgtcttcctctcttccccagttcagatctactccattgccaccttcctctcccggccgcttctcatgacgtctccgagcgaaaaccctaaccctaatcctaatacaccatttgagatcgggaagcttttcaggccaacgaatcccatgcccaacgccacccccaaccccatcttccccggcgtcgctggaggcccggcgccatccggcccctactcctaccctccggtgaccccgcccttccaccgcggaccctacatccactacccgcaggacccccacgccatgacccgcccagttgtctccttccccatgccaaacccaaacctcaaccccaacccgaacgctaaccccaacgccgtcgccccgggccccaaccccggcgcgcgcctcatgcagctgctcgggaactccgggccgacacaattcgagaccgccgtctccatgcccccgcccacatcggaattcgcacaactgcagttgctcccagcgatgccatccgcgccgccggccaggatgctgagcagcaccagcagcaaggtgcccaggggggcggttacttggcaccggggaacgagcggtgcacgatgttgactcgaggctgcccggggaagcgcagccaccgcagctggaggtaacaccgattaccaagtacacatcggatcccgggctcgtgctgggcagacagatcgctgtgaaccggacgtacatcgtgtatggcctcaagctcggtaacatccgtgtgctgaacatcaacaccgcactccgttcactcctccgtggtcacacacagagggtgacagacatggctttctttgctgaggatgtccatcgtttggcaagtgcgagcgtagatgggcggatatttgtgtggaggatagatgaagggcccgatgaggaaaacaaaccacaaattactggaaagattgaaatcgccatccagattgtaggtgaagctgaagcttaccatccaaggatatgttggcactcacataagcaagagattctttttgttgggattgggaactgtgtcttaagaatagacacaactaaagtgggtagaggaaaagactttactgtggaaggacctgtaaaatgtcatcttgaaaagcttattgatggtgtccgcttagttggtaagcatgatggtggtgtgactgatttgtccatatctcaatggatgagcacccgcctggcttccggatccaaggatggcacggttaaaatctgggatgatcgcaagcaagtgccattatctatttttaagccccatgatggtcaagcggtttattcagttgcttttcttacagcgcctgaacgaccaaatcatattaatctaataactgcgggtcctgttaaccgagaagttaaaatttgggcttctactaatgaagatggctggttgttgccaagtgattctgagacttggaagtgcactcagactttggaacttgttagctctctggaacctagagttgaagaggcatttttcaaccaggttgcagtgctgcatcaagctagcctgattttgcttgcgaatgctaaaaagaattctatttatgccgtgcatgttgagtatggcccagatcctgcctctactcgattagactatatagctgatttcacagttgcaatgcctattttaagcctaactggaacacacgaaagccaacctgatggtgaacaagttgttcaagtctattgtgttcaaactatggccattcagcaatatggtctagagttatcactctgttcgcctcctacagctgatagtactgggtttggtagagatcctgctatttcccgtgtttatgaggcagctctggaaatggcaggaacagagccatctataggaactagttgcacagactcttactctgtcactgctttgagtaaacaaccaaatgttgaccagtctgcagctcttgcacctaagattgaggttcctggatcaggaccagcacctggaactcgtgatatagagcaatcagcttttaactatacgaatacgacaaacagaaacatggagcgtgatgctctgaaaagacaagataccccgatgcccattagaaaggatatcttaggaaaagatgagccaagagatggtcaaagtaatgttccaatgcttccaaatccccatatggtgtttcaagttggagggaatgctacacgcttggttactccatctgaaataatatcgggtactctctcatctgctgaaaacaatgatgtttctgaatctggtggggaaaatcgagatgtttccagcggaagttcttgggttgcagaagtggaaccaaagcatattgatgagagtaaaccagatcaaaacttgggacttgaagcagtcaaggaaactcagattgtttgtgagaacatggcgaaaacttccatggagcaaactgttgaaatgatcactaagcgctcagttacaactgataagcacagtgtggaagaatcacagtcatcatctgatcgaccagcatcagatcagacttgtggcactgatgaaaatgttctgaagaagtttgtggaaatgcctgagaaaattgattactctgcttccagggagcaaccatctttgtttacaaaagagaaagttttgcaccctcaaacatctggtcagccatctcctcctgtgagtgctttcaattcaactgagccacatgagcctttgagctctacatacctacctgtcagctccttcccagaagatgctgccacacaaggaatgctgcaacagctcttggatcaccagaaggacatggaaaagcagctgagtactgtggttcctgtgtccatcgcaaaggagggcaaaagacttgagacattattagggcgcactgtagagaaatcattcaaggctaatattgatgcgttttgggttcgtctccaggaggaaaacactaagcgtgaaaaggctgatagagagcgaatgcagcaactgtgtactctcattacaagctcaataaataaggacttaccttctaatctggagaagtcacttaagaaagaaatttcttcactcgggcctgttgttgctcgcgcaattacacctgttgttgagaagtccataacctctgttgtttctgattcagttcagaaaggggtgggtgacaaggtgtgcaatcagctggagaagtctattactggaaaacttgaagctacgcttgccaagcaaatccaaatgcagttccatacatctggaagacaggctcttcaggatgctttgcgtactagctttgaatcattgcttgttccagcatttgagcaagcatgcaagacaatgtttgagcaagtagatggtgcatttcaaaagggaatgtctgagcactccaatgctattcagcagcaagttgaggctgcacatactccgttagcgctaactctaaaagaaaccatcaattctgcttcatcaatcacccagagtttttcatcggagttacttgatggcaatcgcaagctattggcacttgttacttctgggaatgccaaggcacataataccagtgctttgcagcccattaatggtcctatgggtggtccccaagaggttgaggctccgttagatccgatgagagagctgagcagactgatatctgaacgcaagtttgacgaagcatttacaatggctcttcaaaggagtgatgtttccatagtgtcgtggctgtgctcccaggttgatttgcgggcactatgtgcaatggttccagtacctcttaaccagggggtccttctggccttattgcagcagctagcaattgacattcacaatgagacatcacggaaggttcaatggatgacagatgttgccatggcaatcaacccagcagaccagatcatcgcggtgcatgtgcgaccaatctttgagcaagtctacagccaattggcccaccaacggacactccccaccacgaccgcatcagatggcaccagtatccgtgtgatcatgcatgtaattaactcggttctgcttagctacaagtgattgcagctatgcaactgtgggaagtatggcctatttgatatcttgtatagagaaattttgaatggcaaatagaacacaacccacgagagtatacttggaagagggtggaggttactctctagtgtaaattttgcctttgaaattaaaatatttgtagtaattgggcatcctctaattttctaggtcatgttcatttgtcgtatgatcaatgggtcttgtatttcagtcataacttgtagctcggacagtttggaaccaacagcagctgcttggtgttggttggtccacacaaaattttgaagtcccatgtggacattgtttctggtggcaactgcaaaattggtgttattctaatcgagtactcgatgacgg

SEQ ID NO: 206775 - DNA, 1861 bp, Zea Mays
cctactcctgccacctacgcattcaaatagcctcacgctatcaccagttcagcttaccttcttacccccttccttctgtgagctttggtgatgcgaaagtatttctccaagttttcatttcacatttgctgtttttccaagattatgaagaaactataaagtgatcggtagccctgtttggagacagcttcatgttttctgtgattgaggaacgttggtgtttctggataattggagatgtactcaggccagcaatctgatcaaggtcctagtgcaaatagtggcagagaattctccgaggcaaattggaattcttacacaatgcatcaaaagatagcttatagtggacaacatgggtttggaccttacggcatgggcttagaagataggctggggttgtatcaatcttcatctggtacattaagtcatgacatccaaatgagtgatgagcatagcggaggtgtgaagaagaggaaaggagtggaggactgtgtcacattgttgcctaatgcaggtgatcaacaaacagaaggttcatctcagccagaaaggaattcaatggaggaggggaacagaaagatttcgcccaaaatacaaagcaaggaagattcttctgatggtgatggtactaaagaggactatgttcatatccgggcaaagcgaggtcaagccactaacagccacagcctcgcagaaagactgaggagaaaaaagataagtgagagaatgaagcttcttcaagatcttgttcctggatgcagtaagatcactggcaaggcagtcatgctcgatgagattatcaactatgtacagtcattgcaacgacaagtggagttcttgtcaatgaaactttcaactgttaaccctgaacttggctttgacattgagcagatcatatccaaacaaatgatgctttcacaagacagacatcttgctttctatggagtcgatccaggatcaagcagccttactgctccattcaaccaaggaatcgtgcagccagcaatgatgtgcaacatttctaatcctgccgatgttttgcacggaactattcatgacgtgtcaacaatgaaccagataccttccatgtgggaaggacttcagagcatgcctcagatgaacttcaaccctggtgtggcagctgatagcggcaccaacaactctggctccatgaagatcgaacagtgagctgctgtatagtagcttcgaaattgttgtgtgaatcactgaatcatcgtaaagcgctctcgagatgaagctttttttgtatagctggaggcctgaccatttatgctggattcctgcggttgctcccatactgtgcggcacattgtttatggtatggcatatggatcgtgtacagctggagctgaagaactgattccactgtaaatttctgttgtgctttggcctgcgaaaattgggatggaaacctagtagcatccatgaaattcaaggacagaagcttgttgggattgggacttgggaccacgtgctgaatactgatgggcctaaacgtactagacgagtactaatagaatcgtagttgtaggtaaaaaaatgcagagtttgaaaccagtggttttgtcagaaattccatggagtttgctatatttatttatgatatcaaaacagaaactgaatggccgctggcactgggctgcaagtctccaacctggttctttccttttcctttgttttttttctaaagatttatctgcaaacttcactgcaccggtgttatctttttttttctaattagagtttcgaggttgataaaatgggcagaattctattcagaaaagaagggattatgggatatttgaacgtactaaagctaataattatgtgctaagattag

SEQ ID NO: 206776 - DNA, 1926 bp, Zea Mays
  misc_feature (1926)..(1926): n is a, c, g, or t
ctaaacaagctgtaggcgcatctataaatttggacggggtataatcaaacgcacacacccggaccccggtctgcgtttgtccctgcgggctgcggccctgcctcttctcgtctcccgttcccctcgccgcgtgagctctctctctctctctctctcctctgtggtgacgactgggcgcccgcacccctggcagccgccgccgcccagtccccgtcgggcccttcggcaggtcttcttcggccccttcgccggcgacgagccgcaccaggcgtacatgtgtacacccagcccaggcccttaactgcgcccgcccctgcgactggttttcctgctggtttctgtggatttggctgccggaggattggtgcagcctttaggatcacggtagattcgctgtgaaatccgaagggtgctcaggagctgcgtgatcgaccgcctgcaggtggggtgggcgcagaagggaggacaggtggagggtctggtgaattgttatagcaagaagaagaacaagaccggcagtggttcgaggaatcttgcagccagagcctggtcctccgagatggagggttctgatgagggtggagaagtcaacacgggcgacctcatcggcgggatcggcagggagttggccatttcatgcctgctccgtcttccccggtcttactattatgatgtggcatgtgttaatcgatctttctactcccttgtgaggtttggggagctttacaggttgaggcgtgaggctgggatcgtcgagcagatgatctactgctcatgcaatgttctcgagtgggaaggttttgatccgcgccgccaacggagaaatgatgaacacaccaaggtgcttatttggctccgcaagcttcggtgagaaggctattgtagctggcggtattggccagaacggtacattggactctgctgagctttatgattctgagatgcagacatggaccactcttccaagcatgaatagggcacggcagatgtgctctggtttcttcatggatggcaagttctatgtcatcggtgggaaatctgagaggcacaatgagatccttagttgtgctgaggagtttgacttggagagcagcacctggcgcttgatcccagatatggcacagggtcttaatggtggaagtggtgctccacctcttgttgctgttgtgaataatgaactttatgctgctgactatgcaacgaaggaggttaggaaatatgacaaggaaaataatgcatggatcactcttggattgttacccgggaggtatacatcagttcatggctggggcattgctttccgtagttgtggagatatgctcattgtaattggtgcaatgagtgctggtggtagcggggtgattgaaatttgttcctgggtacccaataatggactgccagattggaagatcattggcacccgccgttccggaagctttgtgtacaattgtgctgtgatgagttgttgacataccagggctattacattatcaactgtacatcttgaccaaaaggaaggataaagaaggcaaattctgctgagtctgtttactccttgatgggtaacttctgcccacaggcattttaggctaagctgaaggtaagctatctactatctatgaaggcacaagttggatgatagcacattgtcttcatgagcttataagtgtggtgattagtcatgtatatgtttagcatataataggtgattgtgtaattcagtttgtgtaatggtccattcaaacgtaacaaaatcgataggaggatgaacagaagattgacgtctgtgttctgggcctgctctctgatgagggacacacatcgggcatgcatatgtgagcccttcagcggatatcatatgtttgtatggttttctgtcagctgaattgaacttaatagccattgcttttaagtctgactatttgn

SEQ ID NO: 206777 - DNA, 3175 bp, Zea Mays
  misc_feature (3175)..(3175): n is a, c, g, or t
acacacccggaccccggtctgcgtttgtccctgcgggctgcggccctgcctcttctcgtctcccgttcccctcgccgcgtgagctctctctctctctctctctcctctgtggtgacgactgggcgcccgcacccctggcagccgccgccgcccagtccccgtcgggcccttcggcaggtcttcttcggccccttcgccggcgacgagccgcaccaggcgtacatgtgtacacccagcccaggcccttaactgcgcccgcccctgcgactggttttcctgctggtttctgtggatttggctgccggaggattggtgcagcctttaggatcacggtagattcgctgtgaaatccgaagggtgctcaggagctgcgtgatcgaccgcctgcaggtggggtgggcgcagaagggaggacaggtggagggtctggtgaattgttatagcaagaagaagaacaagaccggcagtggttcgaggaatcttgcagccagagcctggtcctccgagatggagggttctgatgagggtggagaagtcaacacgggcgacctcatcggcgggatcggcagggagttggccatttcatgcctgctccgtcttccccggtcttactattatgatgtggcatgtgttaatcgatctttctactcccttgtgaggtttggggagctttacaggttgaggcgtgaggctgggatcgtcgagcagatgatctactgctcatgcaatgttctcgagtgggaaggttttgatccgcgccgccaacggagaaatgatgaacacaccaaggtgcttatttggctccgcaagcttcgacatggaccactcttccaagcatgaatagggcacggcagatgtgctctggtttcttcatggatggcaagttctatgtcatcggtgggaaatctgagaggcacaatgagatccttagttgtgctgaggagtttgacttggagagcagcacctggcgcttgatcccagatatggcacagggtcttaatggtggaagtggtgctccacctcttgttgctgttgtgaataatgaactttatgctgctgactatgcaacgaaggaggttaggaaatatgacaaggaaaataatgcatggatcactcttggattgttacccgggaggtatacatcagttcatggctggggcattgctttccgtagttgtggagatatgctcattgtaattggtgcaatgagtgctggtggtagcggggtgattgaaatttgttcctgggtacccaataatggactgccagattggaagatcattggcacccgccgttccggaagctttgtgtacaattgtgctgtgatgagttgttgacataccagggctattacattatcaactgtacatcttgaccaaaaggaaggataaagaaggcaaattctgctgagtctgtttactccttgatgggtaacttctgcccacaggcattttaggctaagctgaaggtccgatagaacttctcatgtagcttcttacatgcctatgtctaatctcttcattttaattccatttggagggcctgcaattgatttctggaacgtgggacatgcagtgcagtattttagattaataatttggtgcaacctcaaaaattttgatcttccctgtgtatcttgatcaaagtttttttagctccagagaatagccttacattggcaaatcatttgcccatagattgtaagaaataaagaaaaaagaaatatctttgttgacaattgttgccttttccctttgtcttctcttggttaatagtgactggaggcaactgtgaatcattaccttctgttttatgcaatgtttactcatcaactgtgccttgttatcctaccctacctatggtgtctgataatgttaattctgtctcaatttggcttcttcagcgtggaaagctgcttttggtcatctgtgaactaacattttagttttggaacacatgaatgttttgggacattagttgccatttagacttgcaataattctgattaactgatcatttcttttgggttatgactttgtagctttgaggttttctaaataattcacagcaacattaatataatactgatgtgatgcattccattatgtttcgaacatgatgtattgtagtcagtctaaattgtatggatacaatgttgaaataattctatactggcttgaaagtagatgctttaagtggtgagcagaaacgacaattgtttactgtaatgagtgtgtacgtttttgcctgtttgttctgttgacaatgactttatattcttctgttcattaaaaaaagggatgctgattgctttgcatcaccgatgagtgaagcatagtagtacctaagcatagtaggggggaccattctgttattgatctgaattgatagcatggcatggtttttgaggcgtcacctaggagtccaggtgtgtccccaacaccacaggacagcacaagatcctggttacgtctaggcgttaaggcacgttcctaatgtcacaggacaccacaccacaataactccaaaccatgtcctttgctttccttttttttgacctgttcatatgtaccttgggaattgtggtaatgtaggggagggattctttttagtaacatttctagggaataataagtcttccttatctatgtgactattttggtagttatccttttatttctagtgctcactaagagaattgatgatatcaaatgattaatttttaacattttacacttgtgcatcactctggttatacaaggtgactatgttctttttaatagtgcatttcatgcttattgaagaatctctttaatgcttaaaagcgtatgttcttcctgctccaacaggtaagctatctactatctatgaaggcacaagttggatgatagcacattgtcttcatgagcttataagtgtggtgattagtcatgtatatgtttagcatataataggtgattgtgtaattcagtttgtgtaatggtccattcaaacgtaacaaaatcgataggaggatgaacagaagattgacgtctgtgttctgggcctgctctctgatgagggacacacatcgggcatgcatatgtgagcccttcagcggatatcatatgtttgtatggttttctgtcagctgaattgaacttaatagccattgcttttaagtctgactatttgn

SEQ ID NO: 206778 - DNA, 624 bp, Zea Mays
gagatgatggtctatagtttagtagtcctcactttcttaggtttggtcccgtgaatttgttctggagcacccgatttgacaaagccatgacatggtttcttacttgcctgcaagagtttgctgagtttgccataagtttggataagcagaacaatgttccccctgaaaaatcactgaagcttccctacaagattgatggtgacaaagtagggagccacacgatcgtccttagtttcaataagaatgaaaactggaccaaggctctaaagtacatgctgtgcaatctgaagtgggttctctactggtttattggcaatacaagttttgcaccaccctctgtatcactgcacacacaatctctgaagaacaagagttgatgctgttctctctctgcaacaactgtacatagtttgtgtactcgaccctattcgttggatatagccgcagtgacaataatgacacgtttgatgtgcatttgtttattgcttgaaatctgccatgatgtgtttattgtacaatctaaatctcaggaactacattttcacccttaggtaacgcctccaacattacgttttgaaaaaacaatgcaaaaacagtgttttaggtgacatgagtgaaatgctg

SEQ ID NO: 206779 - DNA, 1118 bp, Zea Mays
cctattgaaatatgtgtggcttgacgactgattagttattgagattgaggaagaggaaaagaaacttaaagctgctattgaagaagctgaaaaacaatattcagaagttagatctgagatggaaaatcttgaaataaagtctaaacaatttgaggaattggaagagcggtattggcatgaattcaacagttttcagtttcagttgacatctcaccaggaagaaagagatgcagtttttgccaagatagaagtttctcaggttcatttggaactgttgaagcgtactaatgttctcaatgatgcattctatatatcacatgatggagtaatcggaacaataaataactttcgcctaggacgtctttctaatgtagaggttgagtgggatgagataaatgctgcatggggtcaggctgcactgctgttgcataccatggctcagtatttcaccccaaaattccaataccggatcaagattcaccctatgggaagctatccaagagtcacagacatccagaataacacatatgaactgtttggtcccgtgaatttgttctggagcacccgatttgacaaagccatgacatggtttcttacttgcctgcaagagtttgctgagtttgccataagtttggataagcagaacaatgttccccctgaaaaatcactgaagcttccctacaagattgatggtgacaaagtagggagccacacgatcgtccttagtttcaataagaatgaaaactggaccaaggctctaaagtacatgctgtgcaatctgaagtgggttctctactggtttattggcaatacaagttttgcaccaccctctgtatcactgcacacacaatctctgaagaacaagagttgatgctgttctctctctgcaacaactgtacatagtttgtgtactcgaccctattcgttggatatagccgcagtgacaataatgacacgtttgatgtgcatttgtttattgcttgaaatctgccatgatgtgtttattgtacaatctaaatctcaggaactacattttcacccttaggtaacgcctccaacattacgttttgaaaaaacaatgcaaaaacagtgttttaggtgacatgagtgaaatgctg

SEQ ID NO: 206780 - DNA, 789 bp, Zea Mays
aaaaaaaacattcggcgccagctcattcagtaggggttctggctcccctccccatcggcttcgccgtgttcatggtccacctggccaccatccccgtcaccggcaccggcatcaacccggccaggagcctgggcgccgccgtcgtctacaacaaggacaagccatgggatgaccactggattttctgggtgggcccgctcctgggcgctgccatcgcggccttctaccaccagtacatcctccgggcgggcgccatcaaggctctcggctccttcaggagcaacgcgtgatgagcagagctaaagaaaggccttcgctggactgcgtgctggagcaacggcgatcgatcgatctagcgtggggagaggcggataggcgggcgcgcgagggaggagaataagtttgtgccggtggcccggtctcgtcggtcgcttttgttccagcatgcagctgcgtcgcgttcgtgtgcgtgcgtgggggtctccttaatttccccggcccctgtaatcatcaatcaccatgtgtgcgtataatatctgctgccaagggatcgattattcccccccccccccctctctctctctctgctcttgtagctccttctgttttatcgttattatgtagcgacaacaacgacgacgaccaccatcatcagtgagaaacctcttgcctctgtctaactcaaccgacatgtggagtcttcatcatctgctgttctcttcttgctcgttcgtacgttgtctctgacctctctgtgtgtattgtattgcattgcatgccgcatgcgtg

SEQ ID NO: 206781 - DNA, 1175 bp, Zea Mays
aattcccttttcccctcttcccgagctcccttgctaggttcctcgtccgcctctctgtcctagtctcgtcagcaacagcacagtgttgttactgacgcgccttcactctgttgacctgcatctagccaagtttatttggagactccaacctttggtctcccaaacttggagctcccaaggggagaggttctgccaaaattttggcttctgagcatccattttcagggggaggttctgccaaaatctgctcctgtgaacatagatttctcaaggggaggttctgccaaaatttcctcctgtaaccaccagctttccagggggagattctgccaaaatttcctgcactgatcatcattcttctaaggggaggttctgccgaagttttcttgtgtgacgacgacgatcagtttccagggggagattctgccaaaattttctgcactgaccatcagtcttccaggggaggttctgccaaaattttcttctctcactatcacttctccaaggccaagccctgccaaaatttccttcatatatcacatgcatcgtagacatacagacaataaactctaatttgcaaaggtaacaaaaaaaaaaagagtgctttcctccttggccttgatggtaggctagtagagaaaaccgcgcgcagcatctgtttacatgttgttgctcgtcctgtccgagcacctcctttccagatttatggtcggttctgccctaacccgccttgtccagtccttctctgttgttttcctctactggttttatgtcttctcagtaagccgccagtagttggactcaccttttcaagttatctaggcatttcctatatatttaccacatataaaaattatactaaggcagtaacaaaagaggtgcctttatatctgacaaacagaagggagtgaaaaagtttagattacacctcagtttgcctgtggtgacaactatgtcaagtggcacttcgtccggatcgagccggtgggtccaaagttctagatccgaggatgacctagatctccaggcccagatggagaggaggagaaagcggaggaaggagtcgaatcgggagtcagctcggaggtctaggcaacggaagcaagaacaccttgacgacctcacctcacaggtgaaaaagcaaaatatatgacaacaaagtccaacttgaaaaa

SEQ ID NO: 206782 - DNA, 759 bp, Zea Mays
atggcgtcacgagctgcacgaaaaccaaacgcctcgatccgcgtggcctgccacttggcagcagaaacacctcgtggatgcaaaaatagcgtcataatactacatgttccatttgggcctgtaagcgcagcccgggagaatttttggggccagctgttgggccgaggtcgacgacggggtcgacctctccgtggagacagccaaggcggccgtgagccacgccgccacgagccaccacgagcacggcggcgagctcagcgatctggagtcggatctggtggggcggcagaagactggctgctcgtcgtcgccggcggcaacaacgccggctgcagagctgatcgtgccgccagcacagcagatctagcaattccaggtggtacaaaagggtttttcatcaacaagtggtcaccaaaagaagaactgaaacatcaagatggtgtttgcttctacattttaccattgaggatatgatgctaaactgaagtcatgtattatgctatgcattcagaagatgatgctaaactgaataagcacatcaatctgatttttctatgcactgagactatgtttgtattattgttatgcaatgcaatctatgcactaaaacgttcaactctgtttgatctggctgacatattcagaattataatacgctgctgccaatttgcaaaattctattcaatttgctagtgatgcacaggagatgatcatgctggctattggctactccttggctgctggcttcttgtagcaagg

SEQ ID NO: 206783 - DNA, 871 bp, Zea Mays
aaaaaacacaaggccttaagccttccgttgtgctccgcgaggaaagcgaggaggcggccggttcggtgctgagtgctgagttgttgaccaacgggaagtccagtacccaagcggagccaccaaggaaaggaggaatggaagccaccggcgcagcctcgcagccctcggcgccgcagacaactcacccggcggtggcgccgctggccttcctactggggaagtggcgcggggaaggcgagggcagcttccccaccatatcctccttccgccagtgatctcgtacacgcagaagacgtggaagacggcgtctggcgagccgatgcacgccgagagcgggtactggcggccccgccctgacggctccgtcgacgtggtcatcgctcagagcactggcctcgccgaggtccagaagggttcatttgatgctgaaaagaaaacagtgacactccaaagcgaactcgtagggaatgcatcaaaggtgaagcagatcacgagaacttttcaggtggcagatggggagctctcgtacgtcgttcagatggcaacgatcacaactagcctacagccacatctcaaggcccttcttaggaggatttgaagttgaccggcaaaatctcctacaacgacgtcgctgcggctaaccacaaccgagggacacctgtaatacagagcatacttctggtgattactacgtagttattagtgaatgaacttacaggttaaataaagctcattttcaaaaacagaggttccgctgataggaactaccgtatatgtaaacggcttaccattcagcccatgctccacaaatcgagattattattttttcagtttttttttgctttttattgtttattcctccttagcatgc

SEQ ID NO: 206784 - DNA, 721 bp, Zea Mays
ggccttccagcacacgctagcggactctcggatgagagggggctgttcgccgattgggtagggggcaaatttgcggcgcgcgttggccagcgcgttggccagcccactgcgggatctgggcatccggcgacggcggcccgagcgacgcctctactgaagggaagccagggagggaggagcgacacagcgtctggcaaaagggcaatccggcggttggctggctcgccggcgcggcttcccctccgtagatcctaaaccctaaacgccatcgccaaagccttcgtcagccagtcctccaaggcacaggaaagttgagggaagcacgggtggtatttggagttttgtgcagataagaccaccacgcatccaatccatccctgtcttctcttcccacttcccagtccccaatcgcgttctcttccttggcgacatggcggccgccaccggctacagcgacgccccaaccgacgagcaactgctggcgtacgctgagctgcccaaacatggccgcgacatggcggaggtgttcgccgtgcgcatccccgccaccgtcggaggaaacctgccgccccgtggcagcatcgttttctacggcggccactgctgcagcgatttcatttacagctggagtccactggaagaggaagaagacacctcgaagcaaatctgcgacagccaggtctgtttaattaaatcgtacgagacgttgtgttaaatgtat

SEQ ID NO: 206785 - DNA, 706 bp, Zea Mays
ggccttccagcacacgctagcggactctcggatgagagggggctgttcgccgattgggtagggggcaaatttgcggcgcgcgttggccagcgcgttggccagcccactgcgggatctgggcatccggcgacggcggcccgagcgacgcctctactgaagggaagccagggagggaggagcgacacagcgtctggcaaaagggcaatccggcggttggctggctcgccggcgcggcttcccctccgtagatcctaaaccctaaacgccatcgccaaagccttcgtcagccagtcctccaaggcacaggaaagttgagggaagcacgggtggtatttggagttttgtgcagataagaccaccacgcatccaatccatccctgtcttctcttcccacttcccagtccccaatcgcgttctcttccttggcgacatggcggccgccaccggctacagcgacgccccaaccgacgagcaactgctggcgtacgctgagctgcccaaacatggccgcgacatggcggaggtgttcgccgtgcgcatccccgccaccgtcggaggaaacctgccgccccgtggcagcatcgttttctacggcggccactgctgcagcgatttcatttacagctggagtccactggaagaggaagaagacacctcgaagcaaatctgcgacagccaggcaggacagcaagtgatccactttctt

SEQ ID NO: 206786 - DNA, 1970 bp, Zea Mays
ggccttccagcacacgctagcggactctcggatgagagggggctgttcgccgattgggtagggggcaaatttgcggcgcgcgttggccagcgcgttggccagcccactgcgggatctgggcatccggcgacggcggcccgagcgacgcctctactgaagggaagccagggagggaggagcgacacagcgtctggcaaaagggcaatccggcggttggctggctcgccggcgcggcttcccctccgtagatcctaaaccctaaacgccatcgccaaagccttcgtcagccagtcctccaaggcacaggaaagttgagggaagcacgggtggtatttggagttttgtgcagataagaccaccacgcatccaatccatccctgtcttctcttcccacttcccagtccccaatcgcgttctcttccttggcgacatggcggccgccaccggctacagcgacgccccaaccgacgagcaactgctggcgtacgctgagctgcccaaacatggccgcgacatggcggaggtgttcgccgtgcgcatccccgccaccgtcggaggaaacctgccgccccgtggcagcatcgttttctacggcggccactgctgcagcgatttcatttacagctggagtccactggaagaggaagaagacacctcgaagcaaatctgcgacagccagggtaacctcgtgctaactgggccatcattggccacctcggcatacagtccaattgctttcttcctctacctccatgatggcagcccgcaagccggagaagccaccgaggacgacgaggacatcgggaggatactctgcgactgcatcggcgacgacttctccaactacaacagggccatagtcgagactgtccaaacgggctatggccccgctgaagtgatctatgccgtcctgagcaacggcgtccaaggccgggtcgccgtcaaacttgctcgcccgccggtgtccaaagctggagaagaagacgccaccaccattcttgggaggatcgttgctcgcagcaagctgttcgacgtcggctgcgtgctcttctacaaagagggtgacaatggagtgaacgtgcgaccgggggggctgattcagttggcgagggaagcgctcgccgtgccgctgcacatgccgctgacgattgagcttgacctgcatcgctgttccggcgatgaaattgttggaggggtccttgagttcaatcctgcgaccaacggccagcacacggaacgacttgttggagaaaatggcgctgaattggaagtggcaatttcatggtcgcagtacccttggcgccccgcccaaagactggtggcaggcctcctacaggcagatgctaggtgcgtttttctcctccatttgcctctgcctgtctgtggtgatgattgttcgtttggattagtcatggttagtgtggtggtaatgctcaagttggggcactgtcaatagccggattgagtgtatttttttggttttatgtcacaatagctaacattacagttttaggtgtgattgaccactaagtctttatctctgctctgattactaagctggcaggatcgaaaagttcaatttttcatttggtagtctgaaactaaagctccttcaccttcagccctgtattttcactatgggaatggtcttccttagtccatatgaatattacctgtggcctacggatatgaacatgataactattttctagctttgtgattgatattgtcatgtgattcagcttcctagcagcaccggtaccaacctttctatttttcacagtacactggcttcgtttctttttgttgcaaataatttcttagaaaagtttgactcttcaaatcctaggttgttgagtagatacataacatcacagaagttgtacgtaaagggtagcagtgatgctctttatgagaatctttgaggaagagagatgaccccctaacacatcaaatccaaacttattttt

SEQ ID NO: 206787 - DNA, 1307 bp, Zea Mays
ggccttccagcacacgctagcggactctcggatgagagggggctgttcgccgattgggtagggggcaaatttgcggcgcgcgttggccagcgcgttggccagcccactgcgggatctgggcatccggcgacggcggcccgagcgacgcctctactgaagggaagccagggagggaggagcgacacagcgtctggcaaaagggcaatccggcggttggctggctcgccggcgcggcttcccctccgtagatcctaaaccctaaacgccatcgccaaagccttcgtcagccagtcctccaaggcacaggaaagttgagggaagcacgggtggtatttggagttttgtgcagataagaccaccacgcatccaatccatccctgtcttctcttcccacttcccagtccccaatcgcgttctcttccttggcgacatggcggccgccaccggctacagcgacgccccaaccgacgagcaactgctggcgtacgctgagctgcccaaacatggccgcgacatggcggaggtgttcgccgtgcgcatccccgccaccgtcggaggaaacctgccgccccgtggcagcatcgttttctacggcggccactgctgcagcgatttcatttacagctggagtccactggaagaggaagaagacacctcgaagcaaatctgcgacagccagagctacatgtctgtccagtccaaggtggttgcgcttggtgcactgatcttcttccttgtctcgtatggctcttgcactggaggatggactccaagcgccggctgcaggggcccttctcgctgcgcatcactaacgagtccggcgagacactggtggcttaccaggtcatcccggcaaactgggcgcccaacagctactaccgctccaacatccagtacgaggcttttggctctgctgctggacaggctactggctctgctgttggactggtcattagctctgctgctcgactgcacacgttaattaccaggatcattggcttgatctgtttggtattgttgtatcatttgcaagggattgaggtgccttagttttaattagcacttgacatgttgggtgtcctacgctgtgtgtctgctggaggcgtcgtcgatccagagtttcatcttttcgaaaaagttttgaacccaaataattttcctatgaatttcgttgattcctgcgtgacaggtagttgatgtagctctgtgggaaatgtacacttgtatttggtgctggatagctgggctgtcctgtcttgttctggctgttgtaggggctcacaactttcaactgttctagaaatctt

SEQ ID NO: 206788 - DNA, 1630 bp, Zea Mays
ggccttccagcacacgctagcggactctcggatgagagggggctgttcgccgattgggtagggggcaaatttgcggcgcgcgttggccagcgcgttggccagcccactgcgggatctgggcatccggcgacggcggcccgagcgacgcctctactgaagggaagccagggagggaggagcgacacagcgtctggcaaaagggcaatccggcggttggctggctcgccggcgcggcttcccctccgtagatcctaaaccctaaacgccatcgccaaagccttcgtcagccagtcctccaaggcacaggaaagttgagggaagcacgggtggtatttggagttttgtgcagataagaccaccacgcatccaatccatccctgtcttctcttcccacttcccagtccccaatcgcgttctcttccttggcgacatggcggccgccaccggctacagcgacgccccaaccgacgagcaactgctggcgtacgctgagctgcccaaacatggccgcgacatggcggaggtgttcgccgtgcgcatccccgccaccgtcggaggaaacctgccgccccgtggcagcatcgttttctacggcggccactgctgcagcgatttcatttacagctggagtccactggaagaggaagaagacacctcgaagcaaatctgcgacagccaggcattgaaaggacaccagctggcttagcctttcggtgactctaaacaccacggcactttcaggtgacacttccacattataaacattgttgtgagaaactaggagtgcacatcagtagccggcggtaggaatgtaaatttttaaattcgcaagtaactagtagtttgtaatgaagttttctttatacctatttgtggatttgaagatgtttgtaacacaagcttttgtgcttgtactgtaagttgacaatttacatttgagatattaaaaaaaatccacttattgaaacaccctagcttcaaatccttcagtcttgcacacagagctacatgtctgtccagtccaaggtggttgcgcttggtgcactgatcttcttccttgtctcgtatggctcttgcactggaggatggactccaagcgccggctgcaggggcccttctcgctgcgcatcactaacgagtccggcgagacactggtggcttaccaggtcatcccggcaaactgggcgcccaacagctactaccgctccaacatccagtacgaggcttttggctctgctgctggacaggctactggctctgctgttggactggtcattagctctgctgctcgactgcacacgttaattaccaggatcattggcttgatctgtttggtattgttgtatcatttgcaagggattgaggtgccttagttttaattagcacttgacatgttgggtgtcctacgctgtgtgtctgctggaggcgtcgtcgatccagagtttcatcttttcgaaaaagttttgaacccaaataattttcctatgaatttcgttgattcctgcgtgacaggtagttgatgtagctctgtgggaaatgtacacttgtatttggtgctggatagctgggctgtcctgtcttgttctggctgttgtaggggctcacaactttcaactgttctagaaatctt

SEQ ID NO: 206789 - DNA, 1476 bp, Zea Mays
gtaagccgtcgcacttcgcttcgcccacgtctcccgctcccctgcttcgtgtctgctccgatcggttgcgccctggacgagcgggttggggcctggttcgtgcgttctggagagcatccaagtttccacggtttgaatctagcgtagcatgccgaggtttaaggccttttggcatcggatctgcttcgcctctgcgagatctccggattttgatcaaagttgcttctcgtcgaagtttcgctggatttcctctggattaaacaagcgagtcacgtggctcagttcgtgatcacgttatgatcctttcatatgtacctttccgaactgctcgcggagaggcacaagcttaccccgttcatcccagtgatcccacatagtgtacggttgctgaatcaagagttctccagcttatagctggcttggaggatctcaaggcagctcctctggactcattgtcaagaaaacaatgaaggtcgatatcccagtagacaaatatccaacatacaattttgttggccgcatccttggtccaagaggaaattccttgaagcgggtggaggcaaatacggattgccgcgtgctaataagaggtcgtggcagcatcaaagatccagcacgggaggaaatgatgcgagggaagccaggatatgagcatctgaatgaacctctccatatattggttgaggcagagctacctgttgacatcattgatgctcggctgatgcaagcccgcgagatccttcaagatctgctaaagcctgtggatgaatcccaggacttcttcaagaagcagcagctccgggagctcgcgatgcttaatggcaccctgcgtgaggaagggatgcagaggttcggttcagcgtcccctttccacaacagccttggaatgaagagagccaagacaagggggtgatgaagaaagtcgcaagcatcatgaagggagaacttaaatcatcatctattctgaggccaatcctgtgtacgaatggggggttgccttgctggctactggcccaatacggtctcgcgccaccagcatcgcggcgcgggcggccgtgcacgataaaacatatatctggagttgtgtctactgggggagttgagtttggttatgcgccatgggttgttacgctatatattgggctgtgcaggcttttgtagcaatgtggtttgtgtaaatgctcatttggagcgtttggaagctctcggcttgtatttctttcttatcgagatagtattcaaggacgctgtttgggatttgaagcaatgctctaaactgcgacaagcatggaggcttgatctgtttcattcgaatctcttgtttgacactatcaataaccagtgcatacaagtagtgaactggcgtcttaagttgcatcttcaattcggattctgctttgttgatgcaggataatctaaattaatgcatgtaatgcacttgaaattaatatatcttctttttccaaaaaaaaagaa

SEQ ID NO: 206790 - DNA, 2187 bp, Zea Mays
ccagtaccaccaccgggagaccgggcaccgctcgcaacctccgtccacgccacggctactattcacttcacttgttaccgcgcgcggcgcgcctaccactactctctactcatcactccccagcgggcggccacgcgcacgcacccataaaagtcctcgctccaccccctccaactcccgtcccctctccctccctccttccccgccgccgccgccgccatccaccaggtcagctccagcggacgacgtctcaacagtctcgcgccactgagatctcgccgagggagggagagcagcaggcagcagcagacatgtcgtcggggcggtacatggcgtactcgccctcgccgtcgaccaccccgcactccccccgcatccacggcctccgcaccccctctgccgccgtcgccgagcaggagaagtacctttccgaactgctcgcggagaggcacaagcttaccccgttcatcccagtgatcccacatagtgtacggttgctgaatcaagaaatttttcgtgtttccacactattggagaacgcgtctcttttaaatcaaagtggccttgaacatggtagtccactaacaacgggaggattatattcaaacggagcagctactgacatgaatgggtggccatcagcatttcaatcagaaagttctccagcttatagctggcttggaggatctcaaggcagctcctctggactcattgtcaagaaaacaatgaaggtcgatatcccagtagacaaatatccaacatacaattttgttggccgcatccttggtccaagaggaaattccttgaagcgggtggaggcaaatacggattgccgcgtgctaataagaggtcgtggcagcatcaaagatccagcacgggtaaacattcagattagtgcctcttaatcttatggacttggtagttagatgtactcagaaatttgaagaattggagattatgtattaaatattttccccgaaggatcttgatgtatgaaatatgaactatggacctatggacattcaaagcaagatcaaccctgataccctctggctaggaaaatatggatgttttatagtttgttcctgcacgtttcttttttcaaaatgttttctgttatgtacctttcactttgtgtcttggtatgaaagcccacactggctatctggtgattatttaaaaaaacactttctttctggaacttgccagagaggggccatccatcctttagatggcatagctacctttatgcatgtgtacatctagtgggttttctgtttactttgtgctatctatgggattggggttcacatacactattgtttttcaggaggaaatgatgcgagggaagccaggatatgagcatctgaatgaacctctccatatattggttgaggcagagctacctgttgacatcattgatgctcggctgatgcaagcccgcgagatccttcaagatctgctaaagcctgtggatgaatcccaggacttcttcaagaagcagcagctccgggagctcgcgatgcttaatggcaccctgcgtgaggaagggatgcagaggttcggttcagcgtcccctttccacaacagccttggaatgaagagagccaagacaagggggtgatgaagaaagtcgcaagcatcatgaagggagaacttaaatcatcatctattctgaggccaatcctgtgtacgaatggggggttgccttgctggctactggcccaatacggtctcgcgccaccagcatcgcggcgcgggcggccgtgcacgataaaacatatatctggagttgtgtctactgggggagttgagtttggttatgcgccatgggttgttacgctatatattgggctgtgcaggcttttgtagcaatgtggtttgtgtaaatgctcatttggagcgtttggaagctctcggcttgtatttctttcttatcgagatagtattcaaggacgctgtttgggatttgaagcaatgctctaaactgcgacaagcatggaggcttgatctgtttcattcgaatctcttgtttgacactatcaataaccagtgcatacaagtagtgaactggcgtcttaagttgcatcttcaattcggattctgctttgttgatgcaggataatctaaattaatgcatgtaatgcacttgaaattaatatatcttctttttccaaaaaaaaagaa

SEQ ID NO: 206791 - DNA, 1763 bp, Zea Mays
attggatcaagcaccgattgaggttggcgtggtgccgcgggcggtgtggtgatgcctgcgcttgtggtctgtgatggtggctcaacatcagcccatgccaaacggaggatggtggaggacagggccaatctatgggcggagcatggtggcaccagcaggtgcagaaaggagtggcggtggcggcgcgaatgcaggtggtgctgagagattgattgtcgatgcggcttgtcagcttgctgcccacgatcatgatgttcatgtcttcacatcacatcatgataaaaaacgttgctttgaggagactctttctggtttgtttccggttactgtacatggggatttcctgcctcgccatgtgttctaccgctttcatgctgtttgtgcttatcttcgctgcatttttgttgcgctctgtgtgctactcagatggcccttctttgatgtcatattggtagaccaggtttctgttgtgattccactacttaaactaatggcatcatcgaagataatattttactgtcatttccctgatctgttacttgcacaacatactactatgcttcggaggttatatcgcaagccaattgacatgattgaggaaagcactactgcaagttcactgcagcaacttttgcaaggaccttttctggtttacatgctagaggaatcgagcctggtgttctttatccagctgtctctgttgagcagtttcacgaaccccatgcttataagttgaatttcctatcaatcaaccggtttgagaggaaaaagaatcttgatcttgccatttcagcatttgctttgctccgttctgctgcttggactctacctggtgatgctctacaagaagcaacattaacagtggcaggtggctatgataagcgtctcaaggaaaatgttgaataccttgaggaactcaaaagactcgcattgacggaaggggtttctggacaggttaattttgttacatcttgctcaacatctgaaagaaacgagcttctctccaactgcctctgcgttttatacactccaaaggatgaacatttcggtattgtacctcttgaagccatggccgcccataagccggtaattgcctgcaatagtggtggcccagtggaaacagttgtgaatgaagtaacagggtttctgtgtgatccctctcccgcagaattctccaaagccatgctgaaacttgtgaatgatcatgatcttgctgtcagattgggtgaacaagcacgtgaccatgtggtgcaaaaattctcgaccaagacatttggtgatctcctcaacagctacgtcttgaacatctaccatgagaggatggaatgatctataatattgggtcagccatgccatatgaaaacaatttgttcaatacaaggttttttttgcacctttacgtctaatctgattttgatggacacacataatgacaatgacattccattgaatccctttggcatactgtagtcactctatgatctgtatattgttttcaattataacatcaaatttggcttggtccatcctagaatctgaatggagctggagtagagatggcaatggggacccgatttcctgcggggaattcttctgttagagcaacttcaaaagaacgtgtaaactaaccccaaaacagatattagtcaagaatagtgatttttttactccaacaacttcctcaattttccccaaaaaattcgtgtcccgtattcacagcctcttgtccctcatattttggtgggtttcatcctctctaattc

SEQ ID NO: 206792 - DNA, 1125 bp, Zea Mays
ctccgtccccgcttcactgcatgcatccgctggtggaaccagggcccaacctgcctggggacgtgcccgggcttggcttcgttggtggtcgtgtggatccctgcgttagctgcgcaggttgccccatgtccgcaccctccgacctaaatctcgctcatgtcgtccggtgccatgcgactcgctgttgtgcgctcaggtgcccaacgcggcgtgatgagaccggcaacgtggctggaccggcgacgcggctgcgtggcagatacatgtgagcatgggcactgtcgccacctactcgaccaggggctgctcctccccatctcacgtggaactcctcccttggttgcttctcaaccgcatcagcgaggaaaacaagcacagaactatgcacacttgttctagcatgaatggaggtcgccaagatggatttggcaaacttcatggtggatactagagacgtacaccaagaagaaactcacgctcagcaaagtcattgtcgcaaggtgttgctagggacaacttctattcaatgtttcacattacccagagaggaggaaattctcaaaagaggaatacaaagcattcacgagagagatgaataaagctatgaagcagctgttgtcgtgaccggatttcaacaggtgggcgttggctaacgcggacatgatatctgtgtggctctgccaggaggaaactacagcagcagcaacagcaaccaacagcggcatcgtttcttgggactatttttgatctgcatgtgtgtagtgtgctttcttagcagcaataggagtgctccctactcagtcatttcatgtgagttgattagcaagggtagggtaacatctgagtgttccacattatgaagtggcagcaaatatgtagaatattgtagtttagtgagtcacatcttaggtccaaaaagtccaaacagcatctgaatcttgtaacattcagtgctaaggtgagtgaatctcaatttgttgagttgtatatcatgcttgatcatcatgaggatagaatgaacgtatttaagtgtttctaggcctgcatatgaagcaagctgtggcatatgaagcaagctgtgctgaagtgtcgtgtgtagtaattttagtaattagtgtttgtagc

SEQ ID NO: 206793 - DNA, 992 bp, Zea Mays
ccagggcccaacctgcctggggacgtgcccgggcttggcttcgttggtggtcgtgtggatccctgcgttagctgcgcaggttgccccatgtccgcaccctccgacctaaatctcgctcatgtcgtccggtgccatgcgactcgctgttgtgcgctcaggtgcccaacgcggcgtgatgagaccggcaacgtggctggaccggcgacgcggctgcgtggcagatacatgaaaacaagcacagaactatgcacacttgttctagcatgaatggaggtcgccaagatggatttggcaaacttcatggtggatactagagacgtacaccaagaagaaactcacgtaggctcagcaaagtcattgtcgcaaggtgttgctagggacaacttctattcaatgtttcacattacccagagaggaggaaattctcaaaagaggaatacaaagcattcacgagagagatgaataaagctatgaagcagctgttgtcgtgaccggatttcaacaggtgggcgttggctaacgcggacatgatatctgtgtggctctgccaggaggaaactacagcagcagcaacagcaaccaacagcggcatcgtttcttgggactatttttgatctgcatgtgtgtagtgtgctttcttagcagcaataggagtgctccctactcagtcatttcatgtgagttgattagcaagggtagggtaacatctgagtgttccacattatgaagtggcagcaaatatgtagaatattgtagtttagtgagtcacatcttaggtccaaaaagtccaaacagcatctgaatcttgtaacattcagtgctaaggtgagtgaatctcaatttgttgagttgtatatcatgcttgatcatcatgaggatagaatgaacgtatttaagtgtttctaggcctgcatatgaagcaagctgtggcatatgaagcaagctgtgctgaagtgtcgtgtgtagtaattttagtaattagtgtttgtagc

SEQ ID NO: 206794 - DNA, 834 bp, Zea Mays
ctcagagtttcttctggtggactatgggacgacatggccattgggctccttgtctcttccatcactttgcagggaaaacaagcacagaactatgcacacttgttctagcatgaatggaggtcgccaagatggatttggcaaacttcatggtggatactagagacgtacaccaagaagaaactcacgctcagcaaagtcattgtcgcaaggtgttgctagggacaacttctattcaatgtttcacattacccagagaggaggaaattctcaaaagaggaatacaaagcattcacgagagagatgaataaagctatgaagcagctgttgtcgtgaccggatttcaacaggtgggcgttggctaacgcggacatgatatctgtgtggctctgccaggaggaaactacagcagcagcaacagcaaccaacagcggcatcgtttcttgggactatttttgatctgcatgtgtgtagtgtgctttcttagcagcaataggagtgctccctactcagtcatttcatgtgagttgattagcaagggtagggtaacatctgagtgttccacattatgaagtggcagcaaatatgtagaatattgtagtttagtgagtcacatcttaggtccaaaaagtccaaacagcatctgaatcttgtaacattcagtgctaaggtgagtgaatctcaatttgttgagttgtatatcatgcttgatcatcatgaggatagaatgaacgtatttaagtgtttctaggcctgcatatgaagcaagctgtggcatatgaagcaagctgtgctgaagtgtcgtgtgtagtaattttagtaattagtgtttgtagc

SEQ ID NO: 206795 - DNA, 832 bp, Zea Mays
gtttcttctggtggactatgggacgacatggccattgggctccttgtctcttccatcactttgcagggaaaacaagcacagaactatgcacacttgttctagcatgaatggaggtcgccaagatggatttggcaaacttcatggtggatactagagacgtacaccaagaagaaactcacgtaggctcagcaaagtcattgtcgcaaggtgttgctagggacaacttctattcaatgtttcacattacccagagaggaggaaattctcaaaagaggaatacaaagcattcacgagagagatgaataaagctatgaagcagctgttgtcgtgaccggatttcaacaggtgggcgttggctaacgcggacatgatatctgtgtggctctgccaggaggaaactacagcagcagcaacagcaaccaacagcggcatcgtttcttgggactatttttgatctgcatgtgtgtagtgtgctttcttagcagcaataggagtgctccctactcagtcatttcatgtgagttgattagcaagggtagggtaacatctgagtgttccacattatgaagtggcagcaaatatgtagaatattgtagtttagtgagtcacatcttaggtccaaaaagtccaaacagcatctgaatcttgtaacattcagtgctaaggtgagtgaatctcaatttgttgagttgtatatcatgcttgatcatcatgaggatagaatgaacgtatttaagtgtttctaggcctgcatatgaagcaagctgtggcatatgaagcaagctgtgctgaagtgtcgtgtgtagtaattttagtaattagtgtttgtagc

SEQ ID NO: 206796 - DNA, 819 bp, Zea Mays
acaaatctgcaaccaccttactatatcactcaattagtatactgcattatacaggaaaacaagcacagaactatgcacacttgttctagcatgaatggaggtcgccaagatggatttggcaaacttcatggtggatactagagacgtacaccaagaagaaactcacgtaggctcagcaaagtcattgtcgcaaggtgttgctagggacaacttctattcaatgtttcacattacccagagaggaggaaattctcaaaagaggaatacaaagcattcacgagagagatgaataaagctatgaagcagctgttgtcgtgaccggatttcaacaggtgggcgttggctaacgcggacatgatatctgtgtggctctgccaggaggaaactacagcagcagcaacagcaaccaacagcggcatcgtttcttgggactatttttgatctgcatgtgtgtagtgtgctttcttagcagcaataggagtgctccctactcagtcatttcatgtgagttgattagcaagggtagggtaacatctgagtgttccacattatgaagtggcagcaaatatgtagaatattgtagtttagtgagtcacatcttaggtccaaaaagtccaaacagcatctgaatcttgtaacattcagtgctaaggtgagtgaatctcaatttgttgagttgtatatcatgcttgatcatcatgaggatagaatgaacgtatttaagtgtttctaggcctgcatatgaagcaagctgtggcatatgaagcaagctgtgctgaagtgtcgtgtgtagtaattttagtaattagtgtttgtagc

SEQ ID NO: 206797 - DNA, 1571 bp, Zea Mays
ctattctctttctctctctccttcccccgccccctcgcctcccctctcccacccccaccaagcaccgccggtcactatccctccttggtcttctccctcctcagagcagggaggggaagcggaagagggaggcgagagcacgggaaacctgatctgatttgcttttggtcgccacaagagaagggagttggtgcagtttgtaggcgtgcctctgtgtctccgtgtgtgtggagatggaccccaagttccccacacccctagcgctaaacaaaacggagcccaccaccgcgacgaccaccaccacctcgaccgcgcagcatcatcagctggatcctaaggactaccagcagcagacggcgcagcaccaggagcagcagcagcaccaccatcacccccacctgcaaatccaaatccaccagccgccgccgccgccgcaggacgggggcggcggagtgaaggagcagcagcagctgctgcaggtggtggcgcagcccggggatcggaggcagcaggcgctcgcccccaagcggagctccaacaaggaccgccacaccaaggtcgacggcaggggccgccggatccggatgccggcgctctgcgccgcgcggatcttccagctcacgcgggagctcggccacaagtccgacggcgagactgtgcagtggctgctgcagcaggccgagccggccatcgtcgccgccaccggcacgggcaccataccggcgtccgcgctcgcctccgtcgcgccctcgctcccgtcgcctacctccgggctcgccaggccgcaccaccaccacccgcaccacatgtgggcgccgtccgccggcttctcctcgccctccttcctgaattccgcgggcgcgggcgacggcaccggtatcggcggcatcatgcagcggatgggggtccccgcgggcctggagctgccgggaggcggcgccgccggcggccacatcggctttgcgcccatgttcgctggacacgccgcggccatgccggggctcgagctcggcctctcgcaggacggtcacatcggcgtgctcgccgcgcagtcgatcagccagttctaccaccaggtgggtgccgctgccggcggcagtggccagatgcagcacccgcacgggcaccagcatcaccatcatcagcagcaggaggacggggaggacgaccgcgaggacggcgagtctgatgacgagtctgggcagtagtgtagtcgttcaaccttgcgttttctgggtcttccctcaagtggaggaggagagaaaagtgtatgcgtgcagccacggaatgcttctgctactcctggattcttgttggtcgatggatttttatgttttttttttctctcgtgtggtatccaaactcggcggaggcctctcttgctgtgaagacttgcgggctcaagatcatcctcacttcttcctacaatctcatggggtggatgatcgccacagccttctctccgacttccaggtgtataatagctgaaaacttgatggattggaccaatcacccttgatgcttgctgtggatcttttcgctttaaacaacatgctgaagacaacatcgag

SEQ ID NO: 206798 - DNA, 3530 bp, Zea Mays
ctcgtttgacataaatcacgatgtacccgactcaattccaagcagtcatcgtgagggagcgaccacatccaccgcaccttctctttgcagtttgcaccggaaagatctggtgggtccccacctgatgacttcccaccccgcctatatattgtcccctgcagtgcaggcaccagcaccagagcggcagtatagcttgtagtgccaaccacgcgacgaaggaagtcgcgcagacggggaggcaccggtcggctattccctcttcccttccctccctgccgcggcaggcgccatttcgcatctcgtcgccggccatccttgaacacgcacaagggggcgtgagcagctgccatggcgagccatcagcgcggaggaggtcgggatcaggcgaaccccaacgtctttcaggggaaccggcgcaacggcaacaaaagcggtggccgcggcagcggacgaggtgggggccgaggtggccaaggcgggggccgaggtggctacgcctacggctaccagggaggcagcgactacggccgcgggcgcgggcacggcggcccgcaaacgccaggacctgatgatgtgcgccaagcagaagcaggtccgtctctcgcggagcgcaacgcggcggccgccgcagccgcgctgagggagaagttcaagacgatggacattgtccgcgacgagcccatgtttccagcgcgcccgggcttgggcgccgtggggacgccgtgcggcgttagggccaaccacttcttcgtcggcctcgtcgacaagggcctgcaccaatacgacgtgaccatctcaccagatacaacgccaaagggcatgtacagggaaatcatgtcgaagctggtttccgagaaccggcagaccgagcttggtggccgcctccccgcatacgacggccggaagctactgttctccgctggcgagctgccgttcgagaccatggaattcgtggtcaccttgtctggcaggacggaaaggatgtacaaggtggtgatcaagcataccacggggatcagcctgcagcagctgttcatgctcctggcgggctacccttcggacatcccggcacaggcgctgcaggtgcttgacattgtgctgcgtgacattatcctcaacgaacgcaactccatggagtacgttgcagttggccggtccttcttctcaccccgaggacccagggatattggcatgggtgtggagggatggacgggtttctatcagagcatcaggccgacacaaaatggcttgtctgtgatcatagacatttcttcaacagctttcattcgacccctgccactgattgattatgtgatgttgattctgggcaaagatcgcaggacctttacaagtattactcccatggatcttgtcctgctcaataaagccctcaagggactgaggattgaagtcacccaccgaggagccgcacgcccgaagtaccggattgccagcctgaaaaatagtccttctttacagttctttcaatcgtccgctggagttgagaagtccgtagcagattacttcagagagacataccagctggaaatggactatgattttctcccatgcctccaagttggcaatgatcagaggccaaactacctccctatggaggtttgcaggatagtagctggacagaaaaaccgcaagaagttggatgccaaacaggtctctaatctagcgaacttaacctgccagagcccagatacacgtgagaagaaaattcgtcagtttgttgagcgtaatgcctacagtagagctgagcgtgccattgaatttggcatggaggttgactattgtcctacttcagttcaggctagagttctgccggctcccactctgaagtaccgtgaaactgaacgtgaatgtttgtgttacccaacggatgggctgtggaacatgaagaacaagctagtagtagatggtgcaagggtgggcaactgggcctgcgttaacttttgtcgtggtttgaatgatagtgttgttgataaattttgctctgatctggttacatggtgtcgtactagtggagtgagaatggatggcttgacacttccaatataccgtgctcaacctgaacaagttgaagatgagcttactcggttctatcagaacatgctagtaagagggcaaaagattgatcttttgcttgctatactcccagagaaaaacggcagcttatatggtaatttcaaaaggatctgtgacacacagattggtgtcatgtcgcagtgttgcctggataaaaatattaggaatgcaaaacttccgtactttgctaatgttgctattaagatcaatgccaagtttggaggaagaaacttagaatttgctaatcctgaagaaagcttaccgtttttttctactgaaccaacaattatgtttggtgctgatgtcactcaccctgctgctctagatgatacttccccgtccattgcttctgttgttgcctcccaagactggcccaaggtggctaactataatggcattatccgtgcacaaggtcaccgtcaagagctcattgatgggctggaaaatattgtcaaggaactcctacttgcattcgtggaacggtctaagcagagacccaagcaactgatcttctacagggatggcgtaagtgagagccaattcaaacaagtgctggagcaagaaatccatgagatagagaaggtagaaacaatttgagacatcaagtgttgttccctcagttagtataacatttatactttcttcaggcatggacagctctttacaatgagaagccaaagatcaccttcgtagtggtgcagaagaggcaccacacaaggctcttccccagcaatagccaatacgaggacaagagtgggaatattcgagctggcaccgtagttgataataatatctgccacccaacagaatttgatttcttcctgtgcagccatgctggggccaagggaacaagccgtcctgcgcattaccatgtgctacgagatgacaacaagttcaccgcagatgctctgcagtctctaacatataacttgtgctacatgtattcatgctgcactcgctctgtgtcaatcgctcctcctgcatactatgcccacaagctcgcgtcccgtgcccgcttctacgccaaccaagcctctaatgctgctgctggtccgcagccacttccggaggtcaaggatgaactgaaaaggcgcatgttctactgctagtccttgaccactgaaaacctcctgaacaaggctttgctctactcaagtctcaagtcccttgaatgataccgtctgctgttctttaaagtactgataaaattccagttttgttaagtcccaatatttccgtagttgcatgagttttattttcatcgctgttttgacgaatacattacacatgaacgtttccgtaggagatcagcaaagcacaaaagatgtcacgacgaaaatactaggaattgattgatgctcaatctcgctcctaaaatatacagcacaaatttgtattagaaatcctcaagtatctcgcccctaataaactactag

SEQ ID NO: 206799 - DNA, 5400 bp, Zea Mays
gctcctcgagtttacgatctcacgggccttcggccttccaacgctctgtcccacgagcccactaaaaaagtgctttggctaggcctgcggcaccgatggcccaagaagcacatgccaactgaagctcgactcccaacggtcggccgtagtatgagttgtttcacttgttcaaattccaatcgcggggcaagcaaaggaggaaagcaaccaaaggcatttcgcttctcctccgacaaatccatatccagaagatagcaccagtgcgtctcctcccaagctctcggatccaacccaatggaaggcgcggaggcgcttttccccggcgacggatgcggcggtgaccccatggacttctcgtggaccgctgacggggagaagcacccggacccggcggcttgcgccagccccggccgcgacgacgaggctacctcggcctcgaccccggttccttcgccgcaggagatggcggagtccatgattctcgtgcccgggccgcgcgtcgtcatgtctggactcaggctggctgattgccgttcagatgactgtgttctcttcattaatgctggtggtggtgcaatcgaaagctgtgatccctgtgtgaaggtttctggtgattcattctttgaaggaggggatgtgatagaaacaaatgagagcatagccgaaggtggtgattgtccatttatttatcactcagcaagatacggcagtttcagctacaagttcgacggtcttgcccccggagcttattttctagatctgcattttgctgaaattctatacacgtgtgggccaaaaggaattagcatgttcgatgtcctggtgcaggacgagaagatactgtctcagctcgatgtatatgctgtagttggagggaacagggcccttcaagtgcgtgatattagggttactgttgagatgaatggtgctgttatgatcaatttcaaaggagtaagaggaagtcccatggtttgtggtatctgtattcgcaaagcaccacttttatcagcaaactcggttacaaatggcaatgtcttgtgcaaaagatgttcatctgatattgatgtctcaactacacagactaggacaagtaaactgatctcaaagtatgagaagcagattgaggagctcaccagccaatgcactatgaagtccaatgagtgctatatggcatggtcttcagtagacactaccaacgtggagcttgggagactgaaaatagagcttcaccaaaagggtgctgaaatggagaatcttgtgcaaactcttggtagagagagcgaccaactaagaaatgtttctcgtaagtacaaaaatgacaagaaattgtgggttgctgctatatctaatttggaaaggaaaataaaggccatgaaacaagagcagcaattgttgtcccttgaagcacatgattgcgcgaatgcaattcctgatttgagcaagatgatcggggctgttaagggcctagttgcacagtgtgaagatttaaagttgaagtactatgaagagatggataagaggaagaaacttcataatattgttcaagagacaaaaggaaatatcagggttttttgtagatgccggcccttaagcaaagatgaggtgtcatcgggtcagaaatgtgtagtggattttgatggatccagtgatggtgacattgtaattacaaatggcggaactaaaaagacctttaagtttgatagagtcttcacgccaaaggatgatcaagatattgtgtatgccgatgcgtctccactagtcacatctgtcttagatggctacaatgtatgcatctttgcttacggacagacgggaacaggaaagacttttaccatggaagggactgagagtaataggggtgttaactacagaactctggaagaactgttcaatattgcagaggagaggaaagaaagcgtcacatatgacttatctgttagcgttcttgaggtttacaatgaacaaatcagagaccttcttgccacgtctccatctaaaaagctggagatcaagccaaacagtgaaggacaaaatcatgtccctgggttagtggaggccaaaattgagaacataaatgaggtttggaaagttttgcaaactggaagcaatgcaagggctgttggttcaaacaatgttaatgagcacagcagtcgctcccactgcatgctatgcatcacggtgagggctaagaaccagcttaatggagagtgtacaagtagtaagctttggcttgtagatttggctggaagtgagcgtttagccaagactgacgtgcaaggcgaacgacttaaggaagcacaaaatattaacagatcactttctgcattgggtgatgtcatttcagctcttgctacaaaaaacagccatataccctacagaaattctaaattgacacacttgctgcaagattctctaggaggagactcaaaagcattgatgtttgtgcaaattagcccatccgataatgatgtttcggaaacattgagttcactaaacttcgctagccgtgttcggcgtattgaattgggaccagcaaagaaacatgttgatactgctgaacttcaaaagaccaaacagacgcttgaaagagctaagcaagaactcaggcttaaggatgattctttgagaaagctagaagaaaacttacaaaatttggagagcaaagccaaagggaaagagcaactttgcaaaaacttgcaagagaaggtgaaagagctcgagggtcagttagattccaaggcacagtgtcaaataacatcagagaaacagcaacggcagctttctggaaaactaaaagagaaggaagaaatgtgtaatgtacttcagcagaagattgcggacttagaatgcaagcttagacaaccacaacaatcagaatctgaggttgcacttcttaagcaaacgatccaagagttggaggtcaagttgaaggaacaacaacatgaccgatcagccatggaattaagtatcaaagagatggagctaaggttcaaggaagaagaacaccagcgatctgttgcagaactaaagatcaaagagctggagctgaagctgaaggaacaggaacaccagcgatcagttgcggaactaaaggcaagagaaataggacatgagctgctggagactcagagaaccgagtcaatgcttcagattaagctaagagaacttgaaagcaaggcgaaagagcaggacacaaacatgacggcagtggtggagtcccgcgtcgtcgtcgcgactcctgtaaacgcgaaggtgatgagcgagaaggagaaccacgtcctgaggatctcaaactccctgaacaagcagctggctcacgtggagaacactcctgaggcccctgaagcggcttgcaacgagaggaagaggaaaggcgaggcgaggaacgcgtccatcggcggcggcgagcaagagaacactaacaacggtgggaggaagaggagcctgccagccgagcgcgaggcgaggctgaagaggaagtcgacggagcctcctccccaggtgaagaatctggtgaggtcgacggcgtcgtccagggcggctgccaaggcggcggcggcggcggctccgagctccagagccggcggcgccaagcagcaaccgggcggcgggaacaagaccagagggtgggttaggtagacgagatgatgatggtgattgcgtgtgttgtatgtgcaccggtggctggctcaacttttggctgagtcccactcactacattgctgcggtgatgaattagccagcttgtttacattgctcctgtgtctatgctgctgcattgtcgtttgtgatacttttgtaaaatttgaaagctatgttgccgcaacaggaaacaacagtgcgtgtgcgtcggggaaaacagaatttggctccacgcggcgagggtccgctacggtggcaaggcaacgcgcgcatggcatggagggccggagtcgggcctggtggtgacatgtttcaggctcagtgcacacctgtcccgtgcagtcgggcacccagcctggacgacggtctctatcacgcagacgtcagctaaacgctgcccagcccagccccagccccagctgctgcaggcagagacaaaagtcgggaacccacagcaaaccaaaccgtgtgctcctcttcgtttcggccgactcagccacgaaaagaaaaccccgggcgccacgcggaaaaccacgggacgacccgacgcctacctcccccgcgctccgctttattagcaaaagatcccagcagcagagcacaagctgccttgcgcttcggtgatcacgaggacaccaccaagacgacgcaggttcactggttcagcgaccggtttccgcgatgtgccgcgccacggcgatagagggcggcttcctccgcccgcccccgtcccggcgcctcgacatccgcgctttctacctccgcctctcctcctgctccgccacgacgcccgcggagctcacgctggcctaccacccggccatcgggggcgcggcgctgggactcaacggccgcgcgctcccgccagccgcgcccgccaaggtcacgctccgccgggtcgccgccgacgcgtacgcgagcgccgaccgcgtcgccgccgccgagggcgcgcggttcgaggtgctcgccgccgccgccggggaggaggtcgcggcggagggcgtcttctccgcgcggcgcgagggggggtggcgcgtggagtgccgccgggcgccggcctcgccggaggtgtgcgtcgcggaggtggtggtgctcgcggagggcggcgtgctgatgcgggacagggcccgcgcggccggccggggccggatgcggtgcggagccacccggctggaggggataccggaggaggacgccaccacgggcctcggcggctggtgccgctgcgagtgcgacgacgacgggtgggaggtggtcggggacgcggaggaggaggaggagcaggaggtcgagatggagacggtgcggtgggcgatggaggtgggcgtgtgggccgtgtgcctcggcgttggcctcctcgccacggccaggcgtttccggcggaagcgcgccttctggtgaccgccggcgccttctttgcttcggctgtcgtgtagtttcggaaattttgtacatgtttcgcggagatttcacgggcgtgcttttttctttgtttccagagatgatcaaatgaaccaagaccaattcgttccttttctccatcttctgcgtgtaccagccagtcccactgtctgacttgctcaatcgatcatcgctggttaattaaatagtacaaatgaaagctgccgtccccgtccacagtttcacattccaagctaaccccaaagaaaagtaccctctggtttcgacctcaaaggctcaaaccatccgagttttcataaaattcttgcaactacggcaaggacgattctcttccca

SEQ ID NO: 206800 - DNA, 1739 bp, Zea Mays
ctgaagggcataaatcacaatgttattcttttgacggacattttggtgaagtggatctgacctactgtaggggaaagagcaaagtacattatcttgtacaaatgtgcattacgctacctttatcataaaccaaatcatctctgtttctgggaacagcaaccagtaatttcccatgcaacctcttggttgatggatgttcttcctgttgggtcagaaagagaaagtcaaacagatagtcaccctttactcatggagcatgcgattggcatcccaaggcatgatgttgcttctacttcgacacctcatcgagacaataatgatggcatggatcaactgccccgtgattcagaaagttcttctggaacaactgatgcatcttactctccgaatgctcctctagcaaggagagatgataatcgccttcggcgtcagcaaagtctaaattctggcttctggatatcaattgaactagctgtaaatcttagccagattatagctgctatctgtgttctgtctgtgtcaaagaatgaacatcctcatgctccattgtttgagtgggtcattggttatacaataggctgcattgcaactcttcctcatctatactggcgctatctccagcgcaaccagctggccactgtgcaagggtcaaatcagaactacgttccagacaacagctttgagagtagttcttttactgggatttcgccccctcctgtgtctgaagctggtgttgtaactgtatcaaatggagtcttgagaaacaatgtggttatcacaaatccaagggcccaagcttttgctgatcacttcaagatggcgctggactgcttcttcgctgtatggtttgttgtgggaaatgtgtgggtgtttggtggacattcttccgcccatgacgcacccaacctgtacaggttgtgcatagccttcctcactttcagctgcattggctatgcgatgcccttcatcctctgcgcgctgatatgctgctgcttaccctgcataatctccctgatgggcttccgggaagatctggacgaaaacagaggtgctacttcggatgcgatcaacgccctgggcacatacaggttcaggtcaaagaagcctcgtaacggggaggcaaacgaaggtggcggtggagtctttgctcctggaacggacaaggaacgcgctgtttctgctgaagacgccgtttgctgtatctgcttggcgaggtacgtggataacgatgatctccggttgctcccttgcgggcacttcttccacaaggactgtgtcgacaaatggctcaagataaatgcgctgtgcccactctgcaaagctgagatcgacgtcgtcccgaggaccgctcctccagccattggctttgggcgccgcgacagccacaggagggtaggaaacgacattgaatcacaacggcttccatgatgtatagtgagacagcaacttgccttgggcgtgtgtgtggcttccagaagagcaccttgtaaattatatagtgagagagagaaagagattatgtcatggaccaacgagtccttacatgatccagcaagtaatcgcctgactgaaaaatgtgtcgttgttgtcaatatgtgtgaatgtgtccctgtagctgtagctttgttcactccaaaatgtaccttgtcatagctaccgtgacgtcaattaactaatctattttataaagtaaagtctaattttttatctgatcaaaactaatttattatataaagtat

SEQ ID NO: 206801 - DNA, 1859 bp, Zea Mays
tttgctttggaataccaaatgtgcgatacgtcatgtcctgcttgctggccgttgtctcattgtctggccgccggaccaaatccgaaaacccaccgagtaactgacaatctcgatccccgcagtcatcgcgggatcggcccgtcctcgccggcgactcattcccgcaactcacctgctctcaaccgcgaactcggcgccctgcacggcctccaagtcgcacgatgcggcggcgcccacatcatacgtggctgcgtctccgcctccgctttcgccgcgccgacgtgtcagcttcccgtccactacagagtccacattgtcctcctattacttgctccgccggcaactattagcccctccccagtcgccactaaatccgctgccgtttcttctcgagtgtgaccatggcggctcagggatccctcgtcatgtggagggcggtcttcgcagcgctgggcttgctcatggtggccacgctggtgtacaccttggccaccgacggctcgccgttccgccttgagctgtttacgccgtggatggtggcaacactggctgatttttatgttaatgttattgcaatctcggcttgggttatctacaaggaagcaaactgggttagttctgctgtgtgggtggttctgttgttttgctttggcagtgctgtcacttgcgcttatattgttaagaaacttcttgaagtaacatctgcagggtcatcccaagatcctcttgaccttctatttatcaggcaaggtaatctatcccaaagaaagtgctcttatgttgtaattggaagggttattttcagcattttggggatattcatggctgcggttgtcacatatactgtcatcactgatggactaccttttaggaaggaattgttgacaccgtggatggcggcaaccttaattgatttctacataaatgtctttgcgatatcggtctgggttgctcacaaggaatcatcatggatatcaactaccatttggattgtcttgctgatatgctttggaagcatcacaacatgcggctacattgtcatccaacttttcaaagtatcatatcaagatccaatctaccacgtgctattgaactcccacagcaagtatggaattccaacttcactgtgataattcatcttctatgatcctgcttggctggtaatattaaaatgttccttctatctatatgtaaggtaccacaattaaggggacaggaggatagcaattagacaagttgttttactttgaataaaataactcatgtgctgagttatctgctaaatgaactgtaacgtgaaatcctttattgtatttctgattgaaattgcttgaacaataatctcctttgttatggtttcattgcaaacaatttagaagatcgagtgatggtttaattttgaatgacggactagaagtcagcagctcagtctcagcattcagttgggcagattagctcagggccaagccctttgagaatggaccgaggccaagcctctttcagttgggcagatttagcaatgatcagatcagcaacaggaggatcaggaggtgagagccccctccagggggcaggaaaggaaacaaaaggttgttctgcctcgaacaaaaattcaagaaaccaaagatctctagagaaactcgtatggcactacaagcagtaatacgaacaccgagaacatgaggggtacatatgtattttcagtgaagaggagccacagtttactctgcagcagccccaaatccagtctaccctctaacagtctggttgtatgcactctcaccagcttgaggtgactaggtaaggagggatgtttggcaacaatgtttttcaaaattatagttttacaatactttgtc

SEQ ID NO: 206802 - DNA, 1812 bp, Zea Mays
tttgctttggaataccaaatgtgcgatacgtcatgtcctgcttgctggccgttgtctcattgtctggccgccggaccaaatccgaaaacccaccgagtaactgacaatctcgatccccgcagtcatcgcgggatcggcccgtcctcgccggcgactcattcccgcaactcacctgctctcaaccgcgaactcggcgccctgcacggcctccaagtcgcacgatgcggcggcgcccacatcatacgtggctgcgtctccgcctccgctttcgccgcgccgacgtgtcagcttcccgtccactacagagtccacattgtcctcctattacttgctccgccggcaactattagcccctccccagtcgccactaaatccgctgccgtttcttctcgagtgtgaccatggcggctcagggatccctcgtcatgtggagggcggtcttcgcagcgctgggcttgctcatggtggccacgctggtgtacaccttggccaccgacggctcgccgttccgccttgagctgtttacgccgtggatggtggcaacactggctgatttttatgttaatgttattgcaatctcggcttgggttatctacaaggaagcaaactgggttagttctgctgtgtgggtggttctgttgttttgctttggcagtgctgtcacttgcgcttatattgttaagaaacttcttgaagtaacatctgcagggtcatcccaagatcctcttgaccttctatttatcaggcaaggtaatctatcccaaagaaagtgctcttatgttgtaattggaagggttattttcagcattttggggatattcatggctgcggttgtcacatatactgtcatcactgatggactaccttttaggaaggaattgttgacaccgtggatggcggcaaccttaattgatttctacataaatgtctttgcgatatcggtctgggttgctcacaaggaatcatcatggatatcaactaccatttggattgtcttgctgatatgctttggaagcatcacaacatgcggctacattgtcatccaacttttcaaagtatcatatcaagatccaatctaccacgtgctattgaactcccacagcaacttggctggtaatattaaaatgttccttctatctatatgtaaggtaccacaattaaggggacaggaggatagcaattagacaagttgttttactttgaataaaataactcatgtgctgagttatctgctaaatgaactgtaacgtgaaatcctttattgtatttctgattgaaattgcttgaacaataatctcctttgttatggtttcattgcaaacaatttagaagatcgagtgatggtttaattttgaatgacggactagaagtcagcagctcagtctcagcattcagttgggcagattagctcagggccaagccctttgagaatggaccgaggccaagcctctttcagttgggcagatttagcaatgatcagatcagcaacaggaggatcaggaggtgagagccccctccagggggcaggaaaggaaacaaaaggttgttctgcctcgaacaaaaattcaagaaaccaaagatctctagagaaactcgtatggcactacaagcagtaatacgaacaccgagaacatgaggggtacatatgtattttcagtgaagaggagccacagtttactctgcagcagccccaaatccagtctaccctctaacagtctggttgtatgcactctcaccagcttgaggtgactaggtaaggagggatgtttggcaacaatgtttttcaaaattatagttttacaatactttgtc

SEQ ID NO: 206803 - DNA, 2128 bp, Zea Mays
aacggaacaatacttatctttttccctgcccccgcggccgccgccccgaacgcgcacgcctcctccgccgaagccaagcaaaccaccgacctcgacggagtcttctagccgtcaccctcgttgtcgccctgctcctcctctcagccggtccggccggcggcgtggcgtgaagatcaatccggacccggaacgagttccctcttttgctggttacataaactttggaataggaggatatcccatattgatctttgtgattgagattgattttttttctggaaaatggagatacaaacttcagggaagcccattgatgtgctgatggagaaggttcttagcatgaacattctgtcttctgattactttaaggagctctataggttgaaaacctatcatgaggtcatcgatgagatctacaacactgtcaaacatgtggagccttggatgactggcaattgcagaggcccctccactgcattctgtcttctatacaagttctttaccatgaagcttactgtcaaacagatgcacggtttgttgaagcatcctgactccccacacattagagctgtaagtttctgtttcctgcccttctgtttgctgatgctgaatgtcttgcttcatggccctgtatctattcattaggcatgaggttagtgtatgaatctatatgtttattgggatgattataaaacttatttcggaagtattttttgcaatgaaaaatcttacattccttgcgaatcacttgtacataattttgtgcttacattttggttatagccactaacggtccgacaacttgtttctttggatggacttgtggctgaatttcttggtcctaggacacggggatgacaaagtttgcaagaagttcatagtgtaccagtctgtgctttggagttattggtttcttgtatcttcggtatgttgcagacccaaaggttctttggatgtggtatgagccctatttgagggatgatgaggagttctcccccggatctaatggccgcaagacaaccatgggtgtttatgtgcgtgatcttatacttggacagtactactttgatagtcttctaccaagaattcctctcccagtaactcgtcagattacagccaatcttgaaaagatgaaattgcccactaagctttctggggcaactggagactccagtcgtcagggatcagaagatactgcacgccgtcctccttcagtgaaagcttctctgtcagtttcctttggacagcgtgctccacatcgggcttccaccagggattcatctccagttcgtcgaacagtcacccgtgatggtcatcgaagttcatactcaccatctcgtcgtagtggtagccgtgagggtcctgatcatgaccgttctgaccgggaactggatcattctagtcgtgaccgtgaaagagcccgggatcgttcaaaccgggatcggtatcattcaagccgagaccttgaccgtgacaaggatgccagagattatcatcggcatgagcgtgatagcagggatcgtgagtactacaggtccaggcattcagaagaaagacgggacgacagaagagatcatgaaagtagcaggcacaggcgctctagctctcgccacaggagcaggagtaggagccgaagcaggagcaggagtaggagcaggagaagccgcagccgaagcacgagcaggaggagcctgaatgagcagcgatccagcccattcagggatgcaaataaagagaaggcagccaccgtgtcgagcaacctagcaaagctgaaggacttgtacggtgacataactgcaaagaaggaagacagtgatgctgaaaagcttcaccgtgattcatgcgctgaggaggtcatcaggctgggaggccctcgatggaggaagtcgcccgcatgattcaaggcacttttggacatccttgtctttgcagtcagcacgggaattgaatcgacatgcagttatggcaaggctgcattgctgaatcgaggtcgcaactcataatgccttatataagtgttggtaactagttcagacaaacaacttgttgggaaaataatgaaacatatttgataagggtacgattggaaaatagcctttatctaggtatgtgagatgctgttcaaaac

SEQ ID NO: 206804 - DNA, 1793 bp, Zea Mays
aacggaacaatacttatctttttccctgcccccgcggccgccgccccgaacgcgcacgcctcctccgccgaagccaagcaaaccaccgacctcgacggagtcttctagccgtcaccctcgttgtcgccctgctcctcctctcagccggtccggccggcggcgtggcgtgaagatcaatccggacccggaacgagttccctcttttgctggttacataaactttggaataggaggatatcccatattgatctttgtgattgagattgattttttttctggaaaatggagatacaaacttcagggaagcccattgatgtgctgatggagaaggttcttagcatgaacattctgtcttctgattactttaaggagctctataggttgaaaacctatcatgaggtcatcgatgagatctacaacactgtcaaacatgtggagccttggatgactggcaattgcagaggcccctccactgcattctgtcttctatacaagttctttaccatgaagcttactgtcaaacagatgcacggtttgttgaagcatcctgactccccacacattagagctattggtttcttgtatcttcggtatgttgcagacccaaaggttctttggatgtggtatgagccctatttgagggatgatgaggagttctcccccggatctaatggccgcaagacaaccatgggtgtttatgtgcgtgatcttatacttggacagtactactttgatagtcttctaccaagaattcctctcccagtaactcgtcagattacagccaatcttgaaaagatgaaattgcccactaagctttctggggcaactggagactccagtcgtcagggatcagaagatactgcacgccgtcctccttcagtgaaagcttctctgtcagtttcctttggacagcgtgctccacatcgggcttccaccagggattcatctccagttcgtcgaacagtcacccgtgatggtcatcgaagttcatactcaccatctcgtcgtagtggtagccgtgagggtcctgatcatgaccgttctgaccgggaactggatcattctagtcgtgaccgtgaaagagcccgggatcgttcaaaccgggatcggtatcattcaagccgagaccttgaccgtgacaaggatgccagagattatcatcggcatgagcgtgatagcagggatcgtgagtactacaggtccaggcattcagaagaaagacgggacgacagaagagatcatgaaagtagcaggcacaggcgctctagctctcgccacaggagcaggagtaggagccgaagcaggagcaggagtaggagcaggagaagccgcagccgaagcacgagcaggaggagcctgaatgagcagcgatccagcccattcagggatgcaaataaagagaaggcagccaccgtgtcgagcaacctagcaaagctgaaggacttgtacggtgacataactgcaaagaaggaagacagtgatgctgaaaagcttcaccgtgattcatgcgctgaggaggtcatcaggctgggaggccctcgatggaggaagtcgcccgcatgattcaaggcacttttggacatccttgtctttgcagtcagcacgggaattgaatcgacatgcagttatggcaaggctgcattgctgaatcgaggtcgcaactcataatgccttatataagtgttggtaactagttcagacaaacaacttgttgggaaaataatgaaacatatttgataagggtacgattggaaaatagcctttatctaggtatgtgagatgctgttcaaaac

SEQ ID NO: 206805 - DNA, 1789 bp, Zea Mays
aacggaacaatacttatctttttccctgcccccgcggccgccgccccgaacgcgcacgcctcctccgccgaagccaagcaaaccaccgacctcgacggagtcttctagccgtcaccctcgttgtcgccctgctcctcctctcagccggtccggccggcggcgtggcgtgaagatcaatccggacccggaacgagttccctcttttgctggttacataaactttggaataggaggatatcccatattgatctttgtgattgagattgattttttttctggaaaatggagatacaaacttcagggaagcccattgatgtgctgatggagaaggttcttagcatgaacattctgtcttctgattactttaaggagctctataggttgaaaacctatcatgaggtcatcgatgagatctacaacactgtcaaacatgtggagccttggatgactggcaattgcagaggcccctccactgcattctgtcttctatacaagttctttaccatgaagcttactgtcaaacagatgcacggtttgttgaagcatcctgactccccacacattagagctattggtttcttgtatcttcggtatgttgcagacccaaaggttctttggatgtggtatgagccctatttgagggatgatgaggagttctcccccggatctaatggccgcaagacaaccatgggtgtttatgtgcgtgatcttatacttggacagtactactttgatagtcttctaccaagaattcctctcccagtaactcgtcagattacagccaatcttgaaaagatgaaattgcccactaagctttctggggcaactggagactccagtcgtcagggatcagaagatactgcacgccgtcctccttcagtgaaagcttctctgtcagtttcctttggacagcgtgctccacatcgggcttccaccagggattcatctccagttcgtcgaacagtcacccgtgatggtcatcgaagttcatactcaccatctcgtcgtagtggtagccgtgagggtcctgatcatgaccgttctgaccgggaactggatcattctagtcgtgaccgtgaaagagcccgggatcgttcaaaccgggatcggtatcattcaagccgagaccttgaccgtgacaaggatgccagagattatcatcggcatgagcgtgatagcagggatcgtgagtactacaggtccaggcattcagaagaaagacgggacgacagaagagatcatgaaagtagcaggcacaggcgctctagctctcgccacaggagcaggagtaggagccgaagcaggagcaggagtaggagcaggagaagccgcagccgaagcacgagcaggaggagcctgaatgagcagcgatccagcccattcagggatgcaaataaagagaaggcagccaccgtgtcgagcaacctagcaaagctgaaggacttgtacggtgacataactgcaaagaaggaagacagtgatgctgaaaagcttcaccgtgattcatgcgctgaggaggtcatcaggctgggaggccctcgatggagtcgcccgcatgattcaaggcacttttggacatccttgtctttgcagtcagcacgggaattgaatcgacatgcagttatggcaaggctgcattgctgaatcgaggtcgcaactcataatgccttatataagtgttggtaactagttcagacaaacaacttgttgggaaaataatgaaacatatttgataagggtacgattggaaaatagcctttatctaggtatgtgagatgctgttcaaaac

SEQ ID NO: 206806 - DNA, 1883 bp, Zea Mays
caggcacggccgcctcgcatcgcggcccttaacggaacaatacttatctttttccctgcccccgcggccgccgccccgaacgcgcacgcctcctccgccgaagccaagcaaaccaccgacctcgacggagtcttctagccgtcaccctcgttgtcgccctgctcctcctctcagccggtccggccggcggcgtggcgtgaagatcaatccggacccggaacgagttccctcttttgctggttacataaactttggaataggaggatatcccatattgatctttgtgattgagattgattttttttctggaaaatggagatacaaacttcagggaagcccattgatgtgctgatggagaaggttcttagcatgaacattctgtcttctgattactttaaggagctctataggttgaaaacctatcatgaggtcatcgatgagatctacaacactgtcaaacatgtggagccttggatgactggcaattgcagaggcccctccactgcattctgtcttctatacaagttctttaccatgaagcttactgtcaaacagatgcacggtttgttgaagcatcctgactccccacacattagagctgacacggggatgacaaagtttgcaagaagttcatagtgtaccagtctgtgctttggagttattggtttcttgtatcttcggtatgttgcagacccaaaggttctttggatgtggtatgagccctatttgagggatgatgaggagttctcccccggatctaatggccgcaagacaaccatgggtgtttatgtgcgtgatcttatacttggacagtactactttgatagtcttctaccaagaattcctctcccagtaactcgtcagattacagccaatcttgaaaagatgaaattgcccactaagctttctggggcaactggagactccagtcgtcagggatcagaagatactgcacgccgtcctccttcagtgaaagcttctctgtcagtttcctttggacagcgtgctccacatcgggcttccaccagggattcatctccagttcgtcgaacagtcacccgtgatggtcatcgaagttcatactcaccatctcgtcgtagtggtagccgtgagggtcctgatcatgaccgttctgaccgggaactggatcattctagtcgtgaccgtgaaagagcccgggatcgttcaaaccgggatcggtatcattcaagccgagaccttgaccgtgacaaggatgccagagattatcatcggcatgagcgtgatagcagggatcgtgagtactacaggtccaggcattcagaagaaagacgggacgacagaagagatcatgaaagtagcaggcacaggcgctctagctctcgccacaggagcaggagtaggagccgaagcaggagcaggagtaggagcaggagaagccgcagccgaagcacgagcaggaggagcctgaatgagcagcgatccagcccattcagggatgcaaataaagagaaggcagccaccgtgtcgagcaacctagcaaagctgaaggacttgtacggtgacataactgcaaagaaggaagacagtgatgctgaaaagcttcaccgtgattcatgcgctgaggaggtcatcaggctgggaggccctcgatggaggaagtcgcccgcatgattcaaggcacttttggacatccttgtctttgcagtcagcacgggaattgaatcgacatgcagttatggcaaggctgcattgctgaatcgaggtcgcaactcataatgccttatataagtgttggtaactagttcagacaaacaacttgttgggaaaataatgaaacatatttgataagggtacgattggaaaatagcctttatctaggtatgtgagatgctgttcaaaac

SEQ ID NO: 206807 - DNA, 2040 bp, Zea Mays
aacggaacaatacttatctttttccctgcccccgcggccgccgccccgaacgcgcacgcctcctccgccgaagccaagcaaaccaccgacctcgacggagtcttctagccgtcaccctcgttgtcgccctgctcctcctctcagccggtccggccggcggcgtggcgtgaagatcaatccggacccggaacgagttccctcttttgctggttacataaactttggaataggaggatatcccatattgatctttgtgattgagattgattttttttctggaaaatggagatacaaacttcagggaagcccattgatgtgctgatggagaaggttcttagcatgaacattctgtcttctgattactttaaggagctctataggttgaaaacctatcatgaggtcatcgatgagatctacaacactgtcaaacatgtggagccttggatgactggcaattgcagaggcccctccactgcattctgtcttctatacaagttctttaccatgaagcttactgtcaaacagatgcacggtttgttgaagcatcctgactccccacacattagagctccactaacggtccgacaacttgtttctttggatggacttgtggctgaatttcttggtcctaggacacggggatgacaaagtttgcaagaagttcatagtgtaccagtctgtgctttggagttgtgagcattttgttttttttgtctttactaagcctgttaaatactaaaatattttgtgtcgaatgactgttttgcgctatttggtgcagattggtttcttgtatcttcggtatgttgcagacccaaaggttctttggatgtggtatgagccctatttgagggatgatgaggagttctcccccggatctaatggccgcaagacaaccatgggtgtttatgtgcgtgatcttatacttggacagtactactttgatagtcttctaccaagaattcctctcccagtaactcgtcagattacagccaatcttgaaaagatgaaattgcccactaagctttctggggcaactggagactccagtcgtcagggatcagaagatactgcacgccgtcctccttcagtgaaagcttctctgtcagtttcctttggacagcgtgctccacatcgggcttccaccagggattcatctccagttcgtcgaacagtcacccgtgatggtcatcgaagttcatactcaccatctcgtcgtagtggtagccgtgagggtcctgatcatgaccgttctgaccgggaactggatcattctagtcgtgaccgtgaaagagcccgggatcgttcaaaccgggatcggtatcattcaagccgagaccttgaccgtgacaaggatgccagagattatcatcggcatgagcgtgatagcagggatcgtgagtactacaggtccaggcattcagaagaaagacgggacgacagaagagatcatgaaagtagcaggcacaggcgctctagctctcgccacaggagcaggagtaggagccgaagcaggagcaggagtaggagcaggagaagccgcagccgaagcacgagcaggaggagcctgaatgagcagcgatccagcccattcagggatgcaaataaagagaaggcagccaccgtgtcgagcaacctagcaaagctgaaggacttgtacggtgacataactgcaaagaaggaagacagtgatgctgaaaagcttcaccgtgattcatgcgctgaggaggtcatcaggctgggaggccctcgatggaggtaactttgagacctgtagaactctggtttccgctttgttctgccagcctctctgtaggccttcttgaaaatgctctttatgttcccaaacttgatagagtcgactggtacttcggtatcttgacttgttgtcgcctgacatttgccattaatgtatgttgtttggtatgttattcctaagaattcctatgacattggaacgtactgtataaaccgtggtatccgagcttcatgtttgcttgatgcttatgcaaattgaaggttgaataagtttcagtttca

SEQ ID NO: 206808 - DNA, 2740 bp, Zea Mays
ggcgcggccccggcgtttatagttattggactggctcctgggaaagggacattttgcactaatgagaagagctgagctaaagacgttagttgatatgcatggcaatgaggctggaaaaggtggagagctgactcatgatgaaaccactatcattacaggagctctggagctgactcaaaagattgcaaaagatgccatgactgctatatctgaaacattctcacttgacataaatgctaagctggacttacacacaatgggcatgataatgactagagggcatagtcgtgttcctatatactctgggatgccaagcaatattatcggccttatattggtaaaaaacttgattacttgccgcgctgaagatgaagtgcccattcgtaatcttactatcagaaaaattccaagggtggctgatgatcttcctctctatgacattctaaatgagttccagaaaggtcacagccacatggctgtggtaattaaacgaacaaaggaagcaggagtatccactgaaaagcaaaagagcacaactgccgattataaaataaaccccaaagatgctcgtgctgatggctcatccccttcttatggtagcactgccgtaagtcgtagaattaacatagagaagcatggagatgggcgcccatacaataagaaatcagaaaggaagcgggaaaacattcttgattttaacaacgatccacttccaagctattcaatggatgaggaggcagtgggaataatcacaatggaagatgtcatggaagaacttctacaggaagaaatctatgatgaaacagatgagtatgttgatgtacataacaagatcaggataaacatgttgactccaggcaaatcgctgtcacctgctatatctcctggtggtgggcccttatctcaggggtttcgaaggactcctatggcatctccgttctcaccataccaccatggtagttctgtcttgcgttccccggcttcgaaccatggtcagtcacctgggactttaccgacaatactgtcccctggaagatcacctactgcacagacacctgggcaaagttcaccaaacggaagtcaggtttcaataaactccaacggtcaacataaaaaggacggtgagagctaacatcccagaagattggttctcggatgaaggtctcgtctcaagacggcatgcgtgatcaaattatgacattgctagcgtaggattaagctgcgagtataagtagcacagctctcttggcccatagttttgatcgcttgcctgtacatatatgcttcagcatccggacctttagtatgtcctaatcctcgctctgtattgtagaggtcacatcttatatagttataatatatctggtgagggggaaaagagctaagcgttggactgaatatattaaagaaaaaatcaagctgattttgcgacttgtgatcgatcactgttttcatggactcggtggagacgataacaactcagatgcatatcaggtcaagccgatggttgctgtcagttcagcagcatcaatagagaatgatcagagtgttgcagtcacccatcttctaggttcgtagcgttgtatacccggccgtatgcttgcgacccaaggcacgcacgcggcgatgctcgcactcccgctgcctctgcctggcttctagattccagccgtgccccctgcccccacgcagacgcagcgcactcgtccgttggttgtttcgtgagccgaagatccaggcctggcctgccgccctgccgtgtatcgctggcggtgcgtccctgcgtgcgtggcctcccgcgccaccgccacgttccaagtcgccggctcgcaggtcgcacccatccactgatcaccgtcgaggtgggggtgaccgagaccgacggaggactaggcatatgctgcaggcgagctcggatcggccagcgggcctgctgtgggtgcccgggatgagcccgtgtccgacgacgggcgcggggccgtcggagagggcgcaggagatcgcgcggcggcgggaggagatgctgcacgacctccccgagtccgagtacgagctctcgctcaccgacctcgtcgagaaggccgcgggcgggggcgactgtggcgaagccgcgcccgcgcccatggcagaggggaaggacccgggcgcctcacggccggcgcccggcgggcagctgccgcccgcggcagcgaggagggcgtcggcgcggcggcgggacagcgggggcagcttccgcttccgcagcagcagcgacggcgtcctgctcaacttctacatgccgcggtcgctcacccggagcttcaccgcgccgcgccccgcccggacgccgtcgtccgcatccggctgccggagccccaccatcgcatccgactgcagcaagagggagagggactcggacgccgagaccgtcaagtgctggtcgttgctgtgggatcggcggtggcgcaagtccagccggcgggacccgggcgcgccgcccagcgagagcgagtccgccatccgcgccgcgtcggtcgtcaaagcgaagcggccaagcactccgctccgccggcccatatctgagccgactttttttcgtccgtctcctgccccgcctgccggataagttgtcgcatccagttttgtatgttaataaaaactaggtacctagcgctcatgtatccaatcacacctatagtattactatataatattaaattaaaataatttatcatattgatattcctgagttttgctggtg

SEQ ID NO: 206809 - DNA, 1537 bp, Zea Mays
ctccacttaacacacatcgtatttgtggtttgattgaactgatgtgctgacttgtcaactttctcaaaatccatgttgaaaattaagataccagaaaacaaattgtcttggatggcccacggagttgtggtaaaagcattgcacttgcgatgcttgtccattgggcgcgtactgaaggatggctggtattttatgttccacaagggaaggattggactcatggaggattcttttatagaaacacatacagtgattttttcgatacaccagtacaggctgccaatatcttgcagaattttttgaagtacaatgaaacacgtttacaacagttaccatgccaaatttttgagcgtattcccctgggagaaggtgctggtgttggaatgatgaaaggggttgacacaatggaaatgcctgaagggtccacattatatgatctcattcaaactgggataactcaaacacatgcttcagttggtgttatggttcgcttaaggaaggagctgtcccttgttaaagacgtgcctgtactatttgccattgatcagtacaatagctggttcacattcagtgacttccaggaacctgtaactgtccgatcctgtcgatcgatccatgcaaaagagcttacaatggtcaatgcttatagatcaatgctgcacaatgatatgatggtgggggctttttcacactcaacagcagttggcaaactacggcaggagctgccagatgttccttctgatgctcgtttgatctttccacgttacaccttagatgaagctgagactgcatgtcactattatatgaggcaaaagatcattcggcgcgagaatttttcagaagagaaatggaaaaagatatactacttatcaaatggaaatggtgcagagatgagatggcttgctgccttcgtttgagtttctgatacctggattgtactcagttttggtggtggtgtagaaaggttgccacctctgtttcagcattccgttacacaccacagttcattgttgtgtacttgtagtccgtctcttgacatctctagaagaaagtttggcgtcaacatcatttgtgctgagtagaacttgaggagataaggcataagtatgtggctcagttacatgattatatccttaggcttctttcagttctcgctcagatgctagatacaaaataatgtagcattgttattggagaagttttcacatgttttggctccgccgagcacgatgagtatgatgagttgatgccaatctactcagcatgcttgctactatgttgctgaattgagctccgttgagtattttttttaaattactgtacgaatcgaacaattatttgagttgggaacaatattcttctttgcggaactcaaaggttacgaggcatatcctcagtttgaatagtttagcttacccttgtttcctcagtttgaatagtttagcttacccttgtttctcggagagatgcaacatattgatttagctacattgtctattccggtgtactcctatgccgtttatcgattttccttctg

SEQ ID NO: 206810 - DNA, 1020 bp, Zea Mays
accgaacagcctcgcgtgtggcgccaccccgcaggctgtgcacacgacacgatcagtgcgcagcgaactgcgcatggcggtgcacccaatccacctgttcccgtgacaagcagcactcaagacacacacgcgcgcgaacacgaacagggacacgagacagcggcggccatggcgagaggcggcggcgatcggagtcgggaggatgaccccttctccgacggcggcaccaccggaaccgactcggacgagtcctctccgcgtggggtgggggcccgcggccccggctccacctccaacccgatcctgacacgcctcgcggtgtcgcggaacccgagcccgctggctgcggccaccgcggccccaggggtctgcctcctccgcttcgcctgggagtccgccgcgggctccctcgtcggcgccgccgttggctacgggtttatggctcaccgatgcgaggtaacgtgtggctgtggcgccatttcgatgacctcaggtaaaggtttggttacgatgaaggggattaaaggctcatttgctgatgctgcgtcatctgctaagatatttgctgttcttgctggtgttcaaagtttagtagcctgctctttgagaaaactacgtggaaaagatgatggaatcaatgcaggagtcgcaggctgttgcactggccttgctctgagctttccaggtgcaccacaaactctgattcagagctgcctgacctttgggactttctcttacatcattgagaagctaaacaagcagcaacctgcgctggcgctcccacctgcgacaggtgtgatggatccgaaggctggacaaagcgttcttcctcccttcacacttcctcctctggatgccatggacgaattttgtagtgttttggtagtgttgatgattctaccttgacatatccaacacaaggcgagcagcttgtcctttgttcaactgattggatcttcggagttttacccacagaccatgccccgtaacaaggaagaacatgcaccttgattcttcaga

SEQ ID NO: 206811 - DNA, 1587 bp, Zea Mays
  misc_feature (1586)..(1587): n is a, c, g, or t
aagcctagaatcccagatttgcacacttttattgctttctaaaagaaaaatagtacaggtacaacaataatgggtgtaatcagcacatttttcatgcttcccaaaatttgcactaacaaagtaacaagtagtgaatagagatacaaacataccagaaactatgagtggaagttgtaaactataagctgtgggcagaagtcttacacaaggtcttgctctaacttttctgctattgtagatcatggtcaaaagtggatcttcaaacaatcagaagattactcggttcactgtggtatgcaagctagttgggcatcagtcctaatgattcatatgggactcaaaccattggaagacttcagtattcttcaggctggtgaactcatgtactttttttggaagatggatccagaagactctagtgactttgaagaggaggacgacgaagaagaagatgatgacttaatgatattcatattgccagcgctatatctagcatctactggaattggaactctggatcaaacatctatggttagtgatggtactgcgattgaaactccaagtcaagtatcaaagtttaacgatgcagaaaggatttgtaaagtgcttgaagatgacagaggccaaggctatgataaacttcgtgtggagccccatgttctcctcgaactttcacgctatctgaggtcaaatgatcttttgaaaaataccagaggtgtttctgtagaagagaaaattggcatgtttatttacatgctatcccgaaatgctagttttcagaaactaagtgacagattcaagtacagtacagaaactattcacaggcatatcaaagcatgctttgatgcagtcacaccaatgactggtgaattcgtcaggccaccttcaattcaagcccaccggaaaatatcatctgatacacgttatgggccttactttgagaactgtattggagcaattgatggaatccatgtccctatgacaatatcggacagtgaagcagctccataccgaaatagacaagaatccctttcccaaaacgtgatgcttgcttgtgattttgatttgaattttgtccatgtttcttgtagccgagaagggtctgcatctgacgcagcagtcttatactctgctatagaatatggatttgaagtcccaagaggaaagttctacctggttgatgggggttatgcgaacacgccatcttttcttgctccttttagtgaagtttcttaccatgctgaagagcaagatgagagcaatttccaaccaatagactatagggagcttttcaatcttcgccatgcacagctgtacagacatatcaagcgtgctgtaggcctactgaagatgcggtttccaattctaaatgtcgcaacatcataccgaaaagacactcaactgaaaattccttcagcggcagttgttatgcataacataattcagagacaaggagctttcaacagtgaatgcgacatgggtaatgctttgagagatggtattgcactgaggatgtgggcagattatgaaagtagtatgtatgtctgatttcagaatagaacaggctggccttaaagaatattgann

SEQ ID NO: 206812 - DNA, 1448 bp, Zea Mays
  misc_feature (1447)..(1448): n is a, c, g, or t
tcatcacccggcttggcaagaggatcagtgctggctgctgctgcttcattcatcctcgtcttgtgtttgttgcaagtcgcaaaggtttgcgccgcctgccgggcgtcgtcggctcatcgccgtcggcggtaggcttctgcctcccccgtctcgatacctctccttcggcgaagactcgcagggaggtccccacttcatcacctccgtttcctaccggaaaaggcaacttctgtcggccatctcagtactttttttggaagatggatccagaagactctagtgactttgaagaggaggacgacgaagaagaagatgatgacttaatgatattcatattgccagcgctatatctagcatctactggaattggaactctggatcaaacatctatggttagtgatggtactgcgattgaaactccaagtcaagtatcaaagtttaacgatgcagaaaggatttgtaaagtgcttgaagatgacagaggccaaggctatgataaacttcgtgtggagccccatgttctcctcgaactttcacgctatctgaggtcaaatgatcttttgaaaaataccagaggtgtttctgtagaagagaaaattggcatgtttatttacatgctatcccgaaatgctagttttcagaaactaagtgacagattcaagtacagtacagaaactattcacaggcatatcaaagcatgctttgatgcagtcacaccaatgactggtgaattcgtcaggccaccttcaattcaagcccaccggaaaatatcatctgatacacgttatgggccttactttgagaactgtattggagcaattgatggaatccatgtccctatgacaatatcggacagtgaagcagctccataccgaaatagacaagaatccctttcccaaaacgtgatgcttgcttgtgattttgatttgaattttgtccatgtttcttgtagccgagaagggtctgcatctgacgcagcagtcttatactctgctatagaatatggatttgaagtcccaagaggaaagttctacctggttgatgggggttatgcgaacacgccatcttttcttgctccttttagtgaagtttcttaccatgctgaagagcaagatgagagcaatttccaaccaatagactatagggagcttttcaatcttcgccatgcacagctgtacagacatatcaagcgtgctgtaggcctactgaagatgcggtttccaattctaaatgtcgcaacatcataccgaaaagacactcaactgaaaattccttcagcggcagttgttatgcataacataattcagagacaaggagctttcaacagtgaatgcgacatgggtaatgctttgagagatggtattgcactgaggatgtgggcagattatgaaagtagtatgtatgtctgatttcagaatagaacaggctggccttaaagaatattgann

SEQ ID NO: 206813 - DNA, 1328 bp, Zea Mays
tcatcacccggcttggcaagaggatcagtgctggctgctgctgcttcattcatcctcgtcttgtgtttgttgcaagtcgcaaaggtttgcgccgcctgccgggcgtcgtcggctcatcgccgtcggcggtaggcttctgcctcccccgtctcgatacctctccttcggcgaagactcgcagggaggtccccacttcatcacctccgtttcctaccggaaaaggcaacttctgtcggccatctcagtactttttttggaagatggatccagaagactctagtgactttgaagaggaggacgacgaagaagaagatgatgacttaatgatattcatattgccagcgctatatctagcatctactggaattggaactctggatcaaacatctatggttagtgatggtactgcgattgaaactccaagtcaagtatcaaagtttaacgatgcagaaaggatttgtaaagtgcttgaagatgacagaggccaaggctatgataaacttcgtgtggagccccatgttctcctcgaactttcacgctatctgaggtcaaatgatcttttgaaaaataccagaggtgtttctgtagaagagaaaattggcatgtttatttacatgctatcccgaaatgctagttttcagaaactaagtgacagattcaagtacagtacagaaactattcacaggcatatcaaagcatgctttgatgcagtcacaccaatgactggtgaattcgtcaggccaccttcaattcaagcccaccggaaaatatcatctgatacacgttatgggccttactttgagaactgtattggagcaattgatggaatccatgtccctatgacaatatcggacagtgaagcagctccataccgaaatagacaagaatccctttcccaaaacgtgatgcttgcttgtgattttgatttgaattttgtccatgtttcttgtagccgagaagggtctgcatctgacgcagcagtcttatactctgctatagaatatggatttgaagtcccaagaggaaagttctacctggttgatgggggttatgcgaacacgccatcttttcttgctccttttagtgaagtttcttaccatgctgaagagcaagatgagagcaatttccaaccaatagactatagggagcttttcaatcttcgccatgcacagctgtacagacatatcaagcgtgctgtaggcctactgaagatgcggtttccaattctaaatgtcgcaacatcataccgaaaagacactcaactgaaaattccttcagcggcagttgttatgcataacataattcagagacaaggaggagaagcttat

SEQ ID NO: 206814 - DNA, 1441 bp, Zea Mays
gggggggaggacagtagtagtggcccatcttcgtcgcagcgccggcgctccatctttcgctccatcccttactcgcgctcggcacaccggctctcagggcggcggcgctcaggctcgggctctcaagcgacggcgtcaacggcttcccctcccgcctccggtcctccgcacaccggccggtgaccctgctgaacagtcttatggcggcgagcgcgggtgagagccagggggtggaaagactcctctcctatgctgaagatctcgtggctgtcctttgcgtcagcaccgactgcgacgacaatgcacaggtcggtgccggagtgcagaggctgctgtctgcctgtcgatccgagtctgacgatctcgagatgcagctcaaagagtatcaggaaaaaatacactcctgcaaagaaaagattgacaaagcaaaggctgaaaccattactgacgatgaactcaatgcactacaaagcaagatggaagaaaaactgcaggaagagaagcagcttcgccaagagttaagagtgttacatgatgagcttgatgacctagaaagccaaagactttctataaaagaaagaaaggacgctgtcaagaagaaaaagaaagacacacagaaagcagaacgtacgctttccatgtgtctgtcggttacaaatatcatcccaaatttggaagaccaggataaggtttcaggatgtatcctttgaatctgttaccgtttcccctatattataggagaaaaaatatgtatgggttagtttgacaactccattttttcaagagatttctattttcctaaattagtaagggaaattagttaattttcccttatgaaaatgggaatcctttggaaaaatagagttgtcaaactagccctaaacgtttcaaaaaggaagtacatactatttgctgcttagtggttgtgtttgtactcaatatcatcgtttcgtacaaagatatggatgtgtggaagtccttagctttgatcagatattgtcgaccagaacaggaagaagatagagaagtttgaattcgagaacaccacgccaccagttgagatatgcgacgagctctggaagaagatttagcgtgtttcagatcattcttgttgtaaggcggcggaaacctgtgcctgtagattgccgcggtgtggttgtcctcccaggatgcagtttgccatgttgtttgtatcgttagttcatgacgctgtactgttttgtaaggcggcggaaacctgtgtttgtatcgttagtttgccatgtcagattagctactacttcttgtgttttaaattattccaaattataagttattctaattttcctgagagtcaaaccatcttaggtttaaagcatctcaagtttaaccaaatttatatagaaaattgccaaaaaagcatgacatcaaattggtatattacaaaaatataattaataaa

SEQ ID NO: 206815 - DNA, 2328 bp, Zea Mays
catcaactcataaacggttaaatccgccagggggaaatctccatcaagtggctcgtgctaattatgcgatcttcatgggctgactcagttgcgaacgccgaggaatcggcgcccgcgactgctgctgctaatggctctgttgcaactcatagcacctcgcgccctacgcgcagctcctacgtgcctccacatcttcgtggccgctcagctggtgctgctgttgaagctcaagcaggcttagtagcaccagcacaaggtggaccactgccattggctgctgcacaaccttctggtcagggtgctgctgttggtggccctcgctgggctggcattgtgaatggtggtggtggtggtggcagcattggtgctcctcgccagggccatggtggcggaggcgggggccgtggtgcttggaactcccgtcctggtggttgggaccgcagagaccgggagccagatccgtttgcgaaagccgaggctgaagaaattgatttcgacggccaggagaatactggcatcaattttgatgcctatgaagacatccctgttgagaccagtggccatgatgtgcctgcaccagtcaacacatttgcagagattgatttgggtgatgcattgaatgacaatatccggaggtgcaagtatgtgaaaccaacaccagtgcagcgttacgccatcccaatctccattgctgggcgggatctcatggcctgcgcacagactggatccggaaaaaccgccgcattctgttttccaatcatcagtgggatcttgaagtcaccaaagccacaccagaggtcacggagtacaaggaccgcttgccctctagctctgatcttatcacccactcgtgagctttcagtccaaatccatgaagaagcaaggaagtttgcataccagactggtgtcagagttgtggttgcatatggtggcgcaccaataactaaccagctgagggagttagagagaggtgtggaaatcctggtggcaactcctggtcgcttgatggatctgttggagagggctagagtctcacttcaaatgataaagtatttagctcttgatgaagctgatcggatgcttgatatgggttttgagccacagatacgtaaaattgttgagggcatggacatgcctcaacgtggtgagaggcagacaatgttgttcagtgcaacattcccaaaagagatacagaggatggccgcagatttccttgctgattacatctttcttgctgttgggagagttggttcaagcaccgatttgattgttcagagggtggagtttgtcctcgattcagacaaacgaagctacctcatggatcttctgcatgcacaaaaggctaatggcacacatggaaagcacgctcttacattggtctttgtggagacaaagaggggggctgatgccctggaggactggctttttagaaatggatttcctgcaactagcattcatggagacaggacacaacaggaaagggagcatgcccttaggtccttcaagagcggagcaactcccatccttgtggcgactgatgttgctgctcgtggtcttgacataccacatgttgcccatgtgattaattttgacctccctaatgatatagatgactatgttcatcggattggaaggactggacgtgctgggaaatctggtcttgcgactgcattcttcaacgagagcaacactacgcttgcaaggccgttgagtgatctcatgaaagaggccaaccaggaggttcctaagtggcttgagggatacgctgcccgatcagcctacggaggtggaggtggtagaaaccgcagacaaggtagcagtgccagatttggtggccgtgatttccggcgagataggggcagtggtggaggatatggtggtggttcctacggaggaggtggtggtggtggatatgggggatcatcaggatacggtggtgcctatggtggcggtggcagcggcggcggcggctatggtggtggtcagagtacgagttcttgggactgaactgaactctgattagaagtgaaaaatgggccaaccttttgggcgtgaaaaatgggtcaaccgttatcgattagtccctgttggatggagcgaatgcttgaaatttgttgcttgacatacgattaatcttgcgttgtgttgtgctaagggattggcttatgttattatctggattggtggtttttctacgcctcatgcttgtgctgtctcgtttcacaaaatatcttttttgcttatgtcatagatataatttcatctaggtctgtcatttatatcaacttctgacttcgaccattatcgtgtcaaatcttcttgcacata

SEQ ID NO: 206816 - DNA, 647 bp, Zea Mays
caaaaagaaccacaatactatactgacatgcttaacatgtcaatgaaggaagcgcaagtgcaagtgaaatcttggcaggggcattacatgacaatggacgagctattctggttggccatagaacctttggtaaaggaaaaattcagagtgtgactgagctggacgacggatctgctctgtttatcacagttgcaaagtatctatctccagcgctgcatgaaatcgatcaagtaggaatccaacctgacatacaatgcagccctgacatcctttctttgccaagagcgccttcgctaagagaaaacagcaacgccacaaatttggagatggattcgtgtatcatggtagcagaacaagcgttggaaattcagcaaagcaagggttccgcttcttagatgcactatgggctctgtacattatttgcattctacagtagattggatagcttaccttagagacttataaagttctgtagcggtatatagagagaggctgatcctcacatgtttcattttaggcattatctattcggtgattcatgggaatgtatataagttgaccttgtcatatatctgtgtcgggttcattcttgactatccatactcagaaatataacgtgcaatttttttgcaaaaacaaaaaactaa

SEQ ID NO: 206817 - DNA, 2110 bp, Zea Mays
cccccttccagcttccacctcttttttaaatccccgcgtccgttccgtcccggccactttcacccgcccacgcattccaattccgaatttcaactgacagctgtgctagctcagacaccggactacaggaggcgccggggagccaacaacaacaacaaggcggcgagcagagccacgccaaagcgtggggaagcctccaagccgcgggcgatcccgccgaggcgtcgtcgtccaccgcctcctccttgtactcttcgtccctgctgtcagggccgccgcgcgctttatatacagccgacccgcgtgcctgggctcgctgcctgccagcagcaagcaagcgccgaggcggagctcgcgaggcagaggctgacggcgccgatggagtggctggacgagtacgagaagctggtggtccggatgaacacgccccgcgtggtcatcgacaatgccgtctgccccacggccacgctggtggacagcgccaggaagagagggctgctgctggaggccgtgcaggtgctcgccgacctcgacctgtccatcaacaaggcctacatctcctccgacggccgctggttcatggacgtcttccacgtcacagaccgcctcggccgcaagctcaccgacgacagcgtcatcacctacatccagcagtctctcgggacctggaacgagccggcccggccggcggcgctcgagggtctgacggcgctcgagctcacggggcccgaccgcacggggctcctgtccgaggtgttcgccgtgctggccgacctgcagtgcggcgtggtggacgcccgcgcgtggacgcaccgcggccgcctggcgtgcgtcgccttcctccgcggggagggcgacgccgaccgggtggcgcgcatcctcgcgcgcctcggccacctcgtccgcggtgacggcgaggccccgggcgccgtggcagccgtgcccgccgcggcggtcgcgcacgtcgaccgccgcctccaccagctcatggccgcggaccacaacaacagcgcgacgccgtacccggccgcggccgtgtccgtgcagagctgggccgagcgcggctactccgtggtgaccgtgcagtgccgcgaccgccccaagctgctgttcgacgtggtgtgcgcgctccactgcctggactacgtcgtcttccacggcaccgtcgacaccgccgccggcgaccgcgcgcggcaggagttctacatctgcagcgccgacgggagccccatccggtccgaggccgagagggagaggctcgcccagtgcctccaagccgccatagaccggaggtcgctagagggcgtgaggctggagctgtgcacgccggaccggccggggctgctgtccgaggtgacgcggacgttccgcgagaacgggctgctcgtcgcccacgcggaggtgtcgacgaaggggggcctggcctccaacgttttctacgtgaccgacgcggatggcaaggcggcgggccagagcgccatcgaagctgtcagggcgagggtcggcgcggactgcctcgtcgtgggcgaggagccccggccgccgcgcgtgttcccggaggccgggcctggcgaccgtgaccacggcggcggcggccttgggctggtctacctcggcaacctcgtgaagcggaacctgtacaacctcggcctcatcaagtcgtgctcgtgaactcggcaccaagaaaagacacgggcggtttctcaaggagacccacccgccattgacgtactgtgtacgtacaagatcgaggaaccggcgccgacggcatcaactaaacaccgcgacatggagcgccgctcaagcagggtgaaattcgggtcgggcatggtgttgtactcgagaggaaatgtcgtcgtccgtcatcaacaggcaccgacgccatggatggacggacggtcggacactgacgacggttgaggaggggtgattagcaataggaatttgtgtagccatctgccatgtacatagacaaattcgttgttgtcggtaccagtagaagaagtagcgcgtagccgtgtagtgggtgcattcatcgtatttaacttctgtcatatttacggaacaggcacatcattttttttcacccgaaacgcttactaaatttgct

SEQ ID NO: 206818 - DNA, 3369 bp, Zea Mays
ctcagagcgagcaattttccaacagatacgacaccagacgagagggaacctcgagccaagaaagcgagagggggaagctgcggccgccggccgagcgagctcgccgtccccatccacccctctcactctcctcttcctcctctctgtctttcgctccgtccagccgccgcgtaatccgcggaaccagatgccctcatccgccctctgatcgaatcccgcgagaaaggccggttctctgtcctgccgtgccggcgatcttgatggcattggaggcggggagcagcggctgcggcgggaggggatggggcggcgggttccggagcctgatgcggcggaagcaggtggactccgaccggatccgcgccgagggccagccgcagctcgccaaggagctcaacgtgccggagctggtcgccatcggagttggttccacagttggagcaggagtatatgttcttgtgggaataattgctagggagcacgctggtccagcattgacaatttcatttctgatagctggaatagcagccacactttcagctttctgttatgctgagcttgctagtcgttgcccctctgctggaagtgcctaccattattcatacatctgtgttggagaaggtgctggaatatactattggtggatctgctgttgcccgtggtatatctccaaacttagccttgttttttggaggacaggatagtctgccatggattttagcacgccatcagcttccatggtttggtatcattattgatccctgtgcagctgctcttgtttgtgttgtgactgttttactctgcatgggaattaaagagagttcatttgcacaaggagttgtaacagttctgaatgcttttgtaatgatatttgttattgtagctggtagttatattggcttccaaataggatgggtcggctacaaggattctgatgggtatttcccatatggagtaaatggaatgcttgctggatcagcaactgttttctttgcatacataggctttgatacagttgctagtacagctgaagaggttaggaatccacagagagatcttccattgggaatcggagtagcgttggctatttgttgtgcattgtatatggctgtttctgttgttattgttgggctggtaccatattttgccatggacccagatactcctatttcatctgcctttgcaaaacatggaatgcaatgggccatgtatgttgtgacaactggtgctgttcttgcactctgctcgaacttgatgggctcacttcttccacaggtatacagtgataaaacataaaagtatattatgacttactcctgatgacacccagtggatgaaattgaatggaatttgagttgattctactattctagtacatgtgaacttttcattccactgtcagttactctgcaataagttgtgaacctagccttgtaagtggccaaaactcaatgactcctgacccttattgtataatttatctgttcttcggtttgcactttggattcctcatttaactcaacattatccatcaattacattgccccccattcattcattttgaatttaaatcccattgaactaatgctgcaatgaactttgattcccatgccacatctatgagcgaagatgtaggcatgtagtactatggtgaaccacatcagcactatgcagatgatattttaatacttggtgtcattatgatttgaattgttattctcgcagcctagaatacttatggccatggcacgagatggcctgttgccatccttcttctctgatgttaacaagcaaactcaagtacctgttaagagcacaattgtgacaggcatctgtgcagctgctctggcttttacaatggatgtctcacagttagcaggaatggtaaggaaccagctatctgtgattgtttgtgttggtggagaagacacaggtttgggagattttctctattacttaggccacactaaccatgtctggttatagttacatatataggaccaagtggtctgttgcaactgaaagtagagataagattacaactactaaagtagagataaggtagaagataagatgctatatctagatgccataacataggcactaactactgctactactactacttatcctagagatggagctccaaagtaccaagaacacaagggttattcttatggtttgtctagtcatagccattttcacaacaatggactatggaagagagagttccttcaggactgtacatacacacaagcaatacaaatcataaggtggagtgaaataaaaaatatgttcttttggttgcaggtcagtgtaggcacactccttgcattcaccgtagttgctgtttcgatcttgatactcagatatgtccctccagatgaggtccctttgccaccctctctgcaagaatcattccgtttgaaccaggaatgcgatgaggaaagggacagggctcttcttggagttgggaactgtaccttgtctcagacaaaggatgtgattgtggtagtagaatcagttaaggaccctctcattgatataccgctgcataaaggcaagatggatgagacaaagcgccgaaagatagcctctttaagcataggatctgtgtgtataggggttctgatcctcacatcttcagcctctgccacatggttgccttttctcccgatatgtattggctgcatcattggagttgtgctccttctggctggcctcagtttgctctcctggatcgaccaagatgctggcaggcactcttttggtcattctggaggattcacatgcccttttgttccagtgctgccagttttgtgcatcctgataaatacgtatctgttgataaacctgggtggtgacacatggatgagagttggcatatggctgctgatgggtgttctcctgtacattttctacggacgaacccacagctccctaacagatgtcgtctacgttccagtagcgcaggctgatgagatgtacaggagttcatcaggatatgtatcatagaaaagaacagccgcagttacttcaaggtggttggtcattcagttgtagataattggttatcaaccaggaaagaggggaattggctgttatttctttcatgcttggccaacaagatctcgtggatgcaactttgcaagatatatatgatgttcacgagcctggtcaatttacacattgtttgttggagtgtgcgtagatgtggtgtatataaacccagctgggtggaatgatgtggtacataatttatgcaattcatgtaaaagccctttctacctttctactgaaatgggagagcatttaaagggcatattgaaacagtacatgaatggcaagagaagctacctttttttatat

SEQ ID NO: 206819 - DNA, 2972 bp, Zea Mays
ctcagagcgagcaattttccaacagatacgacaccagacgagagggaacctcgagccaagaaagcgagagggggaagctgcggccgccggccgagcgagctcgccgtccccatccacccctctcactctcctcttcctcctctctgtctttcgctccgtccagccgccgcgtaatccgcggaaccagatgccctcatccgccctctgatcgaatcccgcgagaaaggccggttctctgtcctgccgtgccggcgatcttgatggcattggaggcggggagcagcggctgcggcgggaggggatggggcggcgggttccggagcctgatgcggcggaagcaggtggactccgaccggatccgcgccgagggccagccgcagctcgccaaggagctcaacgtgccggagctggtcgccatcggagttggttccacagttggagcaggagtatatgttcttgtgggaataattgctagggagcacgctggtccagcattgacaatttcatttctgatagctggaatagcagccacactttcagctttctgttatgctgagcttgctagtcgttgcccctctgctggaagtgcctaccattattcatacatctgtgttggagaaggtgttgcctggttgattggctgggctctagtgctggaatatactattggtggatctgctgttgcccgtggtatatctccaaacttagccttgttttttggaggacaggatagtctgccatggattttagcacgccatcagcttccatggtttggtatcattattgatccctgtgcagctgctcttgtttgtgttgtgactgttttactctgcatgggaattaaagagagttcatttgcacaaggagttgtaacagttctgaatgcttttgtaatgatatttgttattgtagctggtagttatattggcttccaaataggatgggtcggctacaaggattctgatgggtatttcccatatggagtaaatggaatgcttgctggatcagcaactgttttctttgcatacataggctttgatacagttgctagtacagctgaagaggttaggaatccacagagagatcttccattgggaatcggagtagcgttggctatttgttgtgcattgtatatggctgtttctgttgttattgttgggctggtaccatattttgccatggacccagatactcctatttcatctgcctttgcaaaacatggaatgcaatgggccatgtatgttgtgacaactggtgctgttcttgcactctgctcgaacttgatgggctcacttcttccacaggtatacagtgataaaacataaaagtatattatgacttactcctgatgacacccagtggatgaaattgaatggaatttgagttgattctactattctagtacatgtgaacttttcattccactgtcagttactctgcaataagttgtgaacctagccttgtaagtggccaaaactcaatgactcctgacccttattgtataatttatctgttcttcggtttgcactttggattcctcatttaactcaacattatccatcaattacattgccccccattcattcattttgaatttaaatcccattgaactaatgctgcaatgaactttgattcccatgccacatctatgagcgaagatgtaggcatgtagtactatggtgaaccacatcagcactatgcagatgatattttaatacttggtgtcattatgatttgaattgttattctcgcagcctagaatacttatggccatggcacgagatggcctgttgccatccttcttctctgatgttaacaagcaaactcaagtacctgttaagagcacaattgtgacaggcatctgtgcagctgctctggcttttacaatggatgtctcacagttagcaggaatggtcagtgtaggcacactccttgcattcaccgtagttgctgtttcgatcttgatactcagatatgtccctccagatgaggtccctttgccaccctctctgcaagaatcattccgtttgaaccaggaatgcgatgaggaaagggacagggctcttcttggagttgggaactgtaccttgtctcagacaaaggatgtgattgtggtagtagaatcagttaaggaccctctcattgatataccgctgcataaaggcaagatggatgagacaaagcgccgaaagatagcctctttaagcataggatctgtgtgtataggggttctgatcctcacatcttcagcctctgccacatggttgccttttctcccgatatgtattggctgcatcattggagttgtgctccttctggctggcctcagtttgctctcctggatcgaccaagatgctggcaggcactcttttggtcattctggaggattcacatgcccttttgttccagtgctgccagttttgtgcatcctgataaatacgtatctgttgataaacctgggtggtgacacatggatgagagttggcatatggctgctgatgggtgttctcctgtacattttctacggacgaacccacagctccctaacagatgtcgtctacgttccagtagcgcaggctgatgagatgtacaggagttcatcaggatatgtatcatagaaaagaacagccgcagttacttcaaggtggttggtcattcagttgtagataattggttatcaaccaggaaagaggggaattggctgttatttctttcatgcttggccaacaagatctcgtggatgcaactttgcaagatatatatgatgttcacgagcctggtcaatttacacattgtttgttggagtgtgcgtagatgtggtgtatataaacccagctgggtggaatgatgtggtacataatttatgcaattcatgtaaaagccctttctacctttctactgaaatgggagagcatttaaagggcatattgaaacagtacatgaatggcaagagaagctacctttttttatat

SEQ ID NO: 206820 - DNA, 2449 bp, Zea Mays
agcaattttccaacagatacgacaccagacgagagggaacctcgagccaagaaagcgagagggggaagctgcggccgccggccgagcgagctcgccgtccccatccacccctctcactctcctcttcctcctctctgtctttcgctccgtccagccgccgcgtaatccgcggaaccagatgccctcatccgccctctgatcgaatcccgcgagaaaggccggttctctgtcctgccgtgccggcgatcttgatggcattggaggcggggagcagcggctgcggcgggaggggatggggcggcgggttccggagcctgatgcggcggaagcaggtggactccgaccggatccgcgccgagggccagccgcagctcgccaaggagctcaacgtgccggagctggtcgccatcggagttggttccacagttggagcaggagtatatgttcttgtgggaataattgctagggagcacgctggtccagcattgacaatttcatttctgatagctggaatagcagccacactttcagctttctgttatgctgagcttgctagtcgttgcccctctgctggaagtgcctaccattattcatacatctgtgttggagaaggtgttgcctggttgattggctgggctctagtgctggaatatactattggtggatctgctgttgcccgtggtatatctccaaacttagccttgttttttggaggacaggatagtctgccatggattttagcacgccatcagcttccatggtttggtatcattattgatccctgtgcagctgctcttgtttgtgttgtgactgttttactctgcatgggaattaaagagctggtagttatattggcttccaaataggatgggtcggctacaaggattctgatgggtatttcccatatggagtaaatggaatgcttgctggatcagcaactgttttctttgcatacataggctttgatacagttgctagtacagctgaagaggttaggaatccacagagagatcttccattgggaatcggagtagcgttggctatttgttgtgcattgtatatggctgtttctgttgttattgttgggctggtaccatattttgccatggacccagatactcctatttcatctgcctttgcaaaacatggaatgcaatgggccatgtatgttgtgacaactggtgctgttcttgcactctgctcgaacttgatgggctcacttcttccacagcctagaatacttatggccatggcacgagatggcctgttgccatccttcttctctgatgttaacaagcaaactcaagtacctgttaagagcacaattgtgacaggcatctgtgcagctgctctggcttttacaatggatgtctcacagttagcaggaatggtcagtgtaggcacactccttgcattcaccgtagttgctgtttcgatcttgatactcagatatgtccctccagatgaggtccctttgccaccctctctgcaagaatcattccgtttgaaccaggaatgcgatgaggaaagggacagggctcttcttggagttgggaactgtaccttgtctcagacaaaggatgtgattgtggtagtagaatcagttaaggaccctctcattgatataccgctgcataaaggcaagatggatgagacaaagcgccgaaagatagcctctttaagcataggatctgtgtgtataggggttctgatcctcacatcttcagcctctgccacatggttgccttttctcccgatatgtattggctgcatcattggagttgtgctccttctggctggcctcagtttgctctcctggatcgaccaagatgctggcaggcactcttttggtcattctggaggattcacatgcccttttgttccagtgctgccagttttgtgcatcctgataaatacgtatctgttgataaacctgggtggtgacacatggatgagagttggcatatggctgctgatgggtgttctcctgtacattttctacggacgaacccacagctccctaacagatgtcgtctacgttccagtagcgcaggctgatgagatgtacaggagttcatcaggatatgtatcatagaaaagaacagccgcagttacttcaaggtggttggtcattcagttgtagataattggttatcaaccaggaaagaggggaattggctgttatttctttcatgcttggccaacaagatctcgtggatgcaactttgcaagatatatatgatgttcacgagcctggtcaatttacacattgtttgttggagtgtgcgtagatgtggtgtatataaacccagctgggtggaatgatgtggtacataatttatgcaattcatgtaaaagccctttctacctttctactgaaatgggagagcatttaaagggcatattgaaacagtacatgaatggcaagagaagctacctttttttatat

SEQ ID NO: 206821 - DNA, 936 bp, Zea Mays
agctgaccgcctgacatgttagggcgagtctacatttcccgacgacgtcgccgccgacgaggaaggcaacgcctacgtgaccgacgccaagggaagcaagatctggaaggtcgggccggacggcgcgctgctcggcgtcatcaagaacgccacgttcgtgcagcggccgggcctgcgccacaacctcgtcggcctcaatggcattgtctaccaccctaacggctacctcctcgtcgtccacacctccggcggtgacttcttcaaggtcgacccgaagacagagaccgtgcgcgtcgtcaaggtgcgggggtcgctgaggcgaggggacggccttgagctgctctccccgacgaggctggttgtcgccggcctgccgaaccggctggtggagagctccgacgactgggagacggcgagtgtcaccgggcagtacgtcgggccggtccaccggatcgggtcgtcggctacggtgaaggacggggacgtgtacgtcaaccatattgtcgggttcgggctcggcaggaagaagacgcacgtccttgcaagggcggtgttctcgccgttggcagtgacgagttgacgggccggcgcctccgcgcgcgctccgtcgtgggatcaacagttgctttttgctaagcggcagttcatacttatggactagaactaataattagttgctaaaattagttgagatatttaaacaatctaggtaataattcaactactagctacttttcgcaaattagctatttgttaggtaactaattcgactaacaattttagtcaattaattattagatctagttcattcaaacaccccatagatgctcgtagtacttttgttcctacacttgacacgttgcccaaagatacaagattgtattgtttggtacatgcatggcggaggacccaataaaataccaatagtaaaataaa

SEQ ID NO: 206822 - DNA, 3373 bp, Zea Mays
gcgggtcggaacaaatgacccagcgaaaaaaccccaaccccgaaggcaaggggtgggaaaaaacacgaggcgggggtgggggatagaaatacgagagcgagcgagcgagcgagcgagcctgcagcagcgagagggacgagaggcgagagagataagcaagcggcgcgcgttaaccctagcccccgtctccgctccgctccgctccgctagcgctcccgcccgccgcctcgctcgccggaggattcgtacgcgcgccgggcccgacgacctgccgcgccaccttcgcgccgccgccgccgcgcgcgggcgcgcctcggtcgttgcagttgtccttcaccacagcggagtgatggctgttgtcaacccaaccaaccttgctattgacgacgatgacgacgatactcccatttcattcaagaggacgagtaactctacgaagactgccaggcccaccccttccaagcatgaggggtcgtcaggaggtaatggtgcacctgttaggatccccaaacctgtgtctcccaatccgcagaagaacggagccaccggggcttcaaggccgttgcatatgaagccaccgtcatccagtccaaaccatcgtccttctggatctggccagccaaacagtttggcacaacatagttcaaaggctaatagcattgacatgagtaaactgaaaagacctctcgtcaaagatgagagatctgatgactcagatgacgaggtgccgattgggttaaggagaaaggttgaggagaagaagttgaagggagttgatactcgggttcagaagacagatgactcagatgacgatgataagccattgggtctcaagatcaactcatccagaatgtcttccaacagagtgaataagcctgttctgcagagaactgtaccaaaggttgagcagcctgatgaagattcagatgatgataaaccattggcaagcaggttgcccagtaatgccggtccaaaaagtggaggtgatgtctctgaggattcagaggatgagaagccactggctgccagattttcaaaagttgctggtagtggaaacccaaaaatagcttcttccagcaaagggttaaccagtgatacaaatggccaacaaagtttgggtaaaaggcctctagacaatagtaatcaaacaagttcagctcttaagaaggctaaaccttcaaacgtttcagcttctgcaatcgttagaagagaaatcaagacagatgacaacacacctcttgcacaaaggctgaaaatgggagagtcttcgaaaggcaagtcatctgcaaagagtgtctttaagaagagtcctgcttctgtgaagaaggacatcaagaaaatgaaagggaaagggaaattaaagaagaacatgaaaaattctcagttctcaaagataatgaaggtcccccctggatctggtggaggaaagaaatggactaccttggagcacaatggtgttattttccctcccccatacaagcctcatggtgtcaaaatgctttacaatgggaaacctatcgatctgacaccagaacaagaggaggttgcaacaatgtttgctgttatgaaagacacagactatgcggccaagccaacattcattgataactttttcactgattggagaaaagttcttggtaaaaatcatattattaagaacttcgagctttgtgatttcacaccaatatatgaatggcacctcagagagaaggagaggaagaagcagatgacaacagaggagaaaaaaacattgcgggaagacaaattgaaacaagaggagaagtacatgtgggctgttgtagatggtgttaaagaaaaggtcggaaatttcagagtagaaccgcctggcttgttcaggggacgtggagaacatccaaagatggggaaacttaagcgccgcattctaccaagtgatattacaataaatattggaaaaggagctccagtccctgagtgcccgatacctggagaaagttggaaagaagtcaaacatgacaatactgttacatggttggccttttggaacgatccaattaacccaaaggatttcaagtatgttttcctggcagcaagcagctcactgaaggggcaaagtgacaaagagaagtatgagaagtccagaaaattgaagggtcatatacaaagaattcgtgagaattatacaaaagatttcaaaaacaaagatgtgacgaggaggcaaatagctgtggcaacataccttatcgataaactagcccttagggctggcaatgaaaaggacgacgatgaagctgatactgttggttgctgtacgctgaaggttgataatgttacatgtatgcctccaaatcagattcagtttgactttctgggtaaagattcaataagatactttaacaccgtagaggttgaagagcttgtgtacaaggcaattgagggtttccgtgctggaaagaagccaggacaagatctatttgacaagattgatacatctaggctaaatgctcacttgaaggatctaatgcctgggctcactgcaaaagtgttccgtacatataatgcttccataacattggacggaatcttgcatgaagaaacagaagatggaactgttttagaaaaaatcgctgtctatcagcgggcaaacaaagaggttgccatcatctgtaaccatcagcgtagtgtctcgaaatcacatgagtcccagatgactagaatgaacgaaaagattgatgagttgaagtcccagatggaggagctgaaagcagacttgaacaaagcaaagaaagggaagcctctaggctatgattcagaggggaagccaaagaggaacttggctcctgaagcgattcaaaagaaggttgcaacacttgaaggcaagatagagaagatggagatggataagaggataaaagaggatctgaagacagttgcgcttggaacgtcaaagatcaactatcttgatcctagaataaccgtggcatggtgcaaacgccatgaagtccctattgagaagattttcaacaaatctctcctcgcgaaatttgtatgggcaatggacgttgacccggaattcagattctaggagaccattggctaccatgtgccagccagtttggtccagtttccagcccttctccctggacactaattgcagctaggaaaggaaagagctcggtgtttgttttttcaaagtccccaccccccctgctcgtggaacgaaggaaagcacccgtcattctctttgtaggcccttcttttttttttcttttggttcaattgcgctaagttcaatatgtattctgctgagaaatctgagctcgtttgagaacggttggacattgaattcatagtgagttttaatcttgaatatagatgacttgttgagggatga

SEQ ID NO: 206823 - DNA, 3367 bp, Zea Mays
gcgggtcggaacaaatgacccagcgaaaaaaccccaaccccgaaggcaaggggtgggaaaaaacacgaggcgggggtgggggatagaaatacgagagcgagcgagcgagcgagcgagcctgcagcagcgagagggacgagaggcgagagagataagcaagcggcgcgcgttaaccctagcccccgtctccgctccgctccgctccgctagcgctcccgcccgccgcctcgctcgccggaggattcgtacgcgcgccgggcccgacgacctgccgcgccaccttcgcgccgccgccgccgcgcgcgggcgcgcctcggtcgttgtccttcaccacagcggagtgatggctgttgtcaacccaaccaaccttgctattgacgacgatgacgacgatactcccatttcattcaagaggacgagtaactctacgaagactgccaggcccaccccttccaagcatgaggggtcgtcaggaggtaatggtgcacctgttaggatccccaaacctgtgtctcccaatccgcagaagaacggagccaccggggcttcaaggccgttgcatatgaagccaccgtcatccagtccaaaccatcgtccttctggatctggccagccaaacagtttggcacaacatagttcaaaggctaatagcattgacatgagtaaactgaaaagacctctcgtcaaagatgagagatctgatgactcagatgacgaggtgccgattgggttaaggagaaaggttgaggagaagaagttgaagggagttgatactcgggttcagaagacagatgactcagatgacgatgataagccattgggtctcaagatcaactcatccagaatgtcttccaacagagtgaataagcctgttctgcagagaactgtaccaaaggttgagcagcctgatgaagattcagatgatgataaaccattggcaagcaggttgcccagtaatgccggtccaaaaagtggaggtgatgtctctgaggattcagaggatgagaagccactggctgccagattttcaaaagttgctggtagtggaaacccaaaaatagcttcttccagcaaagggttaaccagtgatacaaatggccaacaaagtttgggtaaaaggcctctagacaatagtaatcaaacaagttcagctcttaagaaggctaaaccttcaaacgtttcagcttctgcaatcgttagaagagaaatcaagacagatgacaacacacctcttgcacaaaggctgaaaatgggagagtcttcgaaaggcaagtcatctgcaaagagtgtctttaagaagagtcctgcttctgtgaagaaggacatcaagaaaatgaaagggaaagggaaattaaagaagaacatgaaaaattctcagttctcaaagataatgaaggtcccccctggatctggtggaggaaagaaatggactaccttggagcacaatggtgttattttccctcccccatacaagcctcatggtgtcaaaatgctttacaatgggaaacctatcgatctgacaccagaacaagaggaggttgcaacaatgtttgctgttatgaaagacacagactatgcggccaagccaacattcattgataactttttcactgattggagaaaagttcttggtaaaaatcatattattaagaacttcgagctttgtgatttcacaccaatatatgaatggcacctcagagagaaggagaggaagaagcagatgacaacagaggagaaaaaaacattgcgggaagacaaattgaaacaagaggagaagtacatgtgggctgttgtagatggtgttaaagaaaaggtcggaaatttcagagtagaaccgcctggcttgttcaggggacgtggagaacatccaaagatggggaaacttaagcgccgcattctaccaagtgatattacaataaatattggaaaaggagctccagtccctgagtgcccgatacctggagaaagttggaaagaagtcaaacatgacaatactgttacatggttggccttttggaacgatccaattaacccaaaggatttcaagtatgttttcctggcagcaagcagctcactgaaggggcaaagtgacaaagagaagtatgagaagtccagaaaattgaagggtcatatacaaagaattcgtgagaattatacaaaagatttcaaaaacaaagatgtgacgaggaggcaaatagctgtggcaacataccttatcgataaactagcccttagggctggcaatgaaaaggacgacgatgaagctgatactgttggttgctgtacgctgaaggttgataatgttacatgtatgcctccaaatcagattcagtttgactttctgggtaaagattcaataagatactttaacaccgtagaggttgaagagcttgtgtacaaggcaattgagggtttccgtgctggaaagaagccaggacaagatctatttgacaagattgatacatctaggctaaatgctcacttgaaggatctaatgcctgggctcactgcaaaagtgttccgtacatataatgcttccataacattggacggaatcttgcatgaagaaacagaagatggaactgttttagaaaaaatcgctgtctatcagcgggcaaacaaagaggttgccatcatctgtaaccatcagcgtagtgtctcgaaatcacatgagtcccagatgactagaatgaacgaaaagattgatgagttgaagtcccagatggaggagctgaaagcagacttgaacaaagcaaagaaagggaagcctctaggctatgattcagaggggaagccaaagaggaacttggctcctgaagcgattcaaaagaaggttgcaacacttgaaggcaagatagagaagatggagatggataagaggataaaagaggatctgaagacagttgcgcttggaacgtcaaagatcaactatcttgatcctagaataaccgtggcatggtgcaaacgccatgaagtccctattgagaagattttcaacaaatctctcctcgcgaaatttgtatgggcaatggacgttgacccggaattcagattctaggagaccattggctaccatgtgccagccagtttggtccagtttccagcccttctccctggacactaattgcagctaggaaaggaaagagctcggtgtttgttttttcaaagtccccaccccccctgctcgtggaacgaaggaaagcacccgtcattctctttgtaggcccttcttttttttttcttttggttcaattgcgctaagttcaatatgtattctgctgagaaatctgagctcgtttgagaacggttggacattgaattcatagtgagttttaatcttgaatatagatgacttgttgagggatga

SEQ ID NO: 206824 - DNA, 3459 bp, Zea Mays
gcgggtcggaacaaatgacccagcgaaaaaaccccaaccccgaaggcaaggggtgggaaaaaacacgaggcgggggtgggggatagaaatacgagagcgagcgagcgagcgagcgagcctgcagcagcgagagggacgagaggcgagagagataagcaagcggcgcgcgttaaccctagcccccgtctccgctccgctccgctccgctagcgctcccgcccgccgcctcgctcgccggaggattcgtacgcgcgccgggcccgacgacctgccgcgccaccttcgcgccgccgccgccgcgcgcgggcgcgcctcgttgcagttgtccttcaccacagcggagtgatggctgttgtcaacccaaccaaccttgctattgacgacgatgacgacgatactcccatttcattcaagaggacgagtaactctacgaagactgccaggcccaccccttccaagcatgaggggtcgtcaggaggtaatggtgcacctgttaggatccccaaacctgtgtctcccaatccgcagaagaacggagccaccggggcttcaaggccgttgcatatgaagccaccgtcatccagtccaaaccatcgtccttctggatctggccagccaaacagtttggcacaacatagttcaaaggctaatagcattgacatgagtaaactgaaaagacctctcgtcaaagatgagagatctgatgactcagatgacgaggtgccgattgggttaaggagaaaggttgaggagaagaagttgaagggagttgatactcgggttcagaagacagatgactcagatgacgatgataagccattgggtctcaagatcaactcatccagaatgtcttccaacagagtgaataagcctgttctgcagagaactgtaccaaaggttgagcagcctgatgaagattcagatgatgataaaccattggcaagcaggttgcccagtaatgccggtccaaaaagtggaggtgatgtctctgaggattcagaggatgagaagccactggctgccagattttcaaaagttgctggtagtggaaacccaaaaatagcttcttccagcaaagggttaaccagtgatacaaatggccaacaaagtttgggtaaaaggcctctagacaatagtaatcaaacaagttcagctcttaagaaggctaaaccttcaaacgtttcagcttctgcaatcgttagaagagaaatcaagacagatgacaacacacctcttgcacaaaggctgaaaatgggagagtcttcgaaaggcaagtcatctgcaaagagtgtctttaagaagagtcctgcttctgtgaagaaggacatcaagaaaatgaaagggaaagggaaattaaagaagaacatgaaaaattctcagttctcaaagataatgaaggtcccccctggatctggtggaggaaagaaatggactaccttggagcacaatggtgttattttccctcccccatacaagcctcatggtgtcaaaatgctttacaatgggaaacctatcgatctgacaccagaacaagaggaggttgcaacaatgtttgctgttatgaaagacacagactatgcggccaagccaacattcattgataactttttcactgattggagaaaagttcttggtaaaaatcatattattaagaacttcgagctttgtgatttcacaccaatatatgaatggcacctcagagagaaggagaggaagaagcagatgacaacagaggagaaaaaaacattgcgggaagacaaattgaaacaagaggagaagtacatgtgggctgttgtagatggtgttaaagaaaaggtcggaaatttcagagtagaaccgcctggcttgttcaggggacgtggagaacatccaaagatggggaaacttaagcgccgcattctaccaagtgatattacaataaatattggaaaaggagctccagtccctgagtgcccgatacctggagaaagttggaaagaagtcaaacatgacaatactgttacatggttggccttttggaacgatccaattaacccaaaggatttcaagtatgttttcctggcagcaagcagctcactgaaggggcaaagtgacaaagagaagtatgagaagtccagaaaattgaagggtcatatacaaagaattcgtgagaattatacaaaagatttcaaaaacaaagatgtgacgaggaggcaaatagctgtggcaacataccttatcgataaactagcccttagggctggcaatgaaaaggacgacgatgaagctgatactgttggttgctgtacgctgaaggttgataatgttacatgtatgcctccaaatcagattcagtttgactttctgggtaaagattcaataagatactttaacaccgtagaggttgaagagcttgtgtacaaggcaattgagggtttccgtgctggaaagaagccaggacaagatctatttgacaagattgatacatctaggctaaatgctcacttgaaggatctaatgcctgggctcactgcaaaagtgttccgtacatataatgcttccataacattggacggaatcttgcatgaagaaacagaagatggaactgttttagaaaaaatcgctgtctatcagcgggcaaacaaagaggttgccatcatctgtaaccatcagcgtagtgtctcgaaatcacatgagtcccagatgactagaatgaacgaaaagattgatgagttgaagatggaggagctgaaagcagacttgaacaaagcaaagaaagggaagcctctaggctatgattcagaggggaagccaaagaggaacttggctcctgaagcgtaacacatctcaaccaccaatacattttgttgtattttgtttttgtgtgttagaacaaagagtagggtaggcaacctgacaaaacctacttgcaggattcaaaagaaggttgcaacacttgaaggcaagatagagaagatggagatggataagaggataaaagaggatctgaagacagttgcgcttggaacgtcaaagatcaactatcttgatcctagaataaccgtggcatggtgcaaacgccatgaagtccctattgagaagattttcaacaaatctctcctcgcgaaatttgtatgggcaatggacgttgacccggaattcagattctaggagaccattggctaccatgtgccagccagtttggtccagtttccagcccttctccctggacactaattgcagctaggaaaggaaagagctcggtgtttgttttttcaaagtccccaccccccctgctcgtggaacgaaggaaagcacccgtcattctctttgtaggcccttcttttttttttcttttggttcaattgcgctaagttcaatatgtattctgctgagaaatctgagctcgtttgagaacggttggacattgaattcatagtgagttttaatcttgaatatagatgacttgttgagggatga

SEQ ID NO: 206825 - DNA, 3698 bp, Zea Mays
gcgggtcggaacaaatgacccagcgaaaaaaccccaaccccgaaggcaaggggtgggaaaaaacacgaggcgggggtgggggatagaaatacgagagcgagcgagcgagcgagcgagcctgcagcagcgagagggacgagaggcgagagagataagcaagcggcgcgcgttaaccctagcccccgtctccgctccgctccgctccgctagcgctcccgcccgccgcctcgctcgccggaggattcgtacgcgcgccgggcccgacgacctgccgcgccaccttcgcgccgccgccgccgcgcgcgggcgcgcctcgttgcagttgtccttcaccacagcggagtgatggctgttgtcaacccaaccaaccttgctattgacgacgatgacgacgatactcccatttcattcaagaggacgagtaactctacgaagactgccaggcccaccccttccaagcatgaggggtcgtcaggaggtaatggtgcacctgttaggatccccaaacctgtgtctcccaatccgcagaagaacggagccaccggggcttcaaggccgttgcatatgaagccaccgtcatccagtccaaaccatcgtccttctggatctggccagccaaacagtttggcacaacatagttcaaaggctaatagcattgacatgagtaaactgaaaagacctctcgtcaaagatgagagatctgatgactcagatgacgaggtgccgattgggttaaggagaaaggttgaggagaagaagttgaagggagttgatactcgggttcagaagacagatgactcagatgacgatgataagccattgggtctcaagatcaactcatccagaatgtcttccaacagagtgaataagcctgttctgcagagaactgtaccaaaggttgagcagcctgatgaagattcagatgatgataaaccattggcaagcaggttgcccagtaatgccggtccaaaaagtggaggtgatgtctctgaggattcagaggatgagaagccactggctgccagattttcaaaagttgctggtagtggaaacccaaaaatagcttcttccagcaaagggttaaccagtgatacaaatggccaacaaagtttgggtaaaaggcctctagacaatagtaatcaaacaagttcagctcttaagaaggctaaaccttcaaacgtttcagcttctgcaatcgttagaagagaaatcaagacagatgacaacacacctcttgcacaaaggctgaaaatgggagagtcttcgaaaggcaagtcatctgcaaagagtgtctttaagaagagtcctgcttctgtgaagaaggacatcaagaaaatgaaagggaaagggaaattaaagaagaacatgaaaaattctcagttctcaaagataatgaaggtcccccctggatctggtggaggaaagaaatggactaccttggagcacaatggtgttattttccctcccccatacaagcctcatggtgtcaaaatgctttacaatgggaaacctatcgatctgacaccagaacaagaggaggttgcaacaatgtttgctgttatgaaagacacagactatgcggccaagccaacattcattgataactttttcactgattggagaaaagttcttggtaaaaatcatattattaagaacttcgagctttgtgatttcacaccaatatatgaatggcacctcagagagaaggagaggaagaagcagatgacaacagaggagaaaaaaacattgcgggaagacaaattgaaacaagaggagaagtacatgtgggctgttgtagatggtgttaaagaaaaggtcggaaatttcagagtagaaccgcctggcttgttcaggggacgtggagaacatccaaagatggggaaacttaagcgccgcattctaccaagtgatattacaataaatattggaaaaggagctccagtccctgagtgcccgatacctggagaaagttggaaagaagtcaaacatgacaatactgttacatggttggccttttggaacgatccaattaacccaaaggatttcaagtatgttttcctggcagcaagcagctcactgaaggggcaaagtgacaaagagaagtatgagaagtccagaaaattgaagggtcatatacaaagaattcgtgagaattatacaaaagatttcaaaaacaaagatgtgacgaggaggcaaatagctgtggcaacataccttatcgataaactagcccttagggctggcaatgaaaaggacgacgatgaagctgatactgttggttgctgtacgctgaaggttgataatgttacatgtatgcctccaaatcagattcagtttgactttctgggtaaagattcaataagatactttaacaccgtagaggttgaagagcttgtgtacaaggcaattgagggtttccgtgctggaaagaagccaggacaagatctatttgacaagattgatacatctaggctaaatgctcacttgaaggatctaatgcctgggctcactgcaaaagtgttccgtacatataatgcttccataacattggacggaatcgtgagttgaaaagaatcttgtcttactgggtttcatttgtccattctttcgaacttcttaggtttgcatggacacttagagctgttgatgtagatgtattgttttcttctggtattttaatgtttataaatgttacttgttctacagctcaacttaatgcaaataagtaattggtcaatgttacacagtttgtcatatcttcattttttgcacctctgattttttactttctgatagcatgtaagcatgctattgacttattacgcatgttcatgtgactatcctgttagaatggtctaagtgtatatatacttgtgctgatattacagttgcatgaagaaacagaagatggaactgttttagaaaaaatcgctgtctatcagcgggcaaacaaagaggttgccatcatctgtaaccatcagcgtagtgtctcgaaatcacatgagtcccagatgactagaatgaacgaaaagattgatgagttgaagtcccagatggaggagctgaaagcagacttgaacaaagcaaagaaagggaagcctctaggctatgattcagaggggaagccaaagaggaacttggctcctgaagcgattcaaaagaaggttgcaacacttgaaggcaagatagagaagatggagatggataagaggataaaagaggatctgaagacagttgcgcttggaacgtcaaagatcaactatcttgatcctagaataaccgtggcatggtgcaaacgccatgaagtccctattgagaagattttcaacaaatctctcctcgcgaaatttgtatgggcaatggacgttgacccggaattcagattctaggagaccattggctaccatgtgccagccagtttggtccagtttccagcccttctccctggacactaattgcagctaggaaaggaaagagctcggtgtttgttttttcaaagtccccaccccccctgctcgtggaacgaaggaaagcacccgtcattctctttgtaggcccttcttttttttttcttttggttcaattgcgctaagttcaatatgtattctgctgagaaatctgagctcgtttgagaacggttggacattgaattcatagtgagttttaatcttgaatatagatgacttgttgagggatga

SEQ ID NO: 206826 - DNA, 3359 bp, Zea Mays
gcgggtcggaacaaatgacccagcgaaaaaaccccaaccccgaaggcaaggggtgggaaaaaacacgaggcgggggtgggggatagaaatacgagagcgagcgagcgagcgagcgagcctgcagcagcgagagggacgagaggcgagagagataagcaagcggcgcgcgttaaccctagcccccgtctccgctccgctccgctccgctagcgctcccgcccgccgcctcgctcgccggaggattcgtacgcgcgccgggcccgacgacctgccgcgccaccttcgcgccgccgccgccgcgcgcgggcgcgcctcgttgcagttgtccttcaccacagcggagtgatggctgttgtcaacccaaccaaccttgctattgacgacgatgacgacgatactcccatttcattcaagaggacgagtaactctacgaagactgccaggcccaccccttccaagcatgaggggtcgtcaggaggtaatggtgcacctgttaggatccccaaacctgtgtctcccaatccgcagaagaacggagccaccggggcttcaaggccgttgcatatgaagccaccgtcatccagtccaaaccatcgtccttctggatctggccagccaaacagtttggcacaacatagttcaaaggctaatagcattgacatgagtaaactgaaaagacctctcgtcaaagatgagagatctgatgactcagatgacgaggtgccgattgggttaaggagaaaggttgaggagaagaagttgaagggagttgatactcgggttcagaagacagatgactcagatgacgatgataagccattgggtctcaagatcaactcatccagaatgtcttccaacagagtgaataagcctgttctgcagagaactgtaccaaaggttgagcagcctgatgaagattcagatgatgataaaccattggcaagcaggttgcccagtaatgccggtccaaaaagtggaggtgatgtctctgaggattcagaggatgagaagccactggctgccagattttcaaaagttgctggtagtggaaacccaaaaatagcttcttccagcaaagggttaaccagtgatacaaatggccaacaaagtttgggtaaaaggcctctagacaatagtaatcaaacaagttcagctcttaagaaggctaaaccttcaaacgtttcagcttctgcaatcgttagaagagaaatcaagacagatgacaacacacctcttgcacaaaggctgaaaatgggagagtcttcgaaaggcaagtcatctgcaaagagtgtctttaagaagagtcctgcttctgtgaagaaggacatcaagaaaatgaaagggaaagggaaattaaagaagaacatgaaaaattctcagttctcaaagataatgaaggtcccccctggatctggtggaggaaagaaatggactaccttggagcacaatggtgttattttccctcccccatacaagcctcatggtgtcaaaatgctttacaatgggaaacctatcgatctgacaccagaacaagaggaggttgcaacaatgtttgctgttatgaaagacacagactatgcggccaagccaacattcattgataactttttcactgattggagaaaagttcttggtaaaaatcatattattaagaacttcgagctttgtgatttcacaccaatatatgaatggcacctcagagagaaggagaggaagaagcagatgacaacagaggagaaaaaaacattgcgggaagacaaattgaaacaagaggagaagtacatgtgggctgttgtagatggtgttaaagaaaaggtcggaaatttcagagtagaaccgcctggcttgttcaggggacgtggagaacatccaaagatggggaaacttaagcgccgcattctaccaagtgatattacaataaatattggaaaaggagctccagtccctgagtgcccgatacctggagaaagttggaaagaagtcaaacatgacaatactgttacatggttggccttttggaacgatccaattaacccaaaggatttcaagtatgttttcctggcagcaagcagctcactgaaggggcaaagtgacaaagagaagtatgagaagtccagaaaattgaagggtcatatacaaagaattcgtgagaattatacaaaagatttcaaaaacaaagatgtgacgaggaggcaaatagctgtggcaacataccttatcgataaactagcccttagggctggcaatgaaaaggacgacgatgaagctgatactgttggttgctgtacgctgaaggttgataatgttacatgtatgcctccaaatcagattcagtttgactttctgggtaaagattcaataagatactttaacaccgtagaggttgaagagcttgtgtacaaggcaattgagggtttccgtgctggaaagaagccaggacaagatctatttgacaagattgatacatctaggctaaatgctcacttgaaggatctaatgcctgggctcactgcaaaagtgttccgtacatataatgcttccataacattggacggaatcttgcatgaagaaacagaagatggaactgttttagaaaaaatcgctgtctatcagcgggcaaacaaagaggttgccatcatctgtaaccatcagcgtagtgtctcgaaatcacatgagtcccagatgactagaatgaacgaaaagattgatgagttgaagtcccagatggaggagctgaaagcagacttgaacaaagcaaagaaagggaagcctctaggctatgattcagaggggaagccaaagaggaacttggctcctgaagcaaggttgcaacacttgaaggcaagatagagaagatggagatggataagaggataaaagaggatctgaagacagttgcgcttggaacgtcaaagatcaactatcttgatcctagaataaccgtggcatggtgcaaacgccatgaagtccctattgagaagattttcaacaaatctctcctcgcgaaatttgtatgggcaatggacgttgacccggaattcagattctaggagaccattggctaccatgtgccagccagtttggtccagtttccagcccttctccctggacactaattgcagctaggaaaggaaagagctcggtgtttgttttttcaaagtccccaccccccctgctcgtggaacgaaggaaagcacccgtcattctctttgtaggcccttcttttttttttcttttggttcaattgcgctaagttcaatatgtattctgctgagaaatctgagctcgtttgagaacggttggacattgaattcatagtgagttttaatcttgaatatagatgacttgttgagggatga

SEQ ID NO: 206827 - DNA, 3369 bp, Zea Mays
gcgggtcggaacaaatgacccagcgaaaaaaccccaaccccgaaggcaaggggtgggaaaaaacacgaggcgggggtgggggatagaaatacgagagcgagcgagcgagcgagcgagcctgcagcagcgagagggacgagaggcgagagagataagcaagcggcgcgcgttaaccctagcccccgtctccgctccgctccgctccgctagcgctcccgcccgccgcctcgctcgccggaggattcgtacgcgcgccgggcccgacgacctgccgcgccaccttcgcgccgccgccgccgcgcgcgggcgcgcctcgttgcagttgtccttcaccacagcggagtgatggctgttgtcaacccaaccaaccttgctattgacgacgatgacgacgatactcccatttcattcaagaggacgagtaactctacgaagactgccaggcccaccccttccaagcatgaggggtcgtcaggaggtaatggtgcacctgttaggatccccaaacctgtgtctcccaatccgcagaagaacggagccaccggggcttcaaggccgttgcatatgaagccaccgtcatccagtccaaaccatcgtccttctggatctggccagccaaacagtttggcacaacatagttcaaaggctaatagcattgacatgagtaaactgaaaagacctctcgtcaaagatgagagatctgatgactcagatgacgaggtgccgattgggttaaggagaaaggttgaggagaagaagttgaagggagttgatactcgggttcagaagacagatgactcagatgacgatgataagccattgggtctcaagatcaactcatccagaatgtcttccaacagagtgaataagcctgttctgcagagaactgtaccaaaggttgagcagcctgatgaagattcagatgatgataaaccattggcaagcaggttgcccagtaatgccggtccaaaaagtggaggtgatgtctctgaggattcagaggatgagaagccactggctgccagattttcaaaagttgctggtagtggaaacccaaaaatagcttcttccagcaaagggttaaccagtgatacaaatggccaacaaagtttgggtaaaaggcctctagacaatagtaatcaaacaagttcagctcttaagaaggctaaaccttcaaacgtttcagcttctgcaatcgttagaagagaaatcaagacagatgacaacacacctcttgcacaaaggctgaaaatgggagagtcttcgaaaggcaagtcatctgcaaagagtgtctttaagaagagtcctgcttctgtgaagaaggacatcaagaaaatgaaagggaaagggaaattaaagaagaacatgaaaaattctcagttctcaaagataatgaaggtcccccctggatctggtggaggaaagaaatggactaccttggagcacaatggtgttattttccctcccccatacaagcctcatggtgtcaaaatgctttacaatgggaaacctatcgatctgacaccagaacaagaggaggttgcaacaatgtttgctgttatgaaagacacagactatgcggccaagccaacattcattgataactttttcactgattggagaaaagttcttggtaaaaatcatattattaagaacttcgagctttgtgatttcacaccaatatatgaatggcacctcagagagaaggagaggaagaagcagatgacaacagaggagaaaaaaacattgcgggaagacaaattgaaacaagaggagaagtacatgtgggctgttgtagatggtgttaaagaaaaggtcggaaatttcagagtagaaccgcctggcttgttcaggggacgtggagaacatccaaagatggggaaacttaagcgccgcattctaccaagtgatattacaataaatattggaaaaggagctccagtccctgagtgcccgatacctggagaaagttggaaagaagtcaaacatgacaatactgttacatggttggccttttggaacgatccaattaacccaaaggatttcaagtatgttttcctggcagcaagcagctcactgaaggggcaaagtgacaaagagaagtatgagaagtccagaaaattgaagggtcatatacaaagaattcgtgagaattatacaaaagatttcaaaaacaaagatgtgacgaggaggcaaatagctgtggcaacataccttatcgataaactagcccttagggctggcaatgaaaaggacgacgatgaagctgatactgttggttgctgtacgctgaaggttgataatgttacatgtatgcctccaaatcagattcagtttgactttctgggtaaagattcaataagatactttaacaccgtagaggttgaagagcttgtgtacaaggcaattgagggtttccgtgctggaaagaagccaggacaagatctatttgacaagattgatacatctaggctaaatgctcacttgaaggatctaatgcctgggctcactgcaaaagtgttccgtacatataatgcttccataacattggacggaatcttgcatgaagaaacagaagatggaactgttttagaaaaaatcgctgtctatcagcgggcaaacaaagaggttgccatcatctgtaaccatcagcgtagtgtctcgaaatcacatgagtcccagatgactagaatgaacgaaaagattgatgagttgaagtcccagatggaggagctgaaagcagacttgaacaaagcaaagaaagggaagcctctaggctatgattcagaggggaagccaaagaggaacttggctcctgaagcgattcaaaagaaggttgcaacacttgaaggcaagatagagaagatggagatggataagaggataaaagaggatctgaagacagttgcgcttggaacgtcaaagatcaactatcttgatcctagaataaccgtggcatggtgcaaacgccatgaagtccctattgagaagattttcaacaaatctctcctcgcgaaatttgtatgggcaatggacgttgacccggaattcagattctaggagaccattggctaccatgtgccagccagtttggtccagtttccagcccttctccctggacactaattgcagctaggaaaggaaagagctcggtgtttgttttttcaaagtccccaccccccctgctcgtggaacgaaggaaagcacccgtcattctctttgtaggcccttcttttttttttcttttggttcaattgcgctaagttcaatatgtattctgctgagaaatctgagctcgtttgagaacggttggacattgaattcatagtgagttttaatcttgaatatagatgacttgttgagggatga

SEQ ID NO: 206828 - DNA, 2479 bp, Zea Mays
agcagagaaagaccgcgaccaaaagcaagttcgatctccgctcctccagtctccaccgcccgccaaccccgagatatacctcccttcctctcgaagcttcgtctccagagtccagacgacgtcgccggctcttcactcggcgctggtgctggtggttgccagtggcggtggctgggtggccgggtggcggtgttgctgggatgcccgccgcgacggcgaccgccgcccgcctccgactgccgctgccaaaagcagcccaccgctcgccctgctcgagccggcgcctctccaattgccaccgccactgacgagcgaccacacgcttggcgcccgccatggacgccttgtcccgccccgctgttgtcatcgacaacggcaccgggtacacgaagatggggttcgcggggaacgtggagccctgcttcatcacccccactgtcgtcgccgtcaacgattccttttccggttcaggccagccggcggcgaggggcgcccctgccagggggaactggctcgctcagcacagtgccggcgtcatggctgacctcgacttctacatcggccaggaggcgctggcccgatcccgcgccagcagctcgcacagcttgagctatcccatccgcaacggccaggtggaaaattgggattctatggagaggttttggcaacagtgcatcttcaattacctccggtgcgacccagaagatcattattttcttctaactgagagccctctgactgcccctgagatccgggagtataccggggagatcatgttcgagacgttcaatgtgcccggcctctatattgctgtccaacctgtccttgctctagctgctgggtacactacaaccaagtgtgaaatgacaggtgttgtagttgatgtgggtgatggggctacccacatcgttccagttgctgatggttatgtcattgggagcagtatcagatctattccaattacaggaaagaggtgagaacattccaccagaagaatcttttgatgtagcaaggaggatcaaagaaatgtactgttatacttcttcagacgttgtgaaggaattcaataaacatgacagggaaccatcaaagtatgttaaacactggacgggcatcaaaccaaaaactggtgcgaaatacacatgtgacattggatacgagcggttcctggggcctgagatcttcttcaacccagagatgtataacaatgacttcaccactcccttgcaagttgttatcgacaggtgcatccaatcatccccaattgacacaaggagggctctttataagaatattgtcttgtctggaggctcgactatgtttaaagatttccataggaggttacagcgggacctcaaaaagatagtggatgcacgggtccgtgcatctaatagtcggcttcttagtggagatgctaaggcccagcctatagaagtgaatgtggtcagtcatcctattcagagatatgcggtatggtttggtggatctgtgcttgcttcaactgccgaattctacgaggcttgccgcacaaaagcagagtatgaagagtacggtgcgagcatctgccgatcgaaccctgttttcaaagggatgtactgactcagcctatcatagtcctgttctcaagggtatatatgtatttaaaccgagatctgttccctgtggctgacgtcgtgaatggcgtccactcaagcgtaaatggggagatctgacagcggaaacggactgccaagagggatcctggagaatcctagccgtaggagctgtacaaaagtaaagtgcaaatataggttcattttttatcatacaatttagatgctggtaggcctgacgggatgggtttgccacctctgctgaactgggtggcattgtaatttgtagcgtcaacattggtgcttgtatacatgtagggatggcgttgggggggggggggggggcggcggttgggtcgtggttccgttaccccaaaccaattctccatcgtgccttgttgggacaggagagaattagggggattaagggtatgtttggtttgctatctaatttgtcacactttgtctaacttttctgtctaagattagttctttaattaaactactaaacttagataaaatgtgacatagttagctataatctaaacatgccctaaatctctttctacacaacattggcaagacaacttgccactaaacctctttctacacaacattggcaagacaacttaggcaaggaagggatttaatctccttttaactcttttcaatccatctatccatttctaactgaacaagatcgatcttaacagcgacaaatcttttgtccctatcttgagggaagggattggaggtgattagatatggcaatttgacctgcggataggggtgacaataggttttaaattttacactataagatttaatgattggatcagattagaatcagactctatttctattcatttttgaactacaaattattt

SEQ ID NO: 206829 - DNA, 3083 bp, Zea Mays
gtccctcgcaggccgctggcccgatccccaccacttttttgtggtcacacgcgccggcttctccttcagtccttctcccgcttccgcttccgcgatggtatcctaccatccctcccttctccgtccatccgtcctcatcgcccaggccagcggcatcggccggtgcccaacactcaacgccttcctttccacccccgtcgtctccgcggtgccacttcgcctgcggcctctgcgcgccgccgccggtggagcagcctcgccggtcagtggcgatggaggcaaacgcgctgttccgccgcctgccgcgctgcttgtcttcgcgcgtagcaacttcctcccgcttgctctcgttagtggggtgatatttggtctcctagatcctactcttggatgccttgctcacaaatactctctgtcgaagttcagcacttttgggatattcattatgtcaggactgaccctgcgaacgaaggagcttggtacagcattagaagcttggcctgctggattatatggattaggatctgttttgctctttacgcccttcctttctcaatttatcatgcaagttcagttctcccctcgtgaatttatcactggattagctatattttgctgtatgccaacaacattatcaagtggagtcatactaacacagcttgttggtggtaattctgcacttgctcttgcgatgacagttgcatccaatttacttggcattataatcgtacctctttctcttgcaagatacatcggcactggagctggggtgtctttgcctactgagaagttatttagaagtctggtcaccagacttctaatccctcttattatagggaagtgcaagcctgaattaactgaagcttcctggagacactcatgatgattcattctttgtcaggttgctcgagaagcctcaaaaggtattgctgattttgttgatggaaaccaacaaggattttcagttggaaacgcggtgcttcttagcctagcttctacatattgcactgttggctttcaacattgcaacgttgcatatcttgtcacatcttgaaaagaaaggggattcagtctttgcaaagaaagagtacacacgagctgtcattttggtgactagtcagaaaacattgccagttatgataacagtggttgagcagcttggaggagccctcggggagtccggacttctagttatcccttgtgtttttgcacacattaaccaggttctcattgcaaagacataattgctatgcatcacttgcattctctggggttcatttctatgtccaaaacactctgcagatcattatcgattctatcatagtaaattggtggcgccggagggatcaacaatttagtaatccaaagtaactccataattcaattttggcgtgcaaaacagagaattagtcaggaattgctgactgcgaggctgattttgtgaagatgtaattgtacttgtccagcaagttcagtaatggaagaattgctgactgcaaagctgatttcgtgaaggccgttatatatgtcttcaaagcaggaaaatgaattcatctccaattgacaggcttatttgtttgaggcctgagtgggtgctgttgtagtggccgttatgttttccttcacatctaaaactgaatctccacataaacattattaaatgtccagatttaggttaagtaaaacctacgcccctctttggtagtgctccatacggatctagctcctctttgagtaggtggtgatccttaagggttttaggcttcgctggcttgttagtatgaagtatgactatattgttggtatttcactcaaccacaagacctatagcagctatatatgtaggatcgtgcgtattagagctgtcattttccctaatcttgttattattcgttaaaaatctgagagcagagtttttttaagaatctttgaatacaaaaaaaaaacacctaccttgccaaaatgatgagatttgaatttcaccattccaattggagaaaattcctttctccacttgaatgagtagaattgtccatttccatacaacacatttaaaaaaagcataacatcttgaaacgagcttggatggaaacaaatttatatgatataactttttgtttgaagccttcttggtcccaattcaaccaatgaaatatgtagatatatgggtacatatctaaacaattgtaaccattattttgacactaaacgaattcaaatgaaatatgatgaattaagagttctacagtgtctgtaaattttatctacatacgaagtattgtgaaaatgttgtggtttttgaagatatgctaacattggataaatgggagatactttcttacgtatcaattttctacgtatgacatcttcaaatattttttaagattttcatagagcttcttatatggatatatttctatgaaattttgccccagctgagttttgtatattacaacatttacgtttactaaattatacccgtgcgttcaatcaggatttccatttttgctcatgtataagatgacgcatgtcatttgtgatttagacctatatagaggtgataatggatcatgatccaaatcttaaataattttaattcaaaaatgaatataattaatttgatctagtgtaacatttagagttcatatattataagatatataaaattatttacagagtgtaaaacatattgtatcccacctacgtggtgtaggtctagcttatcgaaatctagaaaaaaaaaccaatttttactttgttaaatatttaggaattttatagaaatcaatgtatttttgtagaaagtatttttgtaatcccaagataatattatagcatattttagccaacatatctttacgggcatatttaatcatggtttccgaaccacagtatttggggtctaaaaaactcggatcattgcaatctcgctctttatccttccctcgtgcgctgcaactaaagtacttgtccccaaatagatgagaatctgtaaagacatgtacaactgggtacgcccgtgtctaaagagcactttaggtgaaagtgaaaacagtataactgagcgcattcgctagagttgc

SEQ ID NO: 206830 - DNA, 3086 bp, Zea Mays
cgatccccaccacttttttgtggtcacacgcgccggcttctccttcagtccttctcccgcttccgcttccgcgatggtatcctaccatccctcccttctccgtccatccgtcctcatcgcccaggccagcggcatcggccggtgcccaacactcaacgccttcctttccacccccgtcgtctccgcggtgccacttcgcctgcggcctctgcgcgccgccgccggtggagcagcctcgccggtcagtggcgatggaggcaaacgcgctgttccgccgcctgccgcgctgcttgtcttcgcgcgtagcaacttcctcccgcttgctctcgttagtggggtgatatttggtctcctagatcctactcttggatgccttgctcacaaatactctctgtcgaagttcagcacttttgggatattcattatgtcaggactgaccctgcgaacgaaggagcttggtacagcattagaagcttggcctgctggattatatggattaggatctgttttgctctttacgcccttcctttctcaatttatcatgcaagttcagttctcccctcgtgaatttatcactggattagctatattttgctgtatgccaacaacattatcaagtggagtcatactaacacagcttgttggtggtaattctgcacttgctcttgcgatgacagttgcatccaatttacttggcattataatcgtacctctttctcttgcaagatacatcggcactggagctggggtgtctttgcctactgagaagttatttagaagtctggtcaccagacttctaatccctcttattatagggaagtgcaagcctgaattaactgaagcttcctggagacactcatgatgattcattctttgtcaggttgctcgagaagcctcaaaaggtattgctgattttgttgatggaaaccaacaaggattttcagttggaaacgcggtgcttcttagcctagtatatctctgattcaaaacataagcttctacatattgcactgttggctttcaacattgcaacgttgcatatcttgtcacatcttgaaaagaaaggggattcagtctttgcaaagaaagagtacacacgagctgtcattttggtgactagtcagaaaacattgccagttatgataacagtggttgagcagcttggaggagccctcggggagtccggacttctagttatcccttgtgtttttgcacacattaaccaggttctcattgcaaagacataattgctatgcatcacttgcattctctggggttcatttctatgtccaaaacactctgcagatcattatcgattctatcatagtaaattggtggcgccggagggatcaacaatttagtaatccaaagtaactccataattcaattttggcgtgcaaaacagagaattagtcaggaattgctgactgcgaggctgattttgtgaagatgtaattgtacttgtccagcaagttcagtaatggaagaattgctgactgcaaagctgatttcgtgaaggccgttatatatgtcttcaaagcaggaaaatgaattcatctccaattgacaggcttatttgtttgaggcctgagtgggtgctgttgtagtggccgttatgttttccttcacatctaaaactgaatctccacataaacattattaaatgtccagatttaggttaagtaaaacctacgcccctctttggtagtgctccatacggatctagctcctctttgagtaggtggtgatccttaagggttttaggcttcgctggcttgttagtatgaagtatgactatattgttggtatttcactcaaccacaagacctatagcagctatatatgtaggatcgtgcgtattagagctgtcattttccctaatcttgttattattcgttaaaaatctgagagcagagtttttttaagaatctttgaatacaaaaaaaaaacacctaccttgccaaaatgatgagatttgaatttcaccattccaattggagaaaattcctttctccacttgaatgagtagaattgtccatttccatacaacacatttaaaaaaagcataacatcttgaaacgagcttggatggaaacaaatttatatgatataactttttgtttgaagccttcttggtcccaattcaaccaatgaaatatgtagatatatgggtacatatctaaacaattgtaaccattattttgacactaaacgaattcaaatgaaatatgatgaattaagagttctacagtgtctgtaaattttatctacatacgaagtattgtgaaaatgttgtggtttttgaagatatgctaacattggataaatgggagatactttcttacgtatcaattttctacgtatgacatcttcaaatattttttaagattttcatagagcttcttatatggatatatttctatgaaattttgccccagctgagttttgtatattacaacatttacgtttactaaattatacccgtgcgttcaatcaggatttccatttttgctcatgtataagatgacgcatgtcatttgtgatttagacctatatagaggtgataatggatcatgatccaaatcttaaataattttaattcaaaaatgaatataattaatttgatctagtgtaacatttagagttcatatattataagatatataaaattatttacagagtgtaaaacatattgtatcccacctacgtggtgtaggtctagcttatcgaaatctagaaaaaaaaaccaatttttactttgttaaatatttaggaattttatagaaatcaatgtatttttgtagaaagtatttttgtaatcccaagataatattatagcatattttagccaacatatctttacgggcatatttaatcatggtttccgaaccacagtatttggggtctaaaaaactcggatcattgcaatctcgctctttatccttccctcgtgcgctgcaactaaagtacttgtccccaaatagatgagaatctgtaaagacatgtacaactgggtacgcccgtgtctaaagagcactttaggtgaaagtgaaaacagtataactgagcgcattcgctagagttgc

SEQ ID NO: 206831 - DNA, 2199 bp, Zea Mays
ggcctctactagtagtctctcgcgcgctcgttgctaggcagttggcaaagcagtccttaccaactgcccttccccaccccgctcccgcgtaatccaaccgctaataataaccgctgctctgattagcgcaatctccaccgctataattacgctcccgcctgcgcgcgcgggcctatcagccctagctagctacccagccgcctccgctgctcgcctcctcacttgcgcgtgtcgtgtcgtgtcgtgttgcgctaagtcagctgcttgctactagggttagggtttgcggctgcgcgctcgcgtgcgtgcatgcgcgtgggttggccgcggcagggatgacgccgcagcggtcgccgatgggtaccggaggaggaggaagtagcggcggaggcggcgggggaccgccggcgctacactacctgagcggcccgtacggagacaccacctttaccaaggttttcgtgggcggccttgcctgggagacgcgaagcgagggccttcgcgcgcactttgaggtctatggggacatcctcgaggccgttgtcatcaccgaccgcgccacgggccgctccaagggctacggattcgtaaccttccgggacccagagtcagcgaggatggcctgcatggacccatacccagtgatcgacggccggcgtgctaattgcaaccttgccatcttagggcggcctggtccagctgtgccttttgcacctacaaggccggtcatcccatacaatggaggtgtggcggttccagggggcatgtatgtgcaaagcccaacatatcagcaatccccttacaactactcacaggcctttgtatatccttatgggccatcagcatatggaccagaatacctatatcagcagaatgcatacggtccatatgttggacaacagtacgtgccggtttacggtggcccaaggacagtaggcccagcagtctacccatatgggcagtttggccaacctgtaccaagcgatcatgcttattctcctggttatgccccaagtcatgttctcccactgtcgaatcagaatgttagtgctgcaaatgttgtgcgcataccaccagttcagcaacaacttcctccaggagctccacgccctcagcaacagcttttggtccctgcccgtgcaccaccgttcccgcagaacaacatttctgaacaagcgacaggttgacaaggacgccagaaagtgacgaattttaggcatcctatagtctgcagcaggactaagaaaagccataccgctaaattgggcggcatgcttttttttcttgcaaattgttttcttttgcactctaaaggttgtcgttatccatggttacccgaacttcttataatgtgagtgtctgaagatgaagcccctcttgctcagcttctgtcagtgtgtgtgtacattccccatctcctgccagaaattctgatagctggtggtctgtgcatggaccaaagtggatggccggaaatggagtccggcctccaacctgtgtataataatataggtcatgcagtaggtccaaatcgtagaacattctttcaaaacatctggttgtgtatattaattctcttcttcgcaccttctcagtacctccagtgcatgttcccatgtctcattagagcataggtatttcagtgtcactgtgtcgtcgtcagcgagtcatgtacattattatcctgaaactgtaaactatatatcacctatgtcaactgtaatcaaataatgacagccctaccttgggaaagaatgtgatttgttgcaaattgcaacggatggggggaaaacatcggggcatattcatcatactattcgtctgtttctatggataagaaatactgcatacataactacagaacgagcaaaattgaaaatcgtgtttgttggcatgtaactctagtttatggttttgtataaaattaaaaacaatctacgtagcaaagccagtagtaacatcaaaacggttcgtagctctagtgctatatatataaacacgatcctggggatggcaatgggcaaatggtaacatggggctctgagaagccgaggtcacctgacttatatgattccatatccgtgtctttcttcctgatcccagcatatatgatgaacatcattggtaaaatgaatattaaaaagatgctccatagtccttaagctgaatgacagaccctgcagcatttttatacgtcat

SEQ ID NO: 206832 - DNA, 2158 bp, Zea Mays
gcagtccttaccaactgcccttccccaccccgctcccgcgtaatccaaccgctaataataaccgctgctctgattagcgcaatctccaccgctataattacgctcccgcctgcgcgcgcgggcctatcagccctagctagctacccagccgcctccgctgctcgcctcctcacttgcgcgtgtcgtgtcgtgtcgtgttgcgctaagtcagctgcttgctactagggttagggtttgcggctgcgcgctcgcgtgcgtgcatgcgcgtgggttggccgcggcagggatgacgccgcagcggtcgccgatgggtaccggaggaggaggaagtagcggcggaggcggcgggggaccgccggcgctacactacctgagcggcccgtacggagacaccacctttaccaaggttttcgtgggcggccttgcctgggagacgcgaagcgagggccttcgcgcgcactttgaggtctatggggacatcctcgaggccgttgtcatcaccgaccgcgccacgggccgctccaagggctacggattcgtaaccttccgggacccagagtcagcgaggatggcctgcatggacccatacccagtgatcgacggccggcgtgctaattgcaaccttgccatcttagggcggcctggtccagctgtgccttttgcacctacaaggccggtcatcccatacaatggaggtgtggcggttccagggggcatgtatgtgcaaagcccaacatatcagcaatccccttacaactactcacaggcctttgtatatccttatgggccatcagcatatggaccagaatacctatatcagcagctttgtagaatgcatacggtccatatgttggacaacagtacgtgccggtttacggtggcccaaggacagtaggcccagcagtctacccatatgggcagtttggccaacctgtaccaagcgatcatgcttattctcctggttatgccccaagtcatgttctcccactgtcgaatcagaatgttagtgctgcaaatgttgtgcgcataccaccagttcagcaacaacttcctccaggagctccacgccctcagcaacagcttttggtccctgcccgtgcaccaccgttcccgcagaacaacatttctgaacaagcgacaggttgacaaggacgccagaaagtgacgaattttaggcatcctatagtctgcagcaggactaagaaaagccataccgctaaattgggcggcatgcttttttttcttgcaaattgttttcttttgcactctaaaggttgtcgttatccatggttacccgaacttcttataatgtgagtgtctgaagatgaagcccctcttgctcagcttctgtcagtgtgtgtgtacattccccatctcctgccagaaattctgatagctggtggtctgtgcatggaccaaagtggatggccggaaatggagtccggcctccaacctgtgtataataatataggtcatgcagtaggtccaaatcgtagaacattctttcaaaacatctggttgtgtatattaattctcttcttcgcaccttctcagtacctccagtgcatgttcccatgtctcattagagcataggtatttcagtgtcactgtgtcgtcgtcagcgagtcatgtacattattatcctgaaactgtaaactatatatcacctatgtcaactgtaatcaaataatgacagccctaccttgggaaagaatgtgatttgttgcaaattgcaacggatggggggaaaacatcggggcatattcatcatactattcgtctgtttctatggataagaaatactgcatacataactacagaacgagcaaaattgaaaatcgtgtttgttggcatgtaactctagtttatggttttgtataaaattaaaaacaatctacgtagcaaagccagtagtaacatcaaaacggttcgtagctctagtgctatatatataaacacgatcctggggatggcaatgggcaaatggtaacatggggctctgagaagccgaggtcacctgacttatatgattccatatccgtgtctttcttcctgatcccagcatatatgatgaacatcattggtaaaatgaatattaaaaagatgctccatagtccttaagctgaatgacagaccctgcagcatttttatacgtcat

SEQ ID NO: 206833 - DNA, 3409 bp, Zea Mays
aaagcggtcagtgggtggaggcagccaagagtcaccctgtcgccgttgccgtcgccgaggcaggcagagtctccctgtcgccgttgccgtcgccggcctcctcctcctctgccacttcctcccaactcccagccgcaggggccgacggcgacgggagggaagaggcggcagaggtactccgaggggcgcggagagaggctgtgccaggccacgccgtccagtgcctccgggtccgtcgccgcagcttccggccgcgtcggagaggtagcccccggagctcttcgcggaggctcgggaatggtgcactgggttagcgacagtgatggcagtgataacttcgaatgggacagtgatggtaacggggagcagacagtgagcttcaacgctgctggtgctggttcatcagctctggcagcgacgaacactgatgctcctggcccatcgacacgggttgctaatggcaatgggaaggctgggcgatctgcctctttggttcagaagtatgtggacatgggtttctcagaagagattgttctgaaggccatgaaggacaatggggataatggagcagattcattagttgagctccttcttacttaccaggaactaggcaatgacctcaaagtggataatgactttgcttctagttgtgcccccaaaactgctgacgatagtgatgatgatgacacactggaaatctgggatgatgaggatgctggagggagaagcaccagggttgctaactctgttgatgattctgatgacgaggatttcttacatgagatgtcacggaaggacgaaaaagttgattccttagttaaaatggggtttcctgaagacgaggctgcactggctattaccagatgcgggccggatgcatctatttctgttctggtggattcaatctatgcttcacagaccgcaggagatggttactgtggcaatctgtctgactatgaggataattcctatggagggagaagcacagggaacaagaaaaagagaaaaagatatggaggccaagcacagggaagtagaggcccattagatggtagctgtgatgaacccatgcctctcccacatccaatggttggatttaacttgccagaccagtggtcaagacgagtggacagatcgttgcctgcacaagctattggtccgccgtacttctactacgagaacgttgctcttgctccaaaaggtgtctggactaccatatcaagattcttgtatgatattcaaccagagtttgtggactcaaagtacttctgtgctgctgccaggaaaaggggttacatacacaacctgccacttgagaacaggtcacctctcctccccatacccccaaagacgatatcggaagcatttcctcggaccaagaggtggtggccttcatgggacccaagacgacagttcaattgcctccagacttgcgtgtctagtgcaaaattgttagagaggattcgcgtagccctcacaaacagttcagacccacctcctccaagagttcagaagtatgtgttggaggagtgtaggaaatggaacctggcatgggttggcttaaacaaggttgctcctctagagcctgacgagatggagtttctactcggctttccgaaggatcacacgagaggtatcagcaggacagagaggtatcgatctctaggaaattcatttcaggtcgatactgttgcttaccatctctcagttctgaaggatctgttcccacaaggcatgaatgtgctgtctttattctctggtattggaggagcagaggtggctctccacaggcttggcatacagatgaacacggttatttcagtggagaagtccgaggtcaaccggacgattctgaagagttggtgggatcagacgcagacgggtactctgattgagatcactgatgtgcagacactgtcatctgagaggatcgaggcgtatattagaagaattgggggcttcgatcttgtgattggtggaagtccctgtaacaacctcactgggagcaaccgtcaccacagagatggtttggagggcgagcattctgcattgttccatcattattttaggatcttacacgccgtcaagtccatcatggagcgtttgtagttcttagaatctttactgttgttttggttctagtagaatactttgtgaccgaacttgtaaatggtttgcaggttgactggtttagttctcttgccactctaatttaggctagttttttttttatttaatcttctttggtgatcttggtgcagttctgtggcactgttgggtattcaaatgcagattgatccgagaggctgccctgttgcattttctttttaaaatttgtatttgtcaatgagagatcaggtattctggttgccaaaaaaaaatctgaagttgtggagctgagaaaaggacggtgctaagctacaaccacccactgccacaccatgcgcacccccaacccaaaagatcctgcttttgctcacgcttatcaccactcccatctccatccaaaaccataaaaaaaaccagtgcgagctgaagcatccaggctctggaatcatcgtcgggatgtctgtgccagcatcagcccaggtgcctcacaccatacgatctgctgggagctgctgcttcaggtcgtcgcatcaactatctgcgcagaatctgggccgacatcgcaggtggcgggggaccggaaagaagaagatcctttccacccgtggcgtgcttgagtccagaaacggcgcacatcctggtggccttatgaagagaaggaaggtcgtggagcacatcatcctgctcagagccaagcccaacatctcagacgctgaagagaaagacatgctggactacctatacacatcgcagtaccagatgcgagggatactcgcggtctcgctaggccgcatcgaggaccccaacagcgacaacttcacgcacgctgtgttcatgcgtttccagcagaagcaagacatcgcggagttccagagtaacgcgtactactccaaagttgtcgacgagcacgtaaagcccgtttcctatggctcggtttctgtagatttcgagtccgaggtggaagacgacattatacctctctttcgcaggggagaggtatggccatggcctaaatcgatcgataccgttctttcttttttctttttcttttctttttttggcaacagaaagaagaagaaaaatgtggcaggattttaactacggcgtcgagtttatgctgctggtgtctttcttgaagactgcgtctagagaggcaacggaggacgcattagcgtctcttgacaagttgatcagccaatgcagcgcttctattgtgcaggcaacatgtggctgctgtttggatcgtccggataacgggtacagtcatgctgcagtaatccgtttcccatcatggagagag

SEQ ID NO: 206834 - DNA, 4529 bp, Zea Mays
aaagcggtcagtgggtggaggcagccaagagtcaccctgtcgccgttgccgtcgccgaggcaggcagagtctccctgtcgccgttgccgtcgccggcctcctcctcctctgccacttcctcccaactcccagccgcaggggccgacggcgacgggagggaagaggcggcagaggtactccgaggggcgcggagagaggctgtgccaggccacgccgtccagtgcctccgggtccgtcgccgcagcttccggccgcgtcggagaggtagcccccggagctcttcgcggaggctcgggaatgcactgggttagcgacagtgatggcagtgataacttcgaatgggacagtgatggtaacggggagcagacagtgagcttcaacgctgctggtgctggttcatcagctctggcagcgacgaacactgatgctcctggcccatcgacacgggttgctaatggcaatgggaaggctgggcgatctgcctctttggttcagaagtatgtggacatgggtttctcagaagagattgttctgaaggccatgaaggacaatggggataatggagcagattcattagttgagctccttcttacttaccaggaactaggcaatgacctcaaagtggataatgactttgcttctagttgtgcccccaaaactgctgacgatagtgatgatgatgacacactggaaatctgggatgatgaggatgctggagggagaagcaccagggttgctaactctgttgatgattctgatgacgaggatttcttacatgagatgtcacggaaggacgaaaaagttgattccttagttaaaatggggtttcctgaagacgaggctgcactggctattaccagatgcgggccggatgcatctatttctgttctggtggattcaatctatgcttcacagaccgcaggagatggttactgtggcaatctgtctgactatgaggataattcctatggagggagaagcacagggaacaagaaaaagagaaaaagatatggaggccaagcacagggaagtagaggcccattagatggtagctgtgatgaacccatgcctctcccacatccaatggttggatttaacttgccagaccagtggtcaagacgagtggacagatcgttgcctgcacaagctattggtccgccgtacttctactacgagaacgttgctcttgctccaaaaggtgtctggactaccatatcaagattcttgtatgatattcaaccagagtttgtggactcaaagtacttctgtgctgctgccaggaaaaggggttacatacacaacctgccacttgagaacaggtcacctctcctccccatacccccaaagacgatatcggaagcatttcctcggaccaagaggtggtggccttcatgggacccaagacgacagttcaattgcctccagacttgcgtgtctagtgcaaaattgttagagaggattcgcgtagccctcacaaacagttcagacccacctcctccaagagttcagaagtatgtgttggaggagtgtaggaaatggaacctggcatgggttggcttaaacaaggttgctcctctagagcctgacgagatggagtttctactcggctttccgaaggatcacacgagaggtatcagcaggacagagaggtatcgatctctaggaaattcatttcaggtcgatactgttgcttaccatctctcagttctgaaggatctgttcccacaaggcatgaatgtgctgtctttattctctggtattggaggagcagaggtggctctccacaggcttggcatacagatgaacacggttatttcagtggagaagtccgaggtcaaccggacgattctgaagagttggtgggatcagacgcagacgggtactctgattgagatcactgatgtgcagacactgtcatctgagaggatcgaggcgtatattagaagaattgggggcttcgatcttgtgattggtggaagtccctgtaacaacctcactgggagcaaccgtcaccacagagatggtttggagggcgagcattctgcattgttccatcattattttaggatcttacacgccgtcaagtccatcatggagcgtttgtagttcttagaatctttactgttgttttggttctagtagaatactttgtgaccgaacttgtaaatggtttgcaggttgactggtttagttctcttgccactctaatttaggctagttttttttttatttaatcttctttggtgatcttggtgcagttctgtggcactgttgggtattcaaatgcagattgatccgagaggctgccctgttgcattttctttttaaaatttgtatttgtcaatgagagatcaggtattctggttgccaaaaaaaaatctgaagttgtggagctgagaaaaggacggtgctaagctacaaccacccactgccacaccatgcgcacccccaacccaaaagatcctgcttttgctcacgcttatcaccactcccatctccatccaaaaccataaaaaaaaccagtgcgagctgaagcatccaggctctggaatcatcgtcgggatgtctgtgccagcatcagcccaggtgcctcacaccatacgatctgctgggagctgctgcttcaggtcgtcgcatcaactatctgcgcagaatctgggccgacgtgagttcccgatctcagctttgagtggccttctttttgaaagtgagcacaggttcttccaaagcccgttgtgttcgtgtagatcgcaggtggcgggggaccggaaagaagaagatcctttccacccgtggcgtgcttgagtccagaaacggcgcacatcctggtggccttatgaagagaaggaaggtcgtggagcacatcatcctgctcagagccaagcccaacatctcagacgctgaagagaaagacatgctggactacctatacacatcgcagtaccagatgcgagggatactcgcggtctcgctaggccgcatcgaggaccccaacagcgacaacttcacgcacgctgtgttcatgcgtttccagcagaagcaagacatcgcggagttccagagtaacgcgtactactccaaagttgtcgacgagcacgtaaagcccgtttcctatatttcgagtccgaggtggaagacgacattatacctctctttcgcaggggagaggattttaactacggcgtcgagtttatgctgctggtgtctttcttgaagactgcgtctagagaggcaacggaggacgcattagcgtctcttgacaagttgatcagccaatgcagcgcttctattgtgcaggcaacatgtggctgctgtttggatcgtccggataacgggtacagtcatgctgcagtaatccgtttcccatcatctgatgagttgaagctgttcagggagagcgaggagtacaaggatatgtgggcgtccaagttccgcccgatcgtggagagatccctgcacctgcacttcaccgttgaccccgtggggaaccagctgatgtagaccaaccgagtggtcatccctatacatgggaccaagagcatctgtactgtacagtgtaaaacagagagatggggtaatatagaggataccgatagggtcaacaagtgccagtgctcggttacattacatcacggcaaaaaaaaaacaaaaaaaacaagagaaaatagcctcccttgtcgctcaggagctcagatagatagatagacagatagatgctgagcaccgaccgagttgaggtccctcttgagagttcagttgtgcagcgggtttgacccctgcggcacccttctcttagcctcggacagatcctgcacctgcacgactcgcctccagccaagtttctgttgaccgtgctgcctgaaagacgacgtcccctcggcgtcggattccggaacccgtcggccgtggcagaagaggcctctctgctctgctcccaggagcgagactgtgagcactactactaccatgagcctgaccaagctttgttgcggcaatcccatgctttttcaggcagggtttcaacagcacaagttggagatggcaagggacggtagtttgtaatacatcacgcacaagcaacggaataaagattttatatacgcagacaacaagggcggcacagaaagtaaatccagctcggccatctggagacccgtggcggtgataccagacaccggggcaggcgtgcgcttgcctcaccaattttggtttggtgcggcggacagcgatgcatgcattttcatcaggtttcggtttgggagaaagaacaaggatacatcatcaaagtcacaacatgaatgaattcttgctactctggagaagaattgactggtttctttgcacttgaacaagaaaaccccacgcgatcttattttgtgagtatacagactgtcccagttccatgtcaaattcatttcccagttatgttctatggtggcacgatcatcctattccatgccttcacaagaacgggcgcggtggtttcccgagtggaaggcgaccgtggccacaaaaaaaaacacaagaag

SEQ ID NO: 206835 - DNA, 1129 bp, Zea Mays
ctttcccgtctccgcaccgcacacgcatcgagcggctcggcggctccgtctcatgagagccgtcgctgctgccgcctcgcccccgctccgcgccctcctcctcctctcccgccacccacgccgcgcaggcttcaccaactggccgtcgctgcctaggggccagaacgcaggacccacagccccgccggccgccaccgcccccaagcctgctgcgccgtccaggaggcaaggccgcggcctcactgccagcctgcctcgccaagtcgcccggatctcgacgccccacctgcggccgccggcgaccccgccaaggtgccctgacagacgccatcagagccacggagttcgtgcgctggctggttgtccgcggaagacggtccgccacctccctgctccaacctcgcacctccggttcaccatgaacccttcgtcgtcctcctcctcctctggcgggtaccactccagggccgctgccttcgcttccccgcagccacgcggcggtggcggcagacggcgtggtggcggccgcggccaagacgggagcgaccgcatcgacgcccttggccgcctgctgacgagggtgttgcgccacatggcggcggagctgcgcctagatatgaggaccgatggatacgtgcgcgtccgcgacctgctgaagctcaaccttcagaccttcgccaaggtccctctcaagtctcacactgttgacgagatcagggaggcagtcaggcgggataacaagcagagatttagtctgttggaggaagatggcgagctgttgatccgggcgaaccagggacacacagtaacaactgtcacatcagagagcctgctgaagcccattttgtcccctgatgaagtgtcagtttgtgtgcatggaacttacagaaaaaatcttgattcgattttgcaatctgggctaaagcggatggcaaggttacatgtacatttctcaagtggcttaccatcagacggagaagtaatcagtggtctactcctctggtgggtaagttgggtgcttgacagtggatgtacaaatcacatgaccggggagaaagacatgtttcatacattgcaactaactcaagaagcacaagaaattgtttttggagatagtggcaagagtaag

SEQ ID NO: 206836 - DNA, 902 bp, Zea Mays
gttgattgtttgatttgtgaagtcgggatgtgtgaggtttaatgaattcggtgctgatggtggaccagcagctaaggcccttcggcccaaattcaacgtgtttgtcaaaaatgtatctgctcatctgggagtagctgtgccacacattgagttgaagcatgtgattgctgctacaattggtcttaagggtcttggaagcctcctttttattttgagcagctctctcggtgcttatctcctgctgctgtaccttgctttgatcactcctatcatccatgacttctacaactacgatatggagaaggcagaatttgcaggcctctttgcgaagttcacccaggatttggcgctgatcggagctctgctcttctttctgggcatgaagaactccatcccgaagcggcagggcggcaagaagaaggcccccaaggcgaagacgaactagggctgcttagatagctgcacgcctcaggcggggtgtatcaggccacaggtctatttcgaagcaggcccagcgcgatgcagcgaatgccatcgagctgcgcttttacatgtttatcatcagattccattttgcggggcacggcccggacaaaggtgtgaccggggtgggttaggcgactagattgcacgattatgtacttgcgatttgtttgttgaactgggttgccgacagttaatcttcatttgattttatcttgttagcagcgcaggaaccgttgctgattcagtggttggtagtttctttcacttcctgagttgttggtttagggcatgttcgttttgctcttaatccatgtggattgagtgggattggataggtttaatctcaaataagttaaaatctttcataattttttttaatctcatccaatccatatgagataggaataatcgaacaa

SEQ ID NO: 206837 - DNA, 2412 bp, Zea Mays
gtctctcttcctcctcctacctcccagtcccacctttctttctttcttttttctttctttttgggtttctctttctcctggtccggtccgggagacctgctggaccagacggtgccgactcactgcaggcgttcgcttgacagccttcctattacgagacgagctcttggttttccgcagacacggactctaacaagcgagggcctgtcatggcctggcctgctatctgaggccgcggcggagcgtgacgacgacgaagtcggtcaggatgagccgcgaggataccctgaaagtgcagaccctcgagctcaaggtgaacatccactgcgacggctgccttaagaaagtcaagaaggtgcttcacaagatcgatggggtgtaccagagcacggttaatgcggcggagggcaaggtgacggtgtccgggctcatggacccggacaccgtcatcaggaagctgcacaaggccgggaagccggcgcagctgtggggcgccaccgccaagcctgccgtggcgacccagctcgagaaactgcagctcaaggatgccgggggcaagggccagggccagccgcccaagaacgcaggcggcaagggtcagccgcccaagaacgccgccggcaagggccagggccagggccagaagcagcagcagcccaagggtggagcgggcggcgccggcgccggcgcgaaagtggtggcgctgccgcactcgcagccgacgccgcagcagctgatgcagatgcagcagcagatgcagatgaacgggatgaagtttgctcatccggagctcatggccatgggcgcaggtcgcatgccgatgccgatgccgttcccggcggcagcgcaggcgcaggcgcaggccgccgcggccaaggaccccaagaccgtcaagttcgacctcccggggggcgaggagttcggggacgacggcagcgacctcgacgacgagttcgacgaactagacgacgtggatttcgaggacgacggcctcgacgacgacgacgacggcgacctgtacgacggccccgggatggtgatgaagcccatgggcatgcccccggccgctgctgccggtggcggcaacggaaacggcggcggcaagaagggtggcggcgggaacgaggtcccggttcagatcaatgggaacgccagcaacggcggcggggcgaagcagaacgggggcggcaaaagcggggccaagaacggcaagggccgccgcatgcgggcatgatgatgaggccgccgaacatgatgggcggcgcgggcggtttccccggcatgggccagatgggcggccacccccacatgggtggcggcggcatgccgcaggcaggcgggggcgccgcgcacggcatgccggctggtggcagcatcagcatggccgctggcggaatgcctggggccgggttctttccgcgcggcgttggcggcggcatgccggccggcgcggagatgctgggcatgtcgcagctgcctccgcagcagcagcagcacatggcggcggtgatgcagcagcagcagcagcacatggctgcgatcatgcagcagcagcagcaacagatgatgatgatgaacgggcacggccacggccacggccaccatggccacggcgggtacgggtacgggcgcccggcgatgccgcagtacccgccgccgccggcgtactactacccgatgccgcagcgccacccgcacgacagcatgttcagcgacgagaaccccaacgggtgctcggtgatgtgaggcgaggcgcggcggcggcctgcggggggctccggagaaagtgaaccaggcaaccagccagccagccaaccggaaggagggagctcgggcccgtcaggtcggaggcggccgccgtgagtggaagagtcgtcgtcggtatacatgaagaaaaaaaaaactagctatatgctatagcaccagccgtaacctcgccgccccatttcgttttcgtctttcccctagtttgttttcacctttggtactttttgtttcccttctctgaacaaagaaagagcggcatgcagcttcctcttccttgagtggaaggtaggtatagtggtaacaacaatgatagtggtgatgctagctgatggctgtcttccttcgcttctttctttcttgcttgcttgcttgcttgcttgcttgccccatatctaatgaatggacaatgtgcaagagcagtgcctctctctgcctgcctagcttgttgtgtgagagagacagagaagaatcatcatggatggaggtagatgatacagtgctactgtatctccactccagacagcgacacacgggcgaaggggtggacatggtgccatggcggcagcagcgacggagccatgatggtggctggtgagtggtgagtggcgacggcgacggcagtggtccacgctgaactagagcgag

SEQ ID NO: 206838 - DNA, 1964 bp, Zea Mays
agacactcctagagtgaggtaggtggggcgggggtagtcgggagccaggagacgagagtctctcttcctcctcctacctcccagtcccacctttctttctttcttttttctttctttttgggtttctctttctcctggtccggtccgggagacctgctggaccagacggtgccgactcactgcaggcgttcgcttgacagccttcctattacgagacgagctcttggttttccgcagacacggactctaacaagcgagggcctgtcatggcctggcctgctatctgaggccgcggcggagcgtgacgacgacgaagtcggtcaggatgagccgcgaggataccctgaaagtgcagaccctcgagctcaaggtgaacatccactgcgacggctgccttaagaaagtcaagaaggtgcttcacaagatcgatggggtgtaccagagcacggttaatgcggcggagggcaaggtgacggtgtccgggctcatggacccggacaccgtcatcaggaagctgcacaaggccgggaagccggcgcagctgtggggcgccaccgccaagcctgccgtggcgacccagctcgagaaactgcagctcaaggatgccgggggcaagggccagggccagccgcccaagaacgcaggcggcaagggtcagccgcccaagaacgccgccggcaagggccagggccagggccagaagcagcagcagcccaagggtggagcgggcggcgccggcgccggcgcgaaagtggtggcgctgccgcactcgcagccgacgccgcagcagctgatgcagatgcagcagcagatgcagatgaacgggatgaagtttgctcatccggagctcatggccatgggcgcaggtcgcatgccgatgccgatgccgttcccggcggcagcgcaggcgcaggcgcaggccgccgcggccaaggaccccaagaccgtcaagttcgacctcccggggggcgaggagttcggggacgacggcagcgacctcgacgacgagttcgacgaactagacgacgtggatttcgaggacgacggcctcgacgacgacgacgacggcgacctgtacgacggccccgggatggtgatgaagcccatgggcatgcccccggccgctgctgccggtggcggcaacggaaacggcggcggcaagaagggtggcggcgggaacgaggtcccggttcagatcaatgggaacgccgccggcgtactactacccgatgccgcagcgccacccgcacgacagcatgttcagcgacgagaaccccaacgggtgctcggtgatgtgaggcgaggcgcggcggcggcctgcggggggctccggagaaagtgaaccaggcaaccagccagccagccaaccggaaggagggagctcgggcccgtcaggtcggaggcggccgccgtgagtggaagagtcgtcgtcggtatacatgaagaaaaaaaaaactagctatatgctatagcaccagccgtaacctcgccgccccatttcgttttcgtctttcccctagtttgttttcacctttggtactttttgtttcccttctctgaacaaagaaagagcggcatgcagcttcctcttccttgagtggaaggtaggtatagtggtaacaacaatgatagtggtgatgctagctgatggctgtcttccttcgcttctttctttcttgcttgcttgcttgcttgcttgcttgccccatatctaatgaatggacaatgtgcaagagcagtgcctctctctgcctgcctagcttgttgtgtgagagagacagagaagaatcatcatggatggaggtagatgatacagtgctactgtatctccactccagacagcgacacacgggcgaaggggtggacatggtgccatggcggcagcagcgacggagccatgatggtggctggtgagtggtgagtggcgacggcgacggcagtggtccacgctgaactagagcgag

SEQ ID NO: 206839 - DNA, 5614 bp, Zea Mays
ctccacaccaccgcccaatgtcgtcgtcggagcccgatgccgagggcgccctcggcggcgcctccccatccgcccgcgtgctcgcccgcgccctcgacaagatcatcaagcactcctcctggcgcaggcacgccgctctcgtcgccgcctcccaagtcagcgctcgatctcctctcctcctccccagctcctgatgacgagcccgagacctcctcgccctcccccgtccccggcctcccagcgcccgccgcggaagccgccctcaccgcacttctcctcgcgctcgacccggcgtccccgaaggtagccgagcccgcgctcgagtgcgtcgccggcctcctctccctgcgccttctcctcggcgacgtcgacgcggctgacccctccctgatctcgaaactcttcgccgcggtgctctcctgcgtctcgctgggtggcagcggggacgaagcgctcgagctgtccgtgctgcgcgttctcgtcgctttcgcgcggtgcccgggagtctccgtcagcggggagtgcctgggccaggtggtcaaggcgtgctacaacgtctacctcgggagccccagcggcggcaaccagctctgtgctaaactagctctcgcacaagtgctggtcatcgtgtttgcgcgcgtcgaggctgacgccatggacgtccgcgtgcgcactgtctccgctgccgacatgatggacctctctgaccgcagcctcaatgactccagcgttgtacaggcggcacaagtgttcataaacgaggccatggaggggagcgacgtgccggaggaggcaccacatgtagatgaggcgtcagttgaggcggaaggcgctggggaggatggtggaataagcaagataagggaggatggcctggctttgttcaagaacctatgcaagttgtcaatgaagtttggtacgcctgatagcccggatgatccaatgctattgagggggaaggtgttatcgctggagctggttaggatggtcattgacaatgcagggctattctggaagacaaatgaaaagtatcttgaagcagttaagcagtacctttgtttatccttgttgaagaatagtgctttgtccgcaatgagtgtcttccagttattgtgttccatatttatgagtctaatatcaaggtttagatctggtttgaaagaggaaattggaatgttttttcctatgcttatcttaagagttcttgaaaatgttctccagcctagttttttgcagaagatgacagttctaaacttcttggagaaaatgtctaaagaacctcaggttatcattgatatctttgtgaacttcgattgtgatgttgatgcaccgaatatttttgaaaggattgtcaatggacttttaaagactgctttaggtgtccctactggatctacaacaacattaactgttgcacaagaccaaacatttaggcttgagtctgtcaagtgccttgcaattgttgttaagtcgatgagtgcatggatggaccaacaactgagaattggtgaattttcaccaggcaattctgaaactctaagttcagctgataaccataatattcataatggagaagaatggagcggaatagattatgaactgcagtttgacactagtagttctgacataaccgactcttcctcacttgagcagcgacgtgcttacaagatggagcttcagaaaggaattaccttgttcaacaaaaaaccttccaaaggtattgattttctcattcggagcaagaaaataggcaattctccagaaggtgtggcatctttcttgagaagtactgctggattgaatgcaacaatgataggcgactatttgggtgagagggatgactttcccctcaaagtaatgcatgcttatgtggacgctttaaacttcgaaggcatggactttggtcaggcaattaggttcttcttgcaaggtttcaggttaccaggagaagctcaaaaaattgaccggatcatggaaaagtttgctcaaggctactgtaaatgcaatccaaatgcttttattagtgcagatacagcatatgttcttgcatattctgtgatcttgctaaacactgatgctcataatccaatggtgaagaacaagatgtctaaggcagattttatgcgcaacaatcgaggaatagatgatgggaaggatttgccagaagattatctgagtgcgctgtatgaccagattgtcaacaatgaaatcaagatgagtgctgattcttcagttgcacaaaccaagcaatccaatagtgtagggaggcttctaggcttggacaacattatcaactttgtcaattggagaccagcagaagacaaggcagtaggagcaaatgacttgctcattaagcacatacaggaaaaaatcaaagcaaaacgtgggaaatcagagtccacgttttatgttgttgctgatgcaaccattttaaggttcatgatggagtcctgttgggcacctatgatggctgcattcagtgtgcttcttgatcagtgtgatgataaggctgctacatcacagtgtttaaagggattaagattttctgtgcacatcacttctgttatgtgcatgcagacacagagggatgctttcttaacgtccatagccaaattcacatctctccattctgccgcagaaatgaagcaaaaaagtattgattctatgaaggctataatatctatcgcaatcgaagatggcaattacttgcaggaagcttgggagcatgtattaacatgtttatcacggtttgagcatttacatctgcttggagaaggggttcccactgatgcatcctttctgacagttcctctgattgagtcagaagaaaaaactaagaagtctacttctgttctatcttctaagaagactagtgctcttcagaatcctgctgtgatggctgctgttagagggggtacttacgatagcacagtggcaaaaggcagtgtgtcagcactggtcactcctgaacagatcaataatttcctatcaagcattaatttgttggatcagattggcattgttgagttaaatcatatctttgcccatagccaaagattaaacagtgatgctattgttgcttttgtgaaggctctttgcaaggtctcaatgactgagctgcagtctccaacagatcctcgtatcttctgccttactaaaatagtagagattgcgcattacaatatgaatcgcatacgtctggtgtggtcacgtatttggaaggttttgtcagatttttttgtgtctgttgggttgttggaaaatctttctgtcgctatatttgtgatggactctctgaggcagctggccatgaagtttcttgaaagggaggaactggcaaactataactttcaaaatgagttccttagaccttttgtgatcgttatgcagaggagcaatgctccagaggtacgagagctgattgttaggtgcgtctcacagatggttctgagtcgggttaataatataaagtctggttggaagggtgtttttatgctgatgatacaagaagtactgtcctattggcatttgagacggtggaaaaaattgttcgagattattttcatcacataactgaaacagagacaacggcatttactgattgtgtgacttgtcttattgcatttacaagtagtcaatttaacagcgatgccaatctcaatgctattgcgtttctgcgattctgtgctgttaaacttgctgaggaaggattttcttgtcaagatagggcttttgaacaacccaggaattcagccatggtgtgtggtggaaatgccactgtgcaaaaagatggtcatatttccctctggatgcctctccttgcaggtttagctaaactgacaagtgattcaagactgaatatcaagaaaggtgctgtaggagtactttttgacattttaaaggatcacggacacctgttctcgctgacgttttggaccgatatctttgaacatgttgtttatcctctatttagcaatgaaaggtcgacacccagtgaccagatttcaacatcaaattctgcagagtataatttacctgatcttgaaacacaaacgttggcagtgaaatgcttggtgggtttgtttgttaatttctttgatgtgatccggccagaacttggtagaacagcatcaattgttacatctttcatcagaagcccctacaaacattgtgctaccattggtgtatctgcaatcatgcgtttagcagatggggttggtaacaaactttccaaagaggaatggaaagagatattgatcttctttagagaatcagtgacgcataccttcatcacgttttctaaaattgtaaggatgatgcaagatattgatatcccagatagaattgattcttattccgaaaccgagcaatatttggatcatgagatgtatgttaacgatgaagaggaagcgaatatggagacagcttcttatgctattgtcaaactgaagaatcatatggctctactgctcatggtgattcagaacattatcaaactatacgaggagcacagcaaatatcttcatgccgagcatattagcattcttttggagatgatgtcagctattgcgatacattcaagtgaagtgagctctgagttatccttgcagtcgaaatttcataaagcatgttcccttttggaggtatctgagccagcaattgttcattttgagaacgattcctaccagagttacctcaaacttcttcaagctctgcaacatgattatccatccttgtcagaagagatgaacatagagtctcaagtgcttgatacctgtgagcaaatattgcaaacatatctgaagtgcgcaggacacaaaccatgtgatggggcgtcccaaagaaatccgcctttacattgtgcagtgccgctgagcgcttctaagaaagaggaattggctgctaggactcctctggtccttcaagtgatgaaattgttgggtgatctggagagagattcctttaggagaatattaccctgctttttcccattattggctgatctgatccgctgtgaacatagctctggagaagttcaacatgcactgtacaatatcttccaatcagccattctccccatgataagggtttaataacagattgtgacccaccaattgtacagtttttgttaccccactttggtgttgtaattcagttcattgtggcgtcattccattacgaggggttgtatacctatgaggatgacgtataaaaatgctgcagggtctgtcattcagcttaaggactatggagcatctttttaatattcattttaccaatgatgttcatcatatatgctgggatcaggaagaaagacacggatatggaatcatataagtcaggtgacctcggcttctcagagccccatgttaccatttgcccattgccatccccaggatcgtgtttatatatatagcactagagctacgaaccgttttgatgttactactggctttgctacgtagattgtttttaattttatacaaaaccataaactagagttacatgccaacaaacacgattttcaattttgctcgttctgtagttatgtatgcagtatttcttatccatagaaacagacgaatagtatgatgaatatgccccgatgttttcc

SEQ ID NO: 206840 - DNA, 5595 bp, Zea Mays
ctcctcccctctaatccgcccgccattactttcgcagacgccgctcttcgctcgctcaccgccgcttccttccacgggccatttcgtctccgtcgcccatgctcacctccttcaactctgtgaacccgcgatccgacgtgtagtgccgccgtactgcgcggcgacggcccaccggcgaggagccgccgacctatgcccctcggccagtccggcattggctaacccccaaatgcctcccgccgctaactagccgcagcctgtacatacacagacagacagacatacacaccgtaccggaggttgaagcggagaatcgatcccgacgcttcgccgccgctgtctcgtcgccggagaggagttttagcctcaaaggcgagcagatgatgaggatgatgatgagcccggggttcagtttttcacccatgggaatgacttcttacatgacttctcagatacagaatctgttagtgttagtacccctaatgatatcaaccgctccctgaccccaagccccttggagagcccgacttggatggtgaagcagaacgacagctcaccaatatccaggaagaatggccgtttcagcccggattctcctggatatggtacaaaggcaagtttaggatctgatggttcgccgcaacagataaatggtagcgtcactgacagtggtgacggaagcaaaactcagtatcctgttgaatttggtgccaatatatggtgcccaccaccaccagaagatgagggcgatgatatcgaatcgaggttatttggattccaggacgaggatgatgaggctggggactcaagcgggcttcttgtttctggtagctttagtgctaacaaaatagctgctattgacgaggtcacaaacactgctcaggaagagtgtctgaagactgcggtgctcggccatttccgagctcttgtggctcaattactgaaggcagaaggcattgatatgggaaaggatgatgggtccaaaggttggcttgatattgtgtcatccttaacttggcaagctgcaagctatgtgaggccagataccaagaaaggaggcagcatggatcctactgattatgtgaaggtcaaatgtatagcatcaggggatccaagagatagtaattttgttcgaggagttgtttgctccaagaatgtaaaacacaagcgcatggtctctgagcataggaatgcaaaattgctcattttagggggcgcacttgagtaccacagggttcctaataaattggcatctattggcaggatacttgaacaggagaaggagcacatgaaaatgattgttggaaagattgagtcccggcgacctaatgttgtgctagttgagaaaactgtctcatcttctgctcaggagctcttctccaaagacatttcgttagttctgaatgttaagaggacacttttggacagggtatcaaggtgcacaggggcacaaattgcttcatcagctgacagtattgcttcagtacggctaggtcaatgtgaagcgttcaaggtgcaaaaagttacagaattcccatcagctaaacagacaaataggagatcaagcaagacactgatgttctttgaaggctgcccttggcgtttgggttgcacggttctactgagagggtcatgtcgggaggagctcaagaggattaagcgtgctgtacaacttgcagtctttgctgcttatcacctttctcttgaaacatcattctttgcagatgaaggtgcaacacttcctaaattgccctcgagacatgtggtagttgatccagatacaaggaattgtacaaatagcaattcagctgcattgaccaatgttggtatgcctcatggacgtaaatcagaacatgacaaactctcacagactgctatggtcaacattatgtttgaaaatacccctgtgtcacctagttcattgccatcgaatggagaaggccacatgtttgtgggtgcatgtcagcataaagaaactgaatattctgttgatcataagaactcttgtgaacattgtgtatcccgtgcaactggttcatgcaacgggtatgaaacatctttatgttcatcagataatgattcaatgacacagaatcaaaatttgcagaactctgcaaagcttacatcaaatgctcaccaatatgagtttccagcaaaggaatgtcaacaagtagaccactgggatagacaaccacatgatgatcaatcagtagatcagcgggacctgaataaattttctggtgaatactttcctggttctgacaatcatcagagcatattagtttcgttgtccagtacgtgtatcccaaaaggcttggtatgcgagcgctcccatcttttccgcatcaagttttatggtagctttgataagccacttggtagatacctccgggacgacttatttgatgaggcatatcgctgtcagtcatgcaaagagccatcagaatcacatattaggcgttatactcaccagcatggtagcttaacaattagtgttcggaggcttcaatctcgaaagttgcctggtgagcgtgacggaaggatatggatgtggcacaggtgcctcaagtgcaaacctaaggatggtgttccacctgccacacggaggataatcatgtcagatgctgcctggggtctgtcgcttgggaaattcctagagctaagtttctcaaaccatgcttctgccaaccgagttgcaagctgtggacattcactccagagggactgccttcgtttttatgggtatggaaacatggtggcattcttcagatattctcctgttgacattctctcagttaaccttcctccaccagtactggacttcaattgttgtagtacacaagagtggctaaaaagggtggcagttgagatatttggcaaaatggaatccttgcatgtggaggtgtctgaatttcttcactgtactgaaaagaacattgtaactgaggatgaacctgtgagggaatgtgttcaaaggcagattatcgagatgaaggattggcttaaaatgcaaagaaatgaatatgagatgttgcttttaccagtcatgagggaaagcaatcaccccatgcagacatcaattgatattctggagctcaaccgcttgcggcgtggtcttcttcttgatgcttacatttgggatcggaggctatgccatatagactcggttcttaatacacatggccatatttcaaaaaccaatccagataatcttgatattctcctatgcaccagactgaaggagtggaaagctgatttgctttgtggggatactgagattgaaaaatctttagggagtccaaagaaatctttgttatccagagagggccatttgaatgataatgagtacagtgttgctgatacaaatttagagatttgtttggagggtcatcctgtggatgatgcagatgatcttgacaaagtctacaacaaattcagtggagtaaagaagcggcctactgctgaacctactgatggcttggaacctgttgagaggttaccctcacttgcatccattttctctgatactattgatttggcatggactgggtcttgtgatttgcagcatgatcttccacaagctttcaccaaaattgatgaaaatgtatcctttaatttggacagtccgaagtacagcaatttagtaacccctgttagaattcactcgtttagttctacgctggggttgcggcagagagaacgaactggattagttccagcttctttgcatctatcatcattcaaatctgctgagtacttcggagctatgagaagcatcctgaaggacccaatgccaaatatgcgaaggtcctgttctcaaaggtctcctgggacgatagagaaattaaatgttgttcttgcacgtaaacccacatatatctcatctacttcaaatattatcaatgatggggcacggctactgttaccccagactggatatgaacatgatgtcgttgttgcagtatacgaggatgagcccaccagtattatatcatatgccatgacatcagaagaatatgtagaacaagtaacacacagactgaattccagtttgagtttttctcatcaaccaaatactaatgggattagcagccatggacttgaggcgtcctctccatctcaaggagaccatttgcattccaagggaactcattttaagttatccttcgatgatgactcaccgatttctccagataaaacaaagttctctgtgatttgctattttgcaaagcattttgctgcgctgagaaagaaatgctgtcccaaagatattgattacatacgttctctaagtcgctgcaagagatggaacgcgcagggtggaaaaagcaatgtttactttgcaaagacactggatgaaaggttcataatcaaacaagtcacgagaacagagctggagtcttttgtagagtttgctcctcagtacttcaagtatttaatggaatccttggcttctggtagcccaacctgcctggccaaaatagtagggttatatcaggttggcgtcaagagcttgaaaactgggaaggaagtgaggatggatctgatggtgatggaaaatgttttctttgaaaggaagatatctcgggtgtatgacctaaagggttcattgcgctcacgctacacggctggggacagcaaagtcctcttggatgcaaacctcatagaggcattgcatacgaagcctatatttttggggagcaaggcaaaacgaagattggaaagagctgtctggaatgatacttcattccttgcgttggcggatgtgatggactactctctccttgttggcatcgacgaggagaagaaagagctcgtcatcggcatcatcgactacttgcgccaatacacctgggacaagcagctggagacgtgggtgaaggcctcgggcattcttggtggccccaagaacgaatcccccaccgtcatatctccaatgcagtacaagaagaggttcaggaaagccatgtccaagtacttcctcaccgtcccggaccagtggtcctcttgacggcctggctagctaacaagaattgtccgccttaaccagaagcgtttgccgtgccatgccatgccatgccatagtacatgtccgtcattctttctgtgcctagaccctagagagagagagagagagagagagaggtagtcaaattcattttgtgtccgcctgtaccatctgtagcagccatagataggggatcatcctccgactggggatgctggatgccaagcatatggtcactgcagtgtccagccacagatagagaggcttggtccatgactcccatctccatgtacattacggccagcatataatatgtctgaggagaaaaaaaaaggaaatctgtcgacgaaatgcagagaattcttttgatgcctttgtggcatgtatgcagactgtgaaggctattgcaatgtgtcacccccccgtaatttcgttgggagtagttgcggttcacctgccgtgagagtgaaagctattgcatgtatcactgagctcttgacggttcttgtcaaatactcctagttaagtttcacgcaacaatcagacatcatcttcttcgagtaatagtacactaacagtatggctac

SEQ ID NO: 206841 - DNA, 5879 bp, Zea Mays
ctctaatccgcccgccattactttcgcagacgccgctcttcgctcgctcaccgccgcttccttccacgggccatttcgtctccgtcgcccatgctcacctccttcaactctgtgaacccgcgatccgacgtgtagtgccgccgtactgcgcggcgacggcccaccggcgaggagccgccgacctatgcccctcggccagtccggcattggctaacccccaaatgcctcccgccgctaactagccgcagcctgtacatacacagacagacagacatacacaccgtaccggaggttgaagcggagaatcgatcccgacgcttcgccgccgctgtctcgtcgccggagaggagttttagcctcaaaggcgtgattttttgccttgttattttctagcttttttctttcgtgatttttggaccgtgttctcgcgatcgcgccggagagatgggagttgtggacttctcggtgctgggcgctctgcagaaggtcagatccttcgtcgccggcgccacgccggctgaagccgcagacggccggctgcccgccacgccgaggtcgcgcagcggggggccctccccagagaactcgcccccgcccgcggcgacgagatccggaggcaggcgcgccatcgccctgcgccggcagatatcctcgccggagctgctccgctgccgcgctgtcaggcgagcagatgatgaggatgatgatgagcccggggttcagtttttcacccatgggaatgacttcttacatgacttctcagatacagaatctgttagtgttagtacccctaatgatatcaaccgctccctgaccccaagccccttggagagcccgacttggatggtgaagcagaacgacagctcaccaatatccaggaagaatggccgtttcagcccggattctcctggatatggtacaaaggcaagtttaggatctgatggttcgccgcaacagataaatggtagcgtcactgacagtggtgacggaagcaaaactcagtatcctgttgaatttggtgccaatatatggtgcccaccaccaccagaagatgagggcgatgatatcgaatcgaggttatttggattccaggacgaggatgatgaggctggggactcaagcgggcttcttgtttctggtagctttagtgctaacaaaatagctgctattgacgaggtcacaaacactgctcaggaagagtgtctgaagactgcggtgctcggccatttccgagctcttgtggctcaattactgaaggcagaaggcattgatatgggaaaggatgatgggtccaaaggttggcttgatattgtgtcatccttaacttggcaagctgcaagctatgtgaggccagataccaagaaaggaggcagcatggatcctactgattatgtgaaggtcaaatgtatagcatcaggggatccaagagatagtaattttgttcgaggagttgtttgctccaagaatgtaaaacacaagcgcatggtctctgagcataggaatgcaaaattgctcattttagggggcgcacttgagtaccacagggttcctaataaattggcatctattggcaggatacttgaacaggagaaggagcacatgaaaatgattgttggaaagattgagtcccggcgacctaatgttgtgctagttgagaaaactgtctcatcttctgctcaggagctcttctccaaagacatttcgttagttctgaatgttaagaggacacttttggacagggtatcaaggtgcacaggggcacaaattgcttcatcagctgacagtattgcttcagtacggctaggtcaatgtgaagcgttcaaggtgcaaaaagttacagaattcccatcagctaaacagacaaataggagatcaagcaagacactgatgttctttgaaggctgcccttggcgtttgggttgcacggttctactgagagggtcatgtcgggaggagctcaagaggattaagcgtgctgtacaacttgcagtctttgctgcttatcacctttctcttgaaacatcattctttgcagatgaaggtgcaacacttcctaaattgccctcgagacatgtggtagttgatccagatacaaggaattgtacaaatagcaattcagctgcattgaccaatgttggtatgcctcatggacgtaaatcagaacatgacaaactctcacagactgctatggtcaacattatgtttgaaaatacccctgtgtcacctagttcattgccatcgaatggagaaggccacatgtttgtgggtgcatgtcagcataaagaaactgaatattctgttgatcataagaactcttgtgaacattgtgtatcccgtgcaactggttcatgcaacgggtatgaaacatctttatgttcatcagataatgattcaatgacacagaatcaaaatttgcagaactctgcaaagcttacatcaaatgctcaccaatatgagtttccagcaaaggaatgtcaacaagtagaccactgggatagacaaccacatgatgatcaatcagtagatcagcgggacctgaataaattttctggtgaatactttcctggttctgacaatcatcagagcatattagtttcgttgtccagtacgtgtatcccaaaaggcttggtatgcgagcgctcccatcttttccgcatcaagttttatggtagctttgataagccacttggtagatacctccgggacgacttatttgatgaggcatatcgctgtcagtcatgcaaagagccatcagaatcacatattaggcgttatactcaccagcatggtagcttaacaattagtgttcggaggcttcaatctcgaaagttgcctggtgagcgtgacggaaggatatggatgtggcacaggtgcctcaagtgcaaacctaaggatggtgttccacctgccacacggaggataatcatgtcagatgctgcctggggtctgtcgcttgggaaattcctagagctaagtttctcaaaccatgcttctgccaaccgagttgcaagctgtggacattcactccagagggactgccttcgtttttatggatattctcctgttgacattctctcagttaaccttcctccaccagtactggacttcaattgttgtagtacacaagagtggctaaaaagggtggcagttgagatatttggcaaaatggaatccttgcatgtggaggtgtctgaatttcttcactgtactgaaaagaacattgtaactgaggatgaacctgtgagggaatgtgttcaaaggcagattatcgagatgaaggattggcttaaaatgcaaagaaatgaatatgagatgttgcttttaccagtcatgagggaaagcaatcaccccatgcagacatcaattgatattctggagctcaaccgcttgcggcgtggtcttcttcttgatgcttacatttgggatcggaggctatgccatatagactcggttcttaatacacatggccatatttcaaaaaccaatccagataatcttgatattctcctatgcaccagactgaaggagtggaaagctgatttgctttgtggggatactgagattgaaaaatctttagggagtccaaagaaatctttgttatccagagagggccatttgaatgataatgagtacagtgttgctgatacaaatttagagatttgtttggagggtcatcctgtggatgatgcagatgatcttgacaaagtctacaacaaattcagtggagtaaagaagcggcctactgctgaacctactgatggcttggaacctgttgagaggttaccctcacttgcatccattttctctgatactattgatttggcatggactgggtcttgtgatttgcagcatgatcttccacaagctttcaccaaaattgatgaaaatgtatcctttaatttggacagtccgaagtacagcaatttagtaacccctgttagaattcactcgtttagttctacgctggggttgcggcagagagaacgaactggattagttccagcttctttgcatctatcatcattcaaatctgctgagtacttcggagctatgagaagcatcctgaaggacccaatgccaaatatgcgaaggtcctgttctcaaaggtctcctgggacgatagagaaattaaatgttgttcttgcacgtaaacccacatatatctcatctacttcaaatattatcaatgatggggcacggctactgttaccccagactggatatgaacatgatgtcgttgttgcagtatacgaggatgagcccaccagtattatatcatatgccatgacatcagaagaatatgtagaacaagtaacacacagactgaattccagtttgagtttttctcatcaaccaaatactaatgggattagcagccatggacttgaggcgtcctctccatctcaaggagaccatttgcattccaagggaactcattttaagttatccttcgatgatgactcaccgatttctccagataaaacaaagttctctgtgatttgctattttgcaaagcattttgctgcgctgagaaagaaatgctgtcccaaagatattgattacatacgttctctaagtcgctgcaagagatggaacgcgcagggtggaaaaagcaatgtttactttgcaaagacactggatgaaaggttcataatcaaacaagtcacgagaacagagctggagtcttttgtagagtttgctcctcagtacttcaagtatttaatggaatccttggcttctggtagcccaacctgcctggccaaaatagtagggttatatcaggttggcgtcaagagcttgaaaactgggaaggaagtgaggatggatctgatggtgatggaaaatgttttctttgaaaggaagatatctcgggtgtatgacctaaagggttcattgcgctcacgctacacggctggggacagcaaagtcctcttggatgcaaacctcatagaggcattgcatacgaagcctatatttttggggagcaaggcaaaacgaagattggaaagagctgtctggaatgatacttcattccttgcgttggcggatgtgatggactactctctccttgttggcatcgacgaggagaagaaagagctcgtcatcggcatcatcgactacttgcgccaatacacctgggacaagcagctggagacgtgggtgaaggcctcgggcattcttggtggccccaagaacgaatcccccaccgtcatatctccaatgcagtacaagaagaggttcaggaaagccatgtccaagtacttcctcaccgtcccggaccagtggtcctcttgacggcctggctagctaacaagaattgtccgccttaaccagaagcgtttgccgtgccatgccatgccatgccatagtacatgtccgtcattctttctgtgcctagaccctagagagagagagagagagagagagaggtagtcaaattcattttgtgtccgcctgtaccatctgtagcagccatagataggggatcatcctccgactggggatgctggatgccaagcatatggtcactgcagtgtccagccacagatagagaggcttggtccatgactcccatctccatgtacattacggccagcatataatatgtctgaggagaaaaaaaaaggaaatctgtcgacgaaatgcagagaattcttttgatgcctttgtggcatgtatgcagactgtgaaggctattgcaatgtgtcacccccccgtaatttcgttgggagtagttgcggttcacctgccgtgagagtgaaagctattgcatgtatcactgagctcttgacggttcttgtcaaatactcctagttaagtttcacgcaacaatcagacatcatcttcttcgagtaatagtacactaacagtatggctac

SEQ ID NO: 206842 - DNA, 5910 bp, Zea Mays
ctctaatccgcccgccattactttcgcagacgccgctcttcgctcgctcaccgccgcttccttccacgggccatttcgtctccgtcgcccatgctcacctccttcaactctgtgaacccgcgatccgacgtgtagtgccgccgtactgcgcggcgacggcccaccggcgaggagccgccgacctatgcccctcggccagtccggcattggctaacccccaaatgcctcccgccgctaactagccgcagcctgtacatacacagacagacagacatacacaccgtaccggaggttgaagcggagaatcgatcccgacgcttcgccgccgctgtctcgtcgccggagaggagttttagcctcaaaggcgtgattttttgccttgttattttctagcttttttctttcgtgatttttggaccgtgttctcgcgatcgcgccggagagatgggagttgtggacttctcggtgctgggcgctctgcagaaggtcagatccttcgtcgccggcgccacgccggctgaagccgcagacggccggctgcccgccacgccgaggtcgcgcagcggggggccctccccagagaactcgcccccgcccgcggcgacgagatccggaggcaggcgcgccatcgccctgcgccggcagatatcctcgccggagctgctccgctgccgcgctgtcaggcgagcagatgatgaggatgatgatgagcccggggttcagtttttcacccatgggaatgacttcttacatgacttctcagatacagaatctgttagtgttagtacccctaatgatatcaaccgctccctgaccccaagccccttggagagcccgacttggatggtgaagcagaacgacagctcaccaatatccaggaagaatggccgtttcagcccggattctcctggatatggtacaaaggcaagtttaggatctgatggttcgccgcaacagataaatggtagcgtcactgacagtggtgacggaagcaaaactcagtatcctgttgaatttggtgccaatatatggtgcccaccaccaccagaagatgagggcgatgatatcgaatcgaggttatttggattccaggacgaggatgatgaggctggggactcaagcgggcttcttgtttctggtagctttagtgctaacaaaatagctgctattgacgaggtcacaaacactgctcaggaagagtgtctgaagactgcggtgctcggccatttccgagctcttgtggctcaattactgaaggcagaaggcattgatatgggaaaggatgatgggtccaaaggttggcttgatattgtgtcatccttaacttggcaagctgcaagctatgtgaggccagataccaagaaaggaggcagcatggatcctactgattatgtgaaggtcaaatgtatagcatcaggggatccaagagatagtaattttgttcgaggagttgtttgctccaagaatgtaaaacacaagcgcatggtctctgagcataggaatgcaaaattgctcattttagggggcgcacttgagtaccacagggttcctaataaattggcatctattggcaggatacttgaacagacaggagaaggagcacatgaaaatgattgttggaaagattgagtcccggcgacctaatgttgtgctagttgagaaaactgtctcatcttctgctcaggagctcttctccaaagacatttcgttagttctgaatgttaagaggacacttttggacagggtatcaaggtgcacaggggcacaaattgcttcatcagctgacagtattgcttcagtacggctaggtcaatgtgaagcgttcaaggtgcaaaaagttacagaattcccatcagctaaacagacaaataggagatcaagcaagacactgatgttctttgaaggctgcccttggcgtttgggttgcacggttctactgagagggtcatgtcgggaggagctcaagaggattaagcgtgctgtacaacttgcagtctttgctgcttatcacctttctcttgaaacatcattctttgcagatgaaggtgcaacacttcctaaattgccctcgagacatgtggtagttgatccagatacaaggaattgtacaaatagcaattcagctgcattgaccaatgttggtatgcctcatggacgtaaatcagaacatgacaaactctcacagactgctatggtcaacattatgtttgaaaatacccctgtgtcacctagttcattgccatcgaatggagaaggccacatgtttgtgggtgcatgtcagcataaagaaactgaatattctgttgatcataagaactcttgtgaacattgtgtatcccgtgcaactggttcatgcaacgggtatgaaacatctttatgttcatcagataatgattcaatgacacagaatcaaaatttgcagaactctgcaaagcttacatcaaatgctcaccaatatgagtttccagcaaaggaatgtcaacaagtagaccactgggatagacaaccacatgatgatcaatcagtagatcagcgggacctgaataaattttctggtgaatactttcctggttctgacaatcatcagagcatattagtttcgttgtccagtacgtgtatcccaaaaggcttggtatgcgagcgctcccatcttttccgcatcaagttttatggtagctttgataagccacttggtagatacctccgggacgacttatttgatgaggcatatcgctgtcagtcatgcaaagagccatcagaatcacatattaggcgttatactcaccagcatggtagcttaacaattagtgttcggaggcttcaatctcgaaagttgcctggtgagcgtgacggaaggatatggatgtggcacaggtgcctcaagtgcaaacctaaggatggtgttccacctgccacacggaggataatcatgtcagatgctgcctggggtctgtcgcttgggaaattcctagagctaagtttctcaaaccatgcttctgccaaccgagttgcaagctgtggacattcactccagagggactgccttcgtttttatgggtatggaaacatggtggcattcttcagatattctcctgttgacattctctcagttaaccttcctccaccagtactggacttcaattgttgtagtacacaagagtggctaaaaagggtggcagttgagatatttggcaaaatggaatccttgcatgtggaggtgtctgaatttcttcactgtactgaaaagaacattgtaactgaggatgaacctgtgagggaatgtgttcaaaggcagattatcgagatgaaggattggcttaaaatgcaaagaaatgaatatgagatgttgcttttaccagtcatgagggaaagcaatcaccccatgcagacatcaattgatattctggagctcaaccgcttgcggcgtggtcttcttcttgatgcttacatttgggatcggaggctatgccatatagactcggttcttaatacacatggccatatttcaaaaaccaatccagataatcttgatattctcctatgcaccagactgaaggagtggaaagctgatttgctttgtggggatactgagattgaaaaatctttagggagtccaaagaaatctttgttatccagagagggccatttgaatgataatgagtacagtgttgctgatacaaatttagagatttgtttggagggtcatcctgtggatgatgcagatgatcttgacaaagtctacaacaaattcagtggagtaaagaagcggcctactgctgaacctactgatggcttggaacctgttgagaggttaccctcacttgcatccattttctctgatactattgatttggcatggactgggtcttgtgatttgcagcatgatcttccacaagctttcaccaaaattgatgaaaatgtatcctttaatttggacagtccgaagtacagcaatttagtaacccctgttagaattcactcgtttagttctacgctggggttgcggcagagagaacgaactggattagttccagcttctttgcatctatcatcattcaaatctgctgagtacttcggagctatgagaagcatcctgaaggacccaatgccaaatatgcgaaggtcctgttctcaaaggtctcctgggacgatagagaaattaaatgttgttcttgcacgtaaacccacatatatctcatctacttcaaatattatcaatgatggggcacggctactgttaccccagactggatatgaacatgatgtcgttgttgcagtatacgaggatgagcccaccagtattatatcatatgccatgacatcagaagaatatgtagaacaagtaacacacagactgaattccagtttgagtttttctcatcaaccaaatactaatgggattagcagccatggacttgaggcgtcctctccatctcaaggagaccatttgcattccaagggaactcattttaagttatccttcgatgatgactcaccgatttctccagataaaacaaagttctctgtgatttgctattttgcaaagcattttgctgcgctgagaaagaaatgctgtcccaaagatattgattacatacgttctctaagtcgctgcaagagatggaacgcgcagggtggaaaaagcaatgtttactttgcaaagacactggatgaaaggttcataatcaaacaagtcacgagaacagagctggagtcttttgtagagtttgctcctcagtacttcaagtatttaatggaatccttggcttctggtagcccaacctgcctggccaaaatagtagggttatatcaggttggcgtcaagagcttgaaaactgggaaggaagtgaggatggatctgatggtgatggaaaatgttttctttgaaaggaagatatctcgggtgtatgacctaaagggttcattgcgctcacgctacacggctggggacagcaaagtcctcttggatgcaaacctcatagaggcattgcatacgaagcctatatttttggggagcaaggcaaaacgaagattggaaagagctgtctggaatgatacttcattccttgcgttggcggatgtgatggactactctctccttgttggcatcgacgaggagaagaaagagctcgtcatcggcatcatcgactacttgcgccaatacacctgggacaagcagctggagacgtgggtgaaggcctcgggcattcttggtggccccaagaacgaatcccccaccgtcatatctccaatgcagtacaagaagaggttcaggaaagccatgtccaagtacttcctcaccgtcccggaccagtggtcctcttgacggcctggctagctaacaagaattgtccgccttaaccagaagcgtttgccgtgccatgccatgccatgccatagtacatgtccgtcattctttctgtgcctagaccctagagagagagagagagagagagagaggtagtcaaattcattttgtgtccgcctgtaccatctgtagcagccatagataggggatcatcctccgactggggatgctggatgccaagcatatggtcactgcagtgtccagccacagatagagaggcttggtccatgactcccatctccatgtacattacggccagcatataatatgtctgaggagaaaaaaaaaggaaatctgtcgacgaaatgcagagaattcttttgatgcctttgtggcatgtatgcagactgtgaaggctattgcaatgtgtcacccccccgtaatttcgttgggagtagttgcggttcacctgccgtgagagtgaaagctattgcatgtatcactgagctcttgacggttcttgtcaaatactcctagttaagtttcacgcaacaatcagacatcatcttcttcgagtaatagtacactaacagtatggctac

SEQ ID NO: 206843 - DNA, 5351 bp, Zea Mays
ctacgatctagcaattaataataagttcgctaaaagtctctgccttttttaaaatttgaggtagaacttggtcttgaagaagacagaatgaaaacttgtgactggcaattaagtggttgcgggagcaagcgagcagatgatgaggatgatgatgagcccggggttcagtttttcacccatgggaatgacttcttacatgacttctcagatacagaatctgttagtgttagtacccctaatgatatcaaccgctccctgaccccaagccccttggagagcccgacttggatggtgaagcagaacgacagctcaccaatatccaggaagaatggccgtttcagcccggattctcctggatatggtacaaaggcaagtttaggatctgatggttcgccgcaacagataaatggtagcgtcactgacagtggtgacggaagcaaaactcagtatcctgttgaatttggtgccaatatatggtgcccaccaccaccagaagatgagggcgatgatatcgaatcgaggttatttggattccaggacgaggatgatgaggctggggactcaagcgggcttcttgtttctggtagctttagtgctaacaaaatagctgctattgacgaggtcacaaacactgctcaggaagagtgtctgaagactgcggtgctcggccatttccgagctcttgtggctcaattactgaaggcagaaggcattgatatgggaaaggatgatgggtccaaaggttggcttgatattgtgtcatccttaacttggcaagctgcaagctatgtgaggccagataccaagaaaggaggcagcatggatcctactgattatgtgaaggtcaaatgtatagcatcaggggatccaagagatagtaattttgttcgaggagttgtttgctccaagaatgtaaaacacaagcgcatggtctctgagcataggaatgcaaaattgctcattttagggggcgcacttgagtaccacagggttcctaataaattggcatctattggcaggatacttgaacaggagaaggagcacatgaaaatgattgttggaaagattgagtcccggcgacctaatgttgtgctagttgagaaaactgtctcatcttctgctcaggagctcttctccaaagacatttcgttagttctgaatgttaagaggacacttttggacagggtatcaaggtgcacaggggcacaaattgcttcatcagctgacagtattgcttcagtacggctaggtcaatgtgaagcgttcaaggtgcaaaaagttacagaattcccatcagctaaacagacaaataggagatcaagcaagacactgatgttctttgaaggctgcccttggcgtttgggttgcacggttctactgagagggtcatgtcgggaggagctcaagaggattaagcgtgctgtacaacttgcagtctttgctgcttatcacctttctcttgaaacatcattctttgcagatgaaggtgcaacacttcctaaattgccctcgagacatgtggtagttgatccagatacaaggaattgtacaaatagcaattcagctgcattgaccaatgttggtatgcctcatggacgtaaatcagaacatgacaaactctcacagactgctatggtcaacattatgtttgaaaatacccctgtgtcacctagttcattgccatcgaatggagaaggccacatgtttgtgggtgcatgtcagcataaagaaactgaatattctgttgatcataagaactcttgtgaacattgtgtatcccgtgcaactggttcatgcaacgggtatgaaacatctttatgttcatcagataatgattcaatgacacagaatcaaaatttgcagaactctgcaaagcttacatcaaatgctcaccaatatgagtttccagcaaaggaatgtcaacaagtagaccactgggatagacaaccacatgatgatcaatcagtagatcagcgggacctgaataaattttctggtgaatactttcctggttctgacaatcatcagagcatattagtttcgttgtccagtacgtgtatcccaaaaggcttggtatgcgagcgctcccatcttttccgcatcaagttttatggtagctttgataagccacttggtagatacctccgggacgacttatttgatgaggcatatcgctgtcagtcatgcaaagagccatcagaatcacatattaggcgttatactcaccagcatggtagcttaacaattagtgttcggaggcttcaatctcgaaagttgcctggtgagcgtgacggaaggatatggatgtggcacaggtgcctcaagtgcaaacctaaggatggtgttccacctgccacacggaggataatcatgtcagatgctgcctggggtctgtcgcttgggaaattcctagagctaagtttctcaaaccatgcttctgccaaccgagttgcaagctgtggacattcactccagagggactgccttcgtttttatgggtatggaaacatggtggcattcttcagatattctcctgttgacattctctcagttaaccttcctccaccagtactggacttcaattgttgtagtacacaagagtggctaaaaagggtggcagttgagatatttggcaaaatggaatccttgcatgtggaggtgtctgaatttcttcactgtactgaaaagaacattgtaactgaggatgaacctgtgagggaatgtgttcaaaggcagattatcgagatgaaggattggcttaaaatgcaaagaaatgaatatgagatgttgcttttaccagtcatgagggaaagcaatcaccccatgcagacatcaattgatattctggagctcaaccgcttgcggcgtggtcttcttcttgatgcttacatttgggatcggaggctatgccatatagactcggttcttaatacacatggccatatttcaaaaaccaatccagataatcttgatattctcctatgcaccagactgaaggagtggaaagctgatttgctttgtggggatactgagattgaaaaatctttagggagtccaaagaaatctttgttatccagagagggccatttgaatgataatgagtacagtgttgctgatacaaatttagagatttgtttggagggtcatcctgtggatgatgcagatgatcttgacaaagtctacaacaaattcagtggagtaaagaagcggcctactgctgaacctactgatggcttggaacctgttgagaggttaccctcacttgcatccattttctctgatactattgatttggcatggactgggtcttgtgatttgcagcatgatcttccacaagctttcaccaaaattgatgaaaatgtatcctttaatttggacagtccgaagtacagcaatttagtaacccctgttagaattcactcgtttagttctacgctggggttgcggcagagagaacgaactggattagttccagcttctttgcatctatcatcattcaaatctgctgagtacttcggagctatgagaagcatcctgaaggacccaatgccaaatatgcgaaggtcctgttctcaaaggtctcctgggacgatagagaaattaaatgttgttcttgcacgtaaacccacatatatctcatctacttcaaatattatcaatgatggggcacggctactgttaccccagactggatatgaacatgatgtcgttgttgcagtatacgaggatgagcccaccagtattatatcatatgccatgacatcagaagaatatgtagaacaagtaacacacagactgaattccagtttgagtttttctcatcaaccaaatactaatgggattagcagccatggacttgaggcgtcctctccatctcaaggagaccatttgcattccaagggaactcattttaagttatccttcgatgatgactcaccgatttctccagataaaacaaagttctctgtgatttgctattttgcaaagcattttgctgcgctgagaaagaaatgctgtcccaaagatattgattacatacgttctctaagtcgctgcaagagatggaacgcgcagggtggaaaaagcaatgtttactttgcaaagacactggatgaaaggttcataatcaaacaagtcacgagaacagagctggagtcttttgtagagtttgctcctcagtacttcaagtatttaatggaatccttggcttctggtagcccaacctgcctggccaaaatagtagggttatatcaggttggcgtcaagagcttgaaaactgggaaggaagtgaggatggatctgatggtgatggaaaatgttttctttgaaaggaagatatctcgggtgtatgacctaaagggttcattgcgctcacgctacacggctggggacagcaaagtcctcttggatgcaaacctcatagaggcattgcatacgaagcctatatttttggggagcaaggcaaaacgaagattggaaagagctgtctggaatgatacttcattccttgcgttggcggatgtgatggactactctctccttgttggcatcgacgaggagaagaaagagctcgtcatcggcatcatcgactacttgcgccaatacacctgggacaagcagctggagacgtgggtgaaggcctcgggcattcttggtggccccaagaacgaatcccccaccgtcatatctccaatgcagtacaagaagaggttcaggaaagccatgtccaagtacttcctcaccgtcccggaccagtggtcctcttgacggcctggctagctaacaagaattgtccgccttaaccagaagcgtttgccgtgccatgccatgccatgccatagtacatgtccgtcattctttctgtgcctagaccctagagagagagagagagagagagagaggtagtcaaattcattttgtgtccgcctgtaccatctgtagcagccatagataggggatcatcctccgactggggatgctggatgccaagcatatggtcactgcagtgtccagccacagatagagaggcttggtccatgactcccatctccatgtacattacggccagcatataatatgtctgaggagaaaaaaaaaggaaatctgtcgacgaaatgcagagaattcttttgatgcctttgtggcatgtatgcagactgtgaaggctattgcaatgtgtcacccccccgtaatttcgttgggagtagttgcggttcacctgccgtgagagtgaaagctattgcatgtatcactgagctcttgacggttcttgtcaaatactcctagttaagtttcacgcaacaatcagacatcatcttcttcgagtaatagtacactaacagtatggctac

SEQ ID NO: 206844 - DNA, 3329 bp, Zea Mays
aattgcttcatcagctgacagtattgcttcagtacggctaggtcaatgtgaagcgttcaaggtgcaaaaagttacagaattcccatcagctaaacagacaaataggagatcaagcaagacactgatgttctttgaaggctgcccttggcgtttgggttgcacggttctactgagagggtcatgtcgggaggagctcaagaggattaagcgtgctgtacaacttgcagtctttgctgcttatcacctttctcttgaaacatcattctttgcagatgaaggtgcaacacttcctaaattgccctcgagacatgtggtagttgatccagatacaaggaattgtacaaatagcaattcagctgcattgaccaatgttggtatgcctcatggacgtaaatcagaacatgacaaactctcacagactgctatggtcaacattatgtttgaaaatacccctgtgtcacctagttcattgccatcgaatggagaaggccacatgtttgtgggtgcatgtcagcataaagaaactgaatattctgttgatcataagaactcttgtgaacattgtgtatcccgtgcaactggttcatgcaacgggtatgaaacatctttatgttcatcagataatgattcaatgacacagaatcaaaatttgcagaactctgcaaagcttacatcaaatgctcaccaatatgagtttccagcaaaggaatgtcaacaagtagaccactgggatagacaaccacatgatgatcaatcagtagatcagcgggacctgaataaattttctggtgaatactttcctggttctgacaatcatcagagcatattagtttcgttgtccagtacgtgtatcccaaaaggcttggtatgcgagcgctcccatcttttccgcatcaagttttatggtagctttgataagccacttggtagatacctccgggacgacttatttgatgaggcatatcgctgtcagtcatgcaaagagccatcagaatcacatattaggcgttatactcaccagcatggtagcttaacaattagtgttcggaggcttcaatctcgaaagttgcctggtgagcgtgacggaaggatatggatgtggcacaggtgcctcaagtgcaaacctaaggatggtgttccacctgccacacggaggataatcatgtcagatgctgcctggggtctgtcgcttgggaaattcctagagctaagtttctcaaaccatgcttctgccaaccgagttgcaagctgtggacattcactccagagggactgccttcgtttttatgggtatggaaacatggtggcattcttcagatattctcctgttgacattctctcagttaaccttcctccaccagtactggacttcaattgttgtagtacacaagagtggctaaaaagggtggcagttgagatatttggcaaaatggaatccttgcatgtggaggtgtctgaatttcttcactgtactgaaaagaacattgtaactgaggatgaacctgtgagggaatgtgttcaaaggcagattatcgagatgaaggattggcttaaaatgcaaagaaatgaatatgagatgttgcttttaccagtcatgagggaaagcaatcaccccatgcagacatcaattgatattctggagctcaaccgcttgcggcgtggtcttcttcttgatgcttacatttgggatcggaggctatgccatatagactcggttcttaatacacatggccatatttcaaaaaccaatccagataatcttgatattctcctatgcaccagactgaaggagtggaaagctgatttgctttgtggggatactgagattgaaaaatctttagggagtccaaagaaatctttgttatccagagagggccatttgaatgataatgagtacagtgttgctgatacaaatttagagatttgtttggagggtcatcctgtggatgatgcagatgatcttgacaaagtctacaacaaattcagtggagtaaagaagcggcctactgctgaacctactgatggcttggaacctgttgagaggttaccctcacttgcatccattttctctgatactattgatttggcatggactgggtcttgtgatttgcagcatgatcttccacaagctttcaccaaaattgatgaaaatgtatcctttaatttggacagtccgaagtacagcaatttagtaacccctgttagaattcactcgtttagttctacgctggggttgcggcagagagaacgaactggattagttccagcttctttgcatctatcatcattcaaatctgctgagtacttcggagctatgagaagcatcctgaaggacccaatgccaaatatgcgaaggtcctgttctcaaaggtctcctgggacgatagagaaattaaatgttgttcttgcacgtaaacccacatatatctcatctacttcaaatattatcaatgatggggcacggctactgttaccccagactggatatgaacatgatgtcgttgttgcagtatacgaggatgagcccaccagtattatatcatatgccatgacatcagaagaatatgtagaacaagtaacacacagactgaattccagtttgagtttttctcatcaaccaaatactaatgggattagcagccatggacttgaggcgtcctctccatctcaaggagaccatttgcattccaagggaactcattttaagttatccttcgatgatgactcaccgatttctccagataaaacaaagttctctgtgatttgctattttgcaaagcattttgctgcgctgagaaagaaatgctgtcccaaagatattgattacatacgttctctaagtcgctgcaagagatggaacgcgcagggtggaaaaagcaatgtttactttgcaaagacactggatgaaaggttcataatcaaacaagtcacgagaacagagctggagtcttttgtagagtttgctcctcagtacttcaagtatttaatggaatccttggcttctggtagcccaacctgcctggccaaaatagtagggttatatcaggttggcgtcaagagcttgaaaactgggaaggaagtgaggatggatctgatggtgatggaaaatgttttctttgaaaggaagatatctcgggtgtatgacctaaagggttcattgcgctcacgctacacggctggggacagcaaagtcctcttggatgcaaacctcatagaggcattgcatacgaagcctatatttttggggagcaaggcaaaacgaagattggaaagagctgtctggaatgatacttcattccttgcgatatgtaattgttacataattgttt

SEQ ID NO: 206845 - DNA, 2976 bp, Zea Mays
gcaactagcagctatttatatgccccagcctctgtgggccgtttgcactcactccaaagcaaagcaaatctctctctctctctccatctctccacacacagccccttcgctgccgaggtccctcgccggacggggggtgaaggacgaaggggaagaaaggtgcgcgggcatgctttccacaggctttcttgaactgtgaactcgtgggcgtggtggtggtggtgctggtgctgggtgtgtgggacggaatgattggctcctcccagtcccagtcccagtcccacccaccaattctcttccccccgaccggccgtgaattgaattgaatcgaatcgcatcgctgagcttccccccggctcgctcacgcgacctgttgatggttcaagaaagcccatggaaaccatgcagcctccctcctgtgcagctgtgctctggtggcggagaattccgccggttccgggtgagggaattcagcagaccagccaccccgatgcggattcgtgtgtggaggaggtgagttgtgtgtctcagatcgcttcccgtgttgttgtgggggttgaattctggtaggggacggtctcctggccttttgtttcggtgcgggtttcttgtgctagcttggatgtgaattttcgctgaagcagatgtcttgaggctttttctgtcttgcagagttgcagttgcagcgacgactccaactccaacgaggggatccacgcctggactgttctgttccaacgaggggatccaactccaactcagcggcaggcagctagctgtcctgttcgaaattcaaaacccggccagatccgtgcttgcgctgctcgccggggctgctttgtccactcaggccatcgatctccagttccatgtatgctccaattttgttcttgttttttttaaaacaaactcagttccagtacctgagcatgagtcacagcttggtttaggcgtgtggtggcgtttgctgggcagatcagttattactcctccactccacaccactgcaccggccggcaccgctggtaacgcacgcaggtaggcggccaaggccatgccaatgtcatgcagcgggattgatccatgcgtcgtccattggcgccctgccctcggctagctgcggctgtgctggaaagagatctggtggccgaggaggaggagaaggcgaggacgaggacgagggacagaaaagcagcaaaaggctcttgtggttggcatgcctacaaccaacgtcccaaccaggagcctgaaaaataatccccggcataaagccatgtgacaggcgacagcgatgccatctgatccgttccgttcggttccccccagcaaaccgtggtgaaaatcacgcggcccccgctctgccatctacccctgcacgagtacgacggtacggcggctgctcctgcaccctgcactgcaggccttctgcaacgcgggaggcgggaggggatttcgcgcgattcccgagggtgaggcaagaatatatggggttacaggctacagaagaggaagggggaagatctcagctcagaagcccagtcagagctggctagctagctgctcttgcttcatttcaccgccccaaattcagcatcgctcgtacttgctgctactttaatggtagtgtttggttgaggaggcaagtagaacggagccgttccatccctgattctaggaacggagtcgctctattctatgtttggtaatctggaacggagaggttctgttttttgtttggttgcagagtgaacggaacggagcgtcactgtgggagcgggatgggaacggaacggctccgttccgttgattttttggagcggaatggttccggatctgagtagaatattccctaattggagtaatgccgttgtagttactttgtaaccaaacagcaacaaaactggaacagaacggcttcgttctacttggctcttcaaccaaacactatcttactgcttgctttcgctttcccttccttcctagtagcaggcagcagtagttcctacttcctagcaggcagcagcagcagctatttatgcagcagcagtgtgagacgacacattgaaaagcatctgatcctaaaggcgagccaacagcaaagagacgagacgagccccgggcggcccctacgttcctagtacaacatcagagaagtgtgtgatggttgctggtggtggtgtcagatcagcaagcaccaggtcttcagtctcctgctccatcaggaggtagaggtagctcgctcgctaggagctagctgcggaggaaagcgtcgaccttggcgttggtgctgcgggacaggaacttcatgcagatggacggccggcttggcgccggcgagggccaacacagactgcggcagcgtccagatgccgtcgccgcagatgaggcccgacgcgacggggggcgcgaatgccttggcccgggccgggtccaggcggtcccacacgaggcgcaccaggctgccgaagtaggggccgaggtaaaaggggatggacatggccatggtccatggacagcgggatgtaggcggcggcgcgggcgcgcgcgaggtcgcgtgccatgttgatggcgatggcggcggcttagaatgcgatgcagaggtcgagtcagtagcggggcagggttactcggaccccagcatgccgatgtcgcggaacgcgctgtagaagagccagaacacggacggcgccaccacgcagcccatggccgtgccgatcacctggctcacgaacatggaccgcggcgacgccagcgtcatgtacccggtcttgaagtcctgcgtcaggtccgacgccgtcgacacgatgccgatcatcacgctgcacacgccgccagacccgcgatgatgccgccgccgccgtctccgtcgtcggaggccgccgcccagccgcctaccgtcaagatggtcagcttgccgtacgtcgtggccagggaccggtccgtgagcccgtacgtacgcgttgcagaaggccagca

SEQ ID NO: 206846 - DNA, 1146 bp, Zea Mays
acccgaatcacgcctccctttcctttctcctccctcactactcacacccctcacttttggcggcgccgactgggcacccgcgtcgaccttcgccaggtcttcgtcggccctttggctggaaacaagcatccaccaggaacaacgcaagggatgctcgattggctctagttacttagcagaaccaaaagaggaaggccatcaaagatacgagggctttttctcgccatgtctcggtcgccacacctcccaccccgctgcccacccctgggtcctcagatcactcgaagggatgacagcatgttcacgcagagctgcaggtttccatctggggatacgttctttagtgagccaccgtgctggctcgatgatctccttgcagattccgggaaagctcccaagcttcctcctctcagaagggcctgtagcgattctgatgccatcttggatgctctgtcaacatttgaaagcccaatttgtcgaattgaggaaggcaatcaaatctctggtggtgaagctgatgacttgttggatgctggcgaaggtggtgaaagcggttctgtggtcgaggctagctgtgtttatggtccgaattcaccaagacagaagagtaggctgacaacttcagagagttccatggtaaatgctgtgcttgagaatgtacccagcaaccccttgcagtacttgagcatcgatgcctccagcggtatgaatggtaatgtggccaatggaactgctgatacctgtgatgcttttggccaccctgatcaagacaagtcatttaaaaggcgttcaggccaaagatctagggtccggaaacttcaatacattgctgaacttgaaagaactgttgactcacttcagaacattggtgctgatttggctgtcagagtgtcatcacttttccagcttcataatgctctatctatggaaaacaagcagctgaggatacagatttctagtcttcagcgtgcaaaactgattaaggatggcttcatggatccacggggctatgctcgatggggtcaggatcgatggaccggggatggagagaacaactgcagtcggcgaagaaggacttgttcgactagcaggcaccggaaaagatcgagacgagtcggcgtcgaccattgtaatgattatatacta

SEQ ID NO: 206847 - DNA, 3582 bp, Zea Mays
gtgaagcgccctttgtctcgacgccgctgccgccgcaaagactcgcgattcgcgagagaagcggccgcagcagccgagcttctctcgcccccgccgctcctctcccactccaccaccgcgcttcagattccacaggtgagaggcaaaaggcaagagccgaagaagcgagccgaggcgccaccgctctcccgcctgcttcctccgccggcccggccgtcccggccggcgagcgagagccaacgaactgcgggccgaagcgaactgccggggccaccgtggggcggagatccgcaccggacctcccaccggttcctggttgtggaatacctggccaacccctttttctatgtgtcgctgctggtcataaaacccaatagttacttggagatcacatgcaacaaatatgcacactaaaggggcttcttcagatgccatcagagttagcacctctagtgcccccagcacatcgagccatggttctgcacaagatgactatgattcctctggggatgtgtacgtgtggggtgaagtcatttgtgacaacactgtaagagttggtcctgatacagtaatcaggtctaccgctaaggctgattttctattgcctaagcccctggagtccaagctagttcttgatgtgtaccatgtggattgtggggtcaagcacgctgctttggtcacaaagaatggggaagtgtttacatggggtgaggaatctggaggacgtcttggccatggatcaagggaggactctgtgcaccctcgcctagttgagtcattagctatttgtaatgtggacattgttgcttgtggggagttccacacctgtgctgtgacaacatctggggaactttacacctggggtgatggaacacataatattggacttctaggcaatggtaccgatgtaagccactggattcctaaaagaatttcaggagtactggagggtcatcaagttgcgtatgtttcttgtgggacctggcatacagccttggttacgtcgaggggacagctatttacgtttggtgatggtacattcggagttttaggacatggaaaccgcgagagtttttcgtgtccaagggaggtagaatctttatcggggttgaaaacaattgctgtggcttgtggtgtatggcacacggcagctgttgtagaagttatagtcacccaatccagttcaagtatgtcttctggaaagctcttcacatggggagatggtgacaaacatcggcttggtcatggtgacaaggaaccaaaacttaagcctacgtgtgtggcttcacttattgattatgacttctgcaggatagcatgtggtcatagtcttacggtaggactgacaacatctggacaggttctgagcatgggtaatactgtctatggtcagcttgggaatcctcgttcagatggtaaacttccatgcttaattgaagatatcatgggtgaacatgttgtccaagttgcatgtggttcctaccatgttgcagtcttaacaaataagagtgaggtttttacatggggaaagggggccaatggaagactgggtcatggagacgtagaggatagaaaaatacctacactggttgaatcattgagagacagggctgttaggcacatagcttgtggttcaaacttcacttcagctatctgtcaacataagtgggtttctggagctgagcagtcgcaatgtgcctcatgtcggcaaccatttgggttcaccaggaagaggcataattgccataattgtggtcttgtccattgtaatgcgtgcacctcacataaggtcctgagagcagcattggctcctaatcctgcaaaaccataccgtgtttgtgattcatgttttatgaaattgaacagtgcagcatactcaagtacaattaataagaagaaagaggttgtgcctcgccattctggtgaaagcaaccatgatgctaaattagctagagcaattgtgcccagcaatttggatatgattagaagtttggacagcaaggcagcaaaacaagggaagaaaactgatgcactgtcattccttcggactccccaaatgagttcgcttcttcagctaagagatatcactttatctggtggaattgatctgaacaagtcagttccaagagcagttcgcacatcagtccgatcattgaactcatctagggctgtttcccctttctctcgcaagcctagtccaccacgctcaaccacaccagtcccaacaactcatggtctttcaattgctaaaactgctgctgatagtcttgcaaaaactaatgagatgttaagtcaagaggttgaaagactccgtgcacaggttgacaatctaaggcgccgttgcgagcttcaagaacttgagttgcagaaatcagcaaagaaagtacaagaagccatgtcaatggtttcagaggaatccgcaaaatctaaagctgctaaggaagtaataaagtccttaacatcacagctcaaggatatggctgaaagactacctccagatcagggagcctatgatggtagcgaagcaaaacaagcacatgttccaaatggcattgagatgtatgcttctatttacactagcatgaatggtattcatcagccacgaaatgagtctgtcagtgccctaagcacgcctggcctgcatattggacgatcatcgcacccaaatggaatctcaaatcatcatcaatcaccaggaagtattactgaaaacagtgaagtgagtgctcacacccatagggtttcaggtcctcccgacgttgaaaatccgaatcgaaggggacatagcagtagtgacgagatgctcagtgcaagtagtagagcagacgatagtagcagcagggacgctagatcccttttgaatggtgaggatggttacaaatctcggagtgcagtatctttgcccagcaaccaagttcaggctgagtggattgagcagtatgaaccaggtgtatacataacactgacaactcttcgtgatgggacccgagatctaaagcgtgtacgcttcagtcgaaggcgttttggggagcatcaggcggagagctggtggaacgagaaccgcgacaaggtctatgagaagtacaatgtcgatgacccctcctccgtaccacactaccctgcagtagtcatcagaaaacttcaagtgggagcgcagagccaaagtcagagtggcaagggtgccgaggaattcttttttgtccgtgtaatgtcgataattcttgttactgttgttatgaaattgagtcagtgggacttgttaggttgtcttgttcagatgtaatgcacatagagttgtggaacaccgaaacatgttgtagggggtggggcggtagcagagggtggacagtaacagtagcgcgcccagccctctacggcctacccttttgaaagccttggttgtagccaatgcagctagctgtaaagaagtggcattttttttttgtctccaaaaggtgtcacgcttcacattttggctatattgcatttgatgacattcaaaatattcggatccagtagcacctcatattcccaccccacatcatctgagttcccctcttcaaactagtggttgtagatgct

SEQ ID NO: 206848 - DNA, 4747 bp, Zea Mays
aattttctccctgccagcggtctcggacataaaccccaatcaacttggcagccctctctaaccctgtctgcggctgcgagcacacaccacactaggcactagcacacctcccctctcaggctctcagcgccccgccgccgccacgcaattgccagtcctcgcgatatgggcgcgcaagaggaggcagtggacgagatgctgcgcgccgccgccgccgaggtttcaacctcctcggtgaagcgccgcctccgcatcttccaccacaccctacctcctctcatcgcgaaggccatagagtcaccgtcagatactgtattgttagtcgatctcattttccagacattgccaatatatgacgatcgagcatcacgaaaagcagtagacgatttggttattcaggctcttggtgaacccaccttcatgaagccctttgctgcggtacttgtacaatctatggaaaagaatctaaaggttacaaacccccttacaagcttaaagcttctcagatggtcacactatcttctgaaatggagtcagtttgccacacttacaaaaggcgcctttaccagactggccaatgcacaagcagtcttatgtcaagtccttatggatgggtccttccgtcggcgccggacttgcaaacagttattcattcatctcttctccgagcacagtggaatatataagatgtacatagaggagctcagagatttaaggatttccatgagagattctcctgcatttttgaatctaatactggattttaccattacctctccatcattatccactcagtaccagtcagtattccttgatttgtatgtcaaaatcatcttgagttcaaaagatcggccaccgaaagcagccactgaagcttttaagcctcttttcttgaacattgggcatgaggattttaagaatactattataccatcatgcataaagatgctgaaaagaaatcctgaaatcgtactacagtctattggatatcttcttaagacagtccatttagacctaagcaagtattccatggagtttatgccagttgttctgcatcaagctcggcattcagatgaagagaggaggattaatgctttgagtattataggaacactaagtgagaagtcaagtgatccagatgctctaccttccatggtcaatgctatcaaagctgttttaggaggctcagaaggaaaactatcacttctataccagagaattggaatgataaatgctttagagcagctatcaagatctcctccaaagcaaataggcagacttgccccctcagtatcaactttccttctaacgtgttacaaggatgatggtatcgaggaagtgaaattggcgattctatcagcaatagggtcctgggctttggtatcagctgaagctgtccaaccagatgttgtttcatttattgctgcaggcttgaaagagaaagacactttaaggaaggggcatctgaaatttttacgagttatatgcaaaaactctgagtctttaacaaaggttgcttctttattggatcatttgattcagttgtcaaaaactggcttcagcaaggcaacacagcggttggatggaatctatgcactctttgcagtatcaaggcttgctgctgttgatacaaaagcagatggtgccattctgaaggagaaactgtggacattgattgctcaaaatgaaccctcattgatctctttacagttgcttcccaaactagcagatgatgattgcttagccgtcctggatcttgttcaatcactgtttgtagaacagttcttcagggttcgagaatatttttcaatccattcattgctgcagctgctaatatatctactttgccatccaagctgggaagttagaaaggtagcttacgatgttaccaagaaaattttctcaagctccagtggtctagccgaagatattctatttttattcacagactggttgtcactggttggagagagactgtcaatattgaaacaaggtgatatggatagcccttcggattctcagctaccattctttccatctaccgaggtccttgtcaagtgtttgtttttgattgcaccttatgctgttgtgcatagtctgagatcatattctcgaattattttgtgctcccaccacccttgccttaccagctcctcaagcccagctggcgtatataagaggttgcaaagaaggcttagacaagaacagatcttttttgttgacttaattactcccaacatctctgttatctgcaaggaattactttcacaggatggtctatttagttccaacaatcaagtacagagtgcagcattatgttcgctatcaacacttatgacaattactcccaacgacacatttctagagtttgagaagcacttcataggactccaggagcgcaccttgcacgattccttctctgagagtgatattaagatattctatactccagaggggcagttgtcaaccgagcaaggagtttacattgctgaggctgttgctaacaaaaatacaaaacttgcaaaggggcgtttccgtgcatatgatgatcagatgcagagacagctcggtctattgtccctgcaaagaatgagaagaaagaatcctcaggcattggcaagcgagaaactgggaaatctacaaaaaggactgctcctatagacaaggctaagactgctaaagaggaggccagagagttgctcttgaaggaggaagcatctgtgcgtatgaaggttgggcaagtgcagaaggatctctccttaatgttggatgctcttggcaagttggctattgctaatcctatatttactcatggtcaactgccgtcactggtaaactatgttgaacctttgctaagttctccaatagtaagcgatgctgcattttgtacaatgttgaggctagcacgttgcacagcccctcctctttgcaattgggcgctcgacattgctgctgcgattcgtgtgatatctgttggtgattttgaaatggttttggatcttacacctgtgatcatggaagatgatagtaagaagccatcatctggcatctttgaacaaatagtaaatgggctgactattgcgtgcaaagcgggtcctcttccagcagattcatttactttcgtctttccgatcatggaaaggatccttctatcttcaaaaaagacatgtcttcatgatgatgtgcttcacatactatctatgcatatggatccaatactaccacttcctcgacctaggatgttatcagttctttatcatgtgctaagcactgttcctgcctatcaaccttcagttgggcctatgctgaatgagctatgcctaggtctaagaggccatgagttagcacaggctcttgtcggtgtatatgcaaaagaactgcatgttaggcttgcctgcttaactgctataaaatgtgttcctgtgcactctgtgcaacgagatttgcaggtgtcaacaagcctctggattgctgctcatgatccggagaaggtggttgctgaattagcagaggaattatgggaccgctttggttttgatgccatcactgattactctggtattttcaatgcactttcccataaaaattacaatgttcgtgctgcatctgctgaggctctggctgcggcattggatgaaaatcaagacaaaatgcaagatgcactttctacccttttctctctgtacattcgtgatattggcactagtgttgaatttggagatgcacactggctcggaaggcagggtattgcattagcactccactctatcgctgacgttttggcctctaaagatcttcctgttgtcatgacatttctcatctcacgcgccctggctgatccaaacgtcgatgttcgtggtagaatgattaatgctggcatccttattattgacaggcatggaaaggaaaatgttcctttgctatttcctatttttgagagctacttgaataaaagggcatcagatgagaaaacatatgatcttgtgagggaaggtgttgttatttttactggtgctctggcgaaacatctatcaaaggatgatcccaaagttcacagtgtcattgaaaagttgttagatgtccttaacaccccatcagaggcagttcaacgtgctgtctcagattgtttgtccccacttatggtatccaaacaggaagagggtcaggctcttgtttctagactcttggatcggatgatgaaatgtgaaaagtatggtgagcgacgaggtgcagcctttggccttgctggtgtggttaaaggatttggaatttcttccttgaaaaaatatggcatcgctgtgacattgcagaaaaatttggaagacagaatgtctgcaaaatctcgtgaaggagctttacttggatttgagtgcctgtgtgagaagcttggcaaactatttgagccgtatgtcattcaaatgcttccgttcctacttgtgtgtttctctgatcaagtcctagcagtgcgcgaagctgctgagtgtgctgctcgggcaatgatgtctcagctcactggtcctggtgtgaagcttgttcttccgtcacttcttaaggtatcaatatatcttatttgatgctatcaaatcataacatttattgtgtccaaatgttctggagaatacaagtgtccagttcatctagttatatattgaaatctgacaaccacttaacttctgctgaatatttaggccattggcaccacaaactactagtttgttttcattaacttgaaagagcagaacatctt

SEQ ID NO: 206849 - DNA, 4710 bp, Zea Mays
atcaacttggcagccctctctaaccctgtctgcggctgcgagcacacaccacactaggcactagcacacctcccctctcaggctctcagcgccccgccgccgccacgcaattgccagtcctcgcgatatgggcgcgcaagaggaggcagtggacgagatgctgcgcgccgccgccgccgaggtttcaacctcctcggtgaagcgccgcctccgcatcttccaccacaccctacctcctctcatcgcgaaggccatagagtcaccgtcagatactgtattgttagtcgatctcattttccagacattgccaatatatgacgatcgagcatcacgaaaagcagtagacgatttggttattcaggctcttggtgaacccaccttcatgaagccctttgctgcggtacttgtacaatctatggaaaagaatctaaaggttacaaacccccttacaagcttaaagcttctcagatggtcacactatcttctgaaatggagtcagtttgccacacttacaaaaggcgcctttaccagactggccaatgcacaagcagtcttatgtcaagtccttatggatgggtccttccgtcggcgccggacttgcaaacagttattcattcatctcttctccgagcacagtggaatatataagatgtacatagaggagctcagagatttaaggatttccatgagagattctcctgcatttttgaatctaatactggattttaccattacctctccatcattatccactcagtaccagtcagtattccttgatttgtatgtcaaaatcatcttgagttcaaaagatcggccaccgaaagcagccactgaagcttttaagcctcttttcttgaacattgggcatgaggattttaagaatactattataccatcatgcataaagatgctgaaaagaaatcctgaaatcgtactacagtctattggatatcttcttaagacagtccatttagacctaagcaagtattccatggagtttatgccagttgttctgcatcaagctcggcattcagatgaagagaggaggattaatgctttgagtattataggaacactaagtgagaagtcaagtgatccagatgctctaccttccatggtcaatgctatcaaagctgttttaggaggctcagaaggaaaactatcacttctataccagagaattggaatgataaatgctttagagcagctatcaagatctcctccaaagcaaataggcagacttgccccctcagtatcaactttccttctaacgtgttacaaggatgatggtatcgaggaagtgaaattggcgattctatcagcaatagggtcctgggctttggtatcagctgaagctgtccaaccagatgttgtttcatttattgctgcaggcttgaaagagaaagacactttaaggaaggggcatctgaaatttttacgagttatatgcaaaaactctgagtctttaacaaaggttgcttctttattggatcatttgattcagttgtcaaaaactggcttcagcaaggcaacacagcggttggatggaatctatgcactctttgcagtatcaaggcttgctgctgttgatacaaaagcagatggtgccattctgaaggagaaactgtggacattgattgctcaaaatgaaccctcattgatctctttacagttgcttcccaaactagcagatgatgattgcttagccgtcctggatcttgttcaatcactgtttgtagaacagttcttcagggttcgagaatatttttcaatccattcattgctgcagctgctaatatatctactttgccatccaagctgggaagttagaaaggtagcttacgatgttaccaagaaaattttctcaagctccagtggtctagccgaagatattctatttttattcacagactggttgtcactggttggagagagactgtcaatattgaaacaaggtgatatggatagcccttcggattctcagctaccattctttccatctaccgaggtccttgtcaagtgtttgtttttgattgcaccttatgctgttgtgcatagtctgagatcatattctcgaattattttgtgctcccaccacccttgccttaccagctcctcaagcccagctggcgtatataagaggttgcaaagaaggcttagacaagaacagatcttttttgttgacttaattactcccaacatctctgttatctgcaaggaattactttcacaggatggtctatttagttccaacaatcaagtacagagtgcagcattatgttcgctatcaacacttatgacaattactcccaacgacacatttctagagtttgagaagcacttcataggactccaggagcgcaccttgcacgattccttctctgagagtgatattaagatattctatactccagaggggcagttgtcaaccgagcaaggagtttacattgctgaggctgttgctaacaaaaatacaaaacttgcaaaggggcgtttccgtgcatatgatgatcagatgcaggagacagctcggtctattgtccctgcaaagaatgagaagaaagaatcctcaggcattggcaagcgagaaactgggaaatctacaaaaaggactgctcctatagacaaggctaagactgctaaagaggaggccagagagttgctcttgaaggaggaagcatctgtgcgtatgaaggttgggcaagtgcagaaggatctctccttaatgttggatgctcttggcaagttggctattgctaatcctatatttactcatggtcaactgccgtcactggtaaactatgttgaacctttgctaagttctccaatagtaagcgatgctgcattttgtacaatgttgaggctagcacgttgcacagcccctcctctttgcaattgggcgctcgacattgctgctgcgattcgtgtgatatctgttggtgattttgaaatggttttggatcttacacctgtgatcatggaagatgatagtaagaagccatcatctggcatctttgaacaaatagtaaatgggctgactattgcgtgcaaagcgggtcctcttccagcagattcatttactttcgtctttccgatcatggaaaggatccttctatcttcaaaaaagacatgtcttcatgatgatgtgcttcacatactatctatgcatatggatccaatactaccacttcctcgacctaggatgttatcagttctttatcatgtgctaagcactgttcctgcctatcaaccttcagttgggcctatgctgaatgagctatgcctaggtctaagaggccatgagttagcacaggctcttgtcggtgtatatgcaaaagaactgcatgttaggcttgcctgcttaactgctataaaatgtgttcctgtgcactctgtgcaacgagatttgcaggtgtcaacaagcctctggattgctgctcatgatccggagaaggtggttgctgaattagcagaggaattatgggaccgctttggttttgatgccatcactgattactctggtattttcaatgcactttcccataaaaattacaatgttcgtgctgcatctgctgaggctctggctgcggcattggatgaaaatcaagacaaaatgcaagatgcactttctacccttttctctctgtacattcgtgatattggcactagtgttgaatttggagatgcacactggctcggaaggcagggtattgcattagcactccactctatcgctgacgttttggcctctaaagatcttcctgttgtcatgacatttctcatctcacgcgccctggctgatccaaacgtcgatgttcgtggtagaatgattaatgctggcatccttattattgacaggcatggaaaggaaaatgttcctttgctatttcctatttttgagagctacttgaataaaagggcatcagatgagaaaacatatgatcttgtgagggaaggtgttgttatttttactggtgctctggcgaaacatctatcaaaggatgatcccaaagttcacagtgtcattgaaaagttgttagatgtccttaacaccccatcagaggcagttcaacgtgctgtctcagattgtttgtccccacttatggtatccaaacaggaagagggtcaggctcttgtttctagactcttggatcggatgatgaaatgtgaaaagtatggtgagcgacgaggtgcagcctttggccttgctggtgtggttaaaggatttggaatttcttccttgaaaaaatatggcatcgctgtgacattgcagaaaaatttggaagacagaatgtctgcaaaatctcgtgaaggagctttacttggatttgagtgcctgtgtgagaagcttggcaaactatttgagccgtatgtcattcaaatgcttccgttcctacttgtgtgtttctctgatcaagtcctagcagtgcgcgaagctgctgagtgtgctgctcgggcaatgatgtctcagctcactggtcctggtgtgaagcttgttcttccgtcacttcttaaggtatcaatatatcttatttgatgctatcaaatcataacatttattgtgtccaaatgttctggagaatacaagtgtccagttcatctagttatatattgaaatctgacaaccacttaacttctgctgaatatttaggccattggcaccacaaactactagtttgttttcattaacttgaaagagcagaacatctt

SEQ ID NO: 206850 - DNA, 4545 bp, Zea Mays
ccctctctaaccctgtctgcggctgcgagcacacaccacactaggcactagcacacctcccctctcaggctctcagcgccccgccgccgccacgcaattgccagtcctcgcgatatgggcgcgcaagaggaggcagtggacgagatgctgcgcgccgccgccgccgaggtttcaacctcctcggtgaagcgccgcctccgcatcttccaccacaccctacctcctctcatcgcgaaggccatagagtcaccgtcagatactgtattgttagtcgatctcattttccagacattgccaatatatgacgatcgagcatcacgaaaagcagtagacgatttggttattcaggctcttggtgaacccaccttcatgaagccctttgctgcggtacttgtacaatctatggaaaagaatctaaaggttacaaacccccttacaagcttaaagcttctcagatggtcacactatcttctgaaatggagtcagtttgccacacttacaaaaggcgcctttaccagactggccaatgcacaagcagtcttatgtcaagtccttatggatgggtccttccgtcggcgccggacttgcaaacagttattcattcatctcttctccgagcacagtggaatatataagatgtacatagaggagctcagagatttaaggatttccatgagagattctcctgcatttttgaatctaatactggattttaccattacctctccatcattatccactcagtaccagtcagtattccttgatttgtatgtcaaaatcatcttgagttcaaaagatcggccaccgaaagcagccactgaagcttttaagcctcttttcttgaacattgggcatgaggattttaagaatactattataccatcatgcataaagatgctgaaaagaaatcctgaaatcgtactacagtctattggatatcttcttaagacagtccatttagacctaagcaagtattccatggagtttatgccagttgttctgcatcaagctcggcattcagatgaagagaggaggattaatgctttgagtattataggaacactaagtgagaagtcaagtgatccagatgctctaccttccatggtcaatgctatcaaagctgttttaggaggctcagaaggaaaactatcacttctataccagagaattggaatgataaatgctttagagcagctatcaagatctcctccaaagcaaataggcagacttgccccctcagtatcaactttccttctaacgtgttacaaggatgatggtatcgaggaagtgaaattggcgattctatcagcaatagggtcctgggctttggtatcagctgaagctgtccaaccagatgttgtttcatttattgctgcaggcttgaaagagaaagacactttaaggaaggggcatctgaaatttttacgagttatatgcaaaaactctgagtctttaacaaaggttgcttctttattggatcatttgattcagttgtcaaaaactggcttcagcaaggcaacacagcggttggatggaatctatgcactctttgcagtatcaaggcttgctgctgttgatacaaaagcagatggtgccattctgaaggagaaactgtggacattgattgctcaaaatgaaccctcattgatctctttacagttgcttcccaaactagcagatgatgattgcttagccgtcctggatcttgttcaatcactgtttgtagaacagttcttcagggttcgagaatatttttcaatccattcattgctgcagctgctaatatatctactttgccatccaagctgggaagttagaaaggtagcttacgatgttaccaagaaaattttctcaagctccagtggtctagccgaagatattctatttttattcacagactggttgtcactggttggagagagactgtcaatattgaaacaaggtgatatggatagcccttcggattctcagctaccattctttccatctaccgaggtccttgtcaagtgtttgtttttgattgcaccttatgctgttgtgcatagtctgagatcatattctcgaattattttgtgctcccaccacccttgccttaccagctcctcaagcccagctggcgtatataagaggttgcaaagaaggcttagacaagaacagatcttttttgttgacttaattactcccaacatctctgttatctgcaaggaattactttcacaggatggtctatttagttccaacaatcaagtacagagtgcagcattatgttcgctatcaacacttatgacaattactcccaacgacacatttctagagtttgagaagcacttcataggactccaggagcgcaccttgcacgattccttctctgagagtgatattaagatattctatactccagaggggcagttgtcaaccgagcaaggagtttacattgctgaggctgttgctaacaaaaatacaaaacttgcaaaggggcgtttccgtgcatatgatgatcagatgcaggagacagctcggtctattgtccctgcaaagaatgagaagaaagaatcctcaggcattggcaagcgagaaactgggaaatctacaaaaaggactgctcctatagacaaggctaagactgctaaagaggaggccagagagttgctcttgaaggaggaagcatctgtgcgtatgaaggttgggcaagtgcagaaggatctctccttaatgttggatgctcttggcaagttggctattgctaatcctatatttactcatggtcaactgccgtcactggtaaactatgttgaacctttgctaagttctccaatagtaagcgatgctgcattttgtacaatgttgaggctagcacgttgcacagcccctcctctttgcaattgggcgctcgacattgctgctgcgattcgtgtgatatctgttggtgattttgaaatggatccttctatcttcaaaaaagacatgtcttcatgatgatgtgcttcacatactatctatgcatatggatccaatactaccacttcctcgacctaggatgttatcagttctttatcatgtgctaagcactgttcctgcctatcaaccttcagttgggcctatgctgaatgagctatgcctaggtctaagaggccatgagttagcacaggctcttgtcggtgtatatgcaaaagaactgcatgttaggcttgcctgcttaactgctataaaatgtgttcctgtgcactctgtgcaacgagatttgcaggtgtcaacaagcctctggattgctgctcatgatccggagaaggtggttgctgaattagcagaggaattatgggaccgctttggttttgatgccatcactgattactctggtattttcaatgcactttcccataaaaattacaatgttcgtgctgcatctgctgaggctctggctgcggcattggatgaaaatcaagacaaaatgcaagatgcactttctacccttttctctctgtacattcgtgatattggcactagtgttgaatttggagatgcacactggctcggaaggcagggtattgcattagcactccactctatcgctgacgttttggcctctaaagatcttcctgttgtcatgacatttctcatctcacgcgccctggctgatccaaacgtcgatgttcgtggtagaatgattaatgctggcatccttattattgacaggcatggaaaggaaaatgttcctttgctatttcctatttttgagagctacttgaataaaagggcatcagatgagaaaacatatgatcttgtgagggaaggtgttgttatttttactggtgctctggcgaaacatctatcaaaggatgatcccaaagttcacagtgtcattgaaaagttgttagatgtccttaacaccccatcagaggcagttcaacgtgctgtctcagattgtttgtccccacttatggtatccaaacaggaagagggtcaggctcttgtttctagactcttggatcggatgatgaaatgtgaaaagtatggtgagcgacgaggtgcagcctttggccttgctggtgtggttaaaggatttggaatttcttccttgaaaaaatatggcatcgctgtgacattgcagaaaaatttggaagacagaatgtctgcaaaatctcgtgaaggagctttacttggatttgagtgcctgtgtgagaagcttggcaaactatttgagccgtatgtcattcaaatgcttccgttcctacttgtgtgtttctctgatcaagtcctagcagtgcgcgaagctgctgagtgtgctgctcgggcaatgatgtctcagctcactggtcctggtgtgaagcttgttcttccgtcacttcttaaggtatcaatatatcttatttgatgctatcaaatcataacatttattgtgtccaaatgttctggagaatacaagtgtccagttcatctagttatatattgaaatctgacaaccacttaacttctgctgaatatttaggccattggcaccacaaactactagtttgttttcattaacttgaaagagcagaacatctt

SEQ ID NO: 206851 - DNA, 2783 bp, Zea Mays
gcggctgcgagcacacaccacactaggcactagcacacctcccctctcaggctctcagcgccccgccgccgccacgcaattgccagtcctcgcgatatgggcgcgcaagaggaggcagtggacgagatgctgcgcgccgccgccgccgaggtttcaacctcctcggtgaagcgccgcctccgcatcttccaccacaccctacctcctctcatcgcgaaggccatagagtcaccgtcagatactgtattgttagtcgatctcattttccagacattgccaatatatgacgatcgagcatcacgaaaagcagtagacgatttggttattcaggctcttggtgaacccaccttcatgaagccctttgctgcggtacttgtacaatctatggaaaagaatctaaaggttacaaacccccttacaagcttaaagcttctcagatggtcacactatcttctgaaatggagtcagtttgccacacttacaaaaggcgcctttaccagactggccaatgcacaagcagtcttatgtcaagtccttatggatgggtccttccgtcggcgccggacttgcaaacagttattcattcatctcttctccgagcacagtggaatatataagatgtacatagaggagctcagagatttaaggatttccatgagagattctcctgcatttttgaatctaatactggattttaccattacctctccatcattatccactcagtaccagtcagtattccttgatttgtatgtcaaaatcatcttgagttcaaaagatcggccaccgaaagcagccactgaagcttttaagcctcttttcttgaacattgggcatgaggattttaagaatactattataccatcatgcataaagatgctgaaaagaaatcctgaaatcgtactacagtctattggatatcttcttaagacagtccatttagacctaagcaagtattccatggagtttatgccagttgttctgcatcaagctcggcattcagatgaagagaggaggattaatgctttgagtattataggaacactaagtgagaagtcaagtgatccagatgctctaccttccatggtcaatgctatcaaagctgttttaggaggctcagaaggaaaactatcacttctataccagagaattggaatgataaatgctttagagcagctatcaagatctcctccaaagcaaataggcagacttgccccctcagtatcaactttccttctaacgtgttacaaggatgatggtatcgaggaagtgaaattggcgattctatcagcaatagggtcctgggctttggtatcagctgaagctgtccaaccagatgttgtttcatttattgctgcaggcttgaaagagaaagacactttaaggaaggggcatctgaaatttttacgagttatatgcaaaaactctgagtctttaacaaaggttgcttctttattggatcatttgattcagttgtcaaaaactggcttcagcaaggcaacacagcggttggatggaatctatgcactctttgcagtatcaaggcttgctgctgttgatacaaaagcagatggtgccattctgaaggagaaactgtggacattgattgctcaaaatgaaccctcattgatctctttacagttgcttcccaaactagcagatgatgattgcttagccgtcctggatcttgttcaatcactgtttgtagaacagttcttcagggttcgagaatatttttcaatccattcattgctgcagctgctaatatatctactttgccatccaagctgggaagttagaaaggtagcttacgatgttaccaagaaaattttctcaagctccagtggtctagccgaagatattctatttttattcacagactggttgtcactggttggagagagactgtcaatattgaaacaaggtgatatggatagcccttcggattctcagctaccattctttccatctaccgaggtccttgtcaagtgtttgtttttgattgcaccttatgctgttgtgcatagtctgagatcatattctcgaattattttgtgctcccaccacccttgccttaccagctcctcaagcccagctggcgtatataagaggttgcaaagaaggcttagacaagaacagatcttttttgttgacttaattactcccaacatctctgttatctgcaaggaattactttcacaggatggtctatttagttccaacaatcaagtacagagtgcagcattatgttcgctatcaacacttatgacaattactcccaacgacacatttctagagtttgagaagcacttcataggactccaggagcgcaccttgcacgattccttctctgagagtgatattaagatattctatactccagaggggcagttgtcaaccgagcaaggagtttacattgctgaggctgttgctaacaaaaatacaaaacttgcaaaggggcgtttccgtgcatatgatgatcagatgcaggagacagctcggtctattgtccctgcaaagaatgagaagaaagaatcctcaggcattggcaagcgagaaactgggaaatctacaaaaaggactgctcctatagacaaggctaagactgctaaagaggaggccagagagttgctcttgaaggaggaagcatctgtgcgtatgaaggttgggcaagtgcagaaggatctctccttaatgttggatgctcttggcaagttggctattgctaatcctatatttactcatggtcaactgccgtcactgtttggtgtccctatccagag

SEQ ID NO: 206852 - DNA, 3620 bp, Zea Mays
cggctgcgagcacacaccacactaggcactagcacacctcccctctcaggctctcagcgccccgccgccgccacgcaattgccagtcctcgcgatatgggcgcgcaagaggaggcagtggacgagatgctgcgcgccgccgccgccgaggtttcaacctcctcggtgaagcgccgcctccgcatcttccaccacaccctacctcctctcatcgcgaaggccatagagtcaccgtcagatactgtattgttagtcgatctcattttccagacattgccaatatatgacgatcgagcatcacgaaaagcagtagacgatttggttattcaggctcttggtgaacccaccttcatgaagccctttgctgcggtacttgtacaatctatggaaaagaatctaaaggttacaaacccccttacaagcttaaagcttctcagatggtcacactatcttctgaaatggagtcagtttgccacacttacaaaaggcgcctttaccagactggccaatgcacaagcagtcttatgtcaagtccttatggatgggtccttccgtcggcgccggacttgcaaacagttattcattcatctcttctccgagcacagtggaatatataagatgtacatagaggagctcagagatttaaggatttccatgagagattctcctgcatttttgaatctaatactggattttaccattacctctccatcattatccactcagtaccagtcagtattccttgatttgtatgtcaaaatcatcttgagttcaaaagatcggccaccgaaagcagccactgaagcttttaagcctcttttcttgaacattgggcatgaggattttaagaatactattataccatcatgcataaagatgctgaaaagaaatcctgaaatcgtactacagtctattggatatcttcttaagacagtccatttagacctaagcaagtattccatggagtttatgccagttgttctgcatcaagctcggcattcagatgaagagaggaggattaatgctttgagtattataggaacactaagtgagaagtcaagtgatccagatgctctaccttccatggtcaatgctatcaaagctgttttaggaggctcagaaggaaaactatcacttctataccagagaattggaatgataaatgctttagagcagctatcaagatctcctccaaagcaaataggcagacttgccccctcagtatcaactttccttctaacgtgttacaaggatgatggtatcgaggaagtgaaattggcgattctatcagcaatagggtcctgggctttggtatcagctgaagctgtccaaccagatgttgtttcatttattgctgcaggcttgaaagagaaagacactttaaggaaggggcatctgaaatttttacgagttatatgcaaaaactctgagtctttaacaaaggttgcttctttattggatcatttgattcagttgtcaaaaactggcttcagcaaggcaacacagcggttggatggaatctatgcactctttgcagtatcaaggcttgctgctgttgatacaaaagcagatggtgccattctgaaggagaaactgtggacattgattgctcaaaatgaaccctcattgatctctttacagttgcttcccaaactagcagatgatgattgcttagccgtcctggatcttgttcaatcactgtttgtagaacagttcttcagggttcgagaatatttttcaatccattcattgctgcagctgctaatatatctactttgccatccaagctgggaagttagaaaggtagcttacgatgttaccaagaaaattttctcaagctccagtggtctagccgaagatattctatttttattcacagactggttgtcactggttggagagagactgtcaatattgaaacaaggtgatatggatagcccttcggattctcagctaccattctttccatctaccgaggtccttgtcaagtgtttgtttttgattgcaccttatgctgttgtgcatagtctgagatcatattctcgaattattttgtgctcccaccacccttgccttaccagctcctcaagcccagctggcgtatataagaggttgcaaagaaggcttagacaagaacagatcttttttgttgacttaattactcccaacatctctgttatctgcaaggaattactttcacaggatggtctatttagttccaacaatcaagtacagagtgcagcattatgttcgctatcaacacttatgacaattactcccaacgacacatttctagagtttgagaagcacttcataggactccaggagcgcaccttgcacgattccttctctgagagtgatattaagatattctatactccagaggggcagttgtcaaccgagcaaggagtttacattgctgaggctgttgctaacaaaaatacaaaacttgcaaaggggcgtttccgtgcatatgatgatcagatgcagagacagctcggtctattgtccctgcaaagaatgagaagaaagaatcctcaggcattggcaagcgagaaactgggaaatctacaaaaaggactgctcctatagacaaggctaagactgctaaagaggaggccagagagttgctcttgaaggaggaagcatctgtgcgtatgaaggttgggcaagtgcagaaggatctctccttaatgttggatgctcttggcaagttggctattgctaatcctatatttactcatggtcaactgccgtcactggtaaactatgttgaacctttgctaagttctccaatagtaagcgatgctgcattttgtacaatgttgaggctagcacgttgcacagcccctcctctttgcaattgggcgctcgacattgctgctgcgattcgtgtgatatctgttggtgattttgaaatggttttggatcttacacctgtgatcatggaagatgatagtaagaagccatcatctggcatctttgaacaaatagtaaatgggctgactattgcgtgcaaagcgggtcctcttccagcagattcatttactttcgtctttccgatcatggaaaggatccttctatcttcaaaaaagacatgtcttcatgatgatgtgcttcacatactatctatgcatatggatccaatactaccacttcctcgacctaggatgttatcagttctttatcatgtgctaagcactgttcctgcctatcaaccttcagttgggcctatgctgaatgagctatgcctaggtctaagaggccatgagttagcacaggctcttgtcggtgtatatgcaaaagaactgcatgttaggcttgcctgcttaactgctataaaatgtgttcctgtgcactctgtgcaacgagatttgcaggtgtcaacaagcctctggattgctgctcatgatccggagaaggtggttgctgaattagcagaggaattatgggaccgctttggttttgatgccatcactgattactctggtattttcaatgcactttcccataaaaattacaatgttcgtgctgcatctgctgaggctctggctgcggcattggatgaaaatcaagacaaaatgcaaggacaaagaggtaatagcacatctcaaaatcata

SEQ ID NO: 206853 - DNA, 3602 bp, Zea Mays
cgagcacacaccacactaggcactagcacacctcccctctcaggctctcagcgccccgccgccgccacgcaattgccagtcctcgcgatatgggcgcgcaagaggaggcagtggacgagatgctgcgcgccgccgccgccgaggtttcaacctcctcggtgaagcgccgcctccgcatcttccaccacaccctacctcctctcatcgcgaaggccatagagtcaccgtcagatactgtattgttagtcgatctcattttccagacattgccaatatatgacgatcgagcatcacgaaaagcagtagacgatttggttattcaggctcttggtgaacccaccttcatgaagccctttgctgcggtacttgtacaatctatggaaaagaatctaaaggttacaaacccccttacaagcttaaagcttctcagatggtcacactatcttctgaaatggagtcagtttgccacacttacaaaaggcgcctttaccagactggccaatgcacaagcagtcttatgtcaagtccttatggatgggtccttccgtcggcgccggacttgcaaacagttattcattcatctcttctccgagcacagtggaatatataagatgtacatagaggagctcagagatttaaggatttccatgagagattctcctgcatttttgaatctaatactggattttaccattacctctccatcattatccactcagtaccagtcagtattccttgatttgtatgtcaaaatcatcttgagttcaaaagatcggccaccgaaagcagccactgaagcttttaagcctcttttcttgaacattgggcatgaggattttaagaatactattataccatcatgcataaagatgctgaaaagaaatcctgaaatcgtactacagtctattggatatcttcttaagacagtccatttagacctaagcaagtattccatggagtttatgccagttgttctgcatcaagctcggcattcagatgaagagaggaggattaatgctttgagtattataggaacactaagtgagaagtcaagtgatccagatgctctaccttccatggtcaatgctatcaaagctgttttaggaggctcagaaggaaaactatcacttctataccagagaattggaatgataaatgctttagagcagctatcaagatctcctccaaagcaaataggcagacttgccccctcagtatcaactttccttctaacgtgttacaaggatgatggtatcgaggaagtgaaattggcgattctatcagcaatagggtcctgggctttggtatcagctgaagctgtccaaccagatgttgtttcatttattgctgcaggcttgaaagagaaagacactttaaggaaggggcatctgaaatttttacgagttatatgcaaaaactctgagtctttaacaaaggttgcttctttattggatcatttgattcagttgtcaaaaactggcttcagcaaggcaacacagcggttggatggaatctatgcactctttgcagtatcaaggcttgctgctgttgatacaaaagcagatggtgccattctgaaggagaaactgtggacattgattgctcaaaatgaaccctcattgatctctttacagttgcttcccaaactagcagatgatgattgcttagccgtcctggatcttgttcaatcactgtttgtagaacagttcttcagggttcgagaatatttttcaatccattcattgctgcagctgctaatatatctactttgccatccaagctgggaagttagaaaggtagcttacgatgttaccaagaaaattttctcaagctccagtggtctagccgaagatattctatttttattcacagactggttgtcactggttggagagagactgtcaatattgaaacaaggtgatatggatagcccttcggattctcagctaccattctttccatctaccgaggtccttgtcaagtgtttgtttttgattgcaccttatgctgttgtgcatagtctgagatcatattctcgaattattttgtgctcccaccacccttgccttaccagctcctcaagcccagctggcgtatataagaggttgcaaagaaggcttagacaagaacagatcttttttgttgacttaattactcccaacatctctgttatctgcaaggaattactttcacaggatggtctatttagttccaacaatcaagtacagagtgcagcattatgttcgctatcaacacttatgacaattactcccaacgacacatttctagagtttgagaagcacttcataggactccaggagcgcaccttgcacgattccttctctgagagtgatattaagatattctatactccagaggggcagttgtcaaccgagcaaggagtttacattgctgaggctgttgctaacaaaaatacaaaacttgcaaaggggcgtttccgtgcatatgatgatcagatgcaggagacagctcggtctattgtccctgcaaagaatgagaagaaagaatcctcaggcattggcaagcgagaaactgggaaatctacaaaaaggactgctcctatagacaaggctaagactgctaaagaggaggccagagagttgctcttgaaggaggaagcatctgtgcgtatgaaggttgggcaagtgcagaaggatctctccttaatgttggatgctcttggcaagttggctattgctaatcctatatttactcatggtcaactgccgtcactggtaaactatgttgaacctttgctaagttctccaatagtaagcgatgctgcattttgtacaatgttgaggctagcacgttgcacagcccctcctctttgcaattgggcgctcgacattgctgctgcgattcgtgtgatatctgttggtgattttgaaatggttttggatcttacacctgtgatcatggaagatgatagtaagaagccatcatctggcatctttgaacaaatagtaaatgggctgactattgcgtgcaaagcgggtcctcttccagcagattcatttactttcgtctttccgatcatggaaaggatccttctatcttcaaaaaagacatgtcttcatgatgatgtgcttcacatactatctatgcatatggatccaatactaccacttcctcgacctaggatgttatcagttctttatcatgtgctaagcactgttcctgcctatcaaccttcagttgggcctatgctgaatgagctatgcctaggtctaagaggccatgagttagcacaggctcttgtcggtgtatatgcaaaagaactgcatgttaggcttgcctgcttaactgctataaaatgtgttcctgtgcactctgtgcaacgagatttgcaggtgtcaacaagcctctggattgctgctcatgatccggagaaggtggttgctgaattagcagaggaattatgggaccgctttggttttgatgccatcactgattactctggtattttcaatgcactttcccataaaaattacaatgttcgtgctgcatctgctgaggctctggctgcggcattggatgaaaatcaagacaaaatgcaaacatttgaactggacatggac

SEQ ID NO: 206854 - DNA, 4459 bp, Zea Mays
atgggcgcgcaagaggaggcagtggacgagatgctgcgcgccgccgccgccgaggtttcaacctcctcggtgaagcgccgcctccgcatcttccaccacaccctacctcctctcatcgcgaaggccatagagtcaccgtcagatactgtattgttagtcgatctcattttccagacattgccaatatatgacgatcgagcatcacgaaaagcagtagacgatttggttattcaggctcttggtgaacccaccttcatgaagccctttgctgcggtacttgtacaatctatggaaaagaatctaaaggttacaaacccccttacaagcttaaagcttctcagatggtcacactatcttctgaaatggagtcagtttgccacacttacaaaaggcgcctttaccagactggccaatgcacaagcagtcttatgtcaagtccttatggatgggtccttccgtcggcgccggacttgcaaacagttattcattcatctcttctccgagcacagtggaatatataagatgtacatagaggagctcagagatttaaggatttccatgagagattctcctgcatttttgaatctaatactggattttaccattacctctccatcattatccactcagtaccagtcagtattccttgatttgtatgtcaaaatcatcttgagttcaaaagatcggccaccgaaagcagccactgaagcttttaagcctcttttcttgaacattgggcatgaggattttaagaatactattataccatcatgcataaagatgctgaaaagaaatcctgaaatcgtactacagtctattggatatcttcttaagacagtccatttagacctaagcaagtattccatggagtttatgccagttgttctgcatcaagctcggcattcagatgaagagaggaggattaatgctttgagtattataggaacactaagtgagaagtcaagtgatccagatgctctaccttccatggtcaatgctatcaaagctgttttaggaggctcagaaggaaaactatcacttctataccagagaattggaatgataaatgctttagagcagctatcaagatctcctccaaagcaaataggcagacttgccccctcagtatcaactttccttctaacgtgttacaaggatgatggtatcgaggaagtgaaattggcgattctatcagcaatagggtcctgggctttggtatcagctgaagctgtccaaccagatgttgtttcatttattgctgcaggcttgaaagagaaagacactttaaggaaggggcatctgaaatttttacgagttatatgcaaaaactctgagtctttaacaaaggttgcttctttattggatcatttgattcagttgtcaaaaactggcttcagcaaggcaacacagcggttggatggaatctatgcactctttgcagtatcaaggcttgctgctgttgatacaaaagcagatggtgccattctgaaggagaaactgtggacattgattgctcaaaatgaaccctcattgatctctttacacttcccaaactagcagatgatgattgcttagccgtcctggatcttgttcaatcactgtttgtagaacagttcttcagggttcgagaatatttttcaatccattcattgctgcagctgctaatatatctactttgccatccaagctgggaagttagaaaggtagcttacgatgttaccaagaaaattttctcaagctccagtggtctagccgaagatattctatttttattcacagactggttgtcactggttggagagagactgtcaatattgaaacaaggtgatatggatagcccttcggattctcagctaccattctttccatctaccgaggtccttgtcaagtgtttgtttttgattgcaccttatgctgttgtgcatagtctgagatcatattctcgaattattttgtgctcccaccacccttgccttaccagctcctcaagcccagctggcgtatataagaggttgcaaagaaggcttagacaagaacagatcttttttgttgacttaattactcccaacatctctgttatctgcaagcacttcataggactccaggagcgcaccttgcacgattccttctctgagagtgatattaagatattctatactccagaggggcagttgtcaaccgagcaaggagtttacattgctgaggctgttgctaacaaaaatacaaaacttgcaaaggggcgtttccgtgcatatgatgatcagatgcaggagacagctcggtctattgtccctgcaaagaatgagaagaaagaatcctcaggcattggcaagcgagaaactgggaaatctacaaaaaggactgctcctatagacaaggctaagactgctaaagaggaggccagagagttgctcttgaaggaggaagcatctgtgcgtatgaaggttgggcaagtgcagaaggatctctccttaatgttggatgctcttggcaagttggctattgctaatcctatatttactcatggtcaactgccgtcactggtaaactatgttgaacctttgctaagttctccaatagtaagcgatgctgcattttgtacaatgttgaggctagcacgttgcacagcccctcctctttgcaattgggcgctcgacattgctgctgcgattcgtgtgatatctgttggtgattttgaaatggttttggatcttacacctgtgatcatggaagatgatagtaagaagccatcatctggcatctttgaacaaatagtaaatgggctgactattgcgtgcaaagcgggtcctcttccagcagattcatttactttcgtctttccgatcatggaaaggatccttctatcttcaaaaaagacatgtcttcatgatgatgtgcttcacatactatctatgcatatggatccaatactaccacttcctcgacctaggatgttatcagttctttatcatgtgctaagcactgttcctgcctatcaaccttcagttgggcctatgctgaatgagctatgcctaggtctaagaggccatgagttagcacaggctcttgtcggtgtatatgcaaaagaactgcatgttaggcttgcctgcttaactgctataaaatgtgttcctgtgcactctgtgcaacgagatttgcaggtgtcaacaagcctctggattgctgctcatgatccggagaaggtggttgctgaattagcagaggaattatgggaccgctttggttttgatgccatcactgattactctggtattttcaatgcactttcccataaaaattacaatgttcgtgctgcatctgctgaggctctggctgcggcattggatgaaaatcaagacaaaatgcaagatgcactttctacccttttctctctgtacattcgtgatattggcactagtgttgaatttggagatgcacactggctcggaaggcagggtattgcattagcactccactctatcgctgacgttttggcctctaaagatcttcctgttgtcatgacatttctcatctcacgcgccctggctgatccaaacgtcgatgttcgtggtagaatgattaatgctggcatccttattattgacaggcatggaaaggaaaatgttcctttgctatttcctatttttgagagctacttgaataaaagggcatcagatgagaaaacatatgatcttgtgagggaaggtgttgttatttttactggtgctctggcgaaacatctatcaaaggatgatcccaaagttcacagtgtcattgaaaagttgttagatgtccttaacaccccatcagaggcagttcaacgtgctgtctcagattgtttgtccccacttatggtatccaaacaggaagagggtcaggctcttgtttctagactcttggatcggatgatgaaatgtgaaaagtatggtgagcgacgaggtgcagcctttggccttgctggtgtggttaaaggatttggaatttcttccttgaaaaaatatggcatcgctgtgacattgcagaaaaatttggaagacagaatgtctgcaaaatctcgtgaaggagctttacttggatttgagtgcctgtgtgagaagcttggcaaactatttgagccgtatgtcattcaaatgcttccgttcctacttgtgtgtttctctgatcaagtcctagcagtgcgcgaagctgctgagtgtgctgctcgggcaatgatgtctcagctcactggtcctggtgtgaagcttgttcttccgtcacttcttaaggtatcaatatatcttatttgatgctatcaaatcataacatttattgtgtccaaatgttctggagaatacaagtgtccagttcatctagttatatattgaaatctgacaaccacttaacttctgctgaatatttaggccattggcaccacaaactactagtttgttttcattaacttgaaagagcagaacatctt

SEQ ID NO: 206855 - DNA, 3088 bp, Zea Mays
catccttacaaaatctcttagattgtgatggaatctacccggaaattgctgcttccaccttgcagaaggtggctgttgatagatgcggtgtgccccctgtggaggcggccgtggaggtgctgcatcgtccaggaccagcttcccaaactagcagatgatgattgcttagccgtcctggatcttgttcaatcactgtttgtagaacagttcttcagggttcgagaatatttttcaatccattcattgctgcagctgctaatatatctactttgccatccaagctgggaagttagaaaggtagcttacgatgttaccaagaaaattttctcaagctccagtggtctagccgaagatattctatttttattcacagactggttgtcactggttggagagagactgtcaatattgaaacaaggtgatatggatagcccttcggattctcagctaccattctttccatctaccgaggtccttgtcaagtgtttgtttttgattgcaccttatgctgttgtgcatagtctgagatcatattctcgaattattttgtgctcccaccacccttgccttaccagctcctcaagcccagctggcgtatataagaggttgcaaagaaggcttagacaagaacagatcttttttgttgacttaattactcccaacatctctgttatctgcaaggaattactttcacaggatggtctatttagttccaacaatcaagtacagagtgcagcattatgttcgctatcaacacttatgacaattactcccaacgacacatttctagagtttgagaagcacttcataggactccaggagcgcaccttgcacgattccttctctgagagtgatattaagatattctatactccagaggggcagttgtcaaccgagcaaggagtttacattgctgaggctgttgctaacaaaaatacaaaacttgcaaaggggcgtttccgtgcatatgatgatcagatgcagagacagctcggtctattgtccctgcaaagaatgagaagaaagaatcctcaggcattggcaagcgagaaactgggaaatctacaaaaaggactgctcctatagacaaggctaagactgctaaagaggaggccagagagttgctcttgaaggaggaagcatctgtgcgtatgaaggttgggcaagtgcagaaggatctctccttaatgttggatgctcttggcaagttggctattgctaatcctatatttactcatggtcaactgccgtcactggtaaactatgttgaacctttgctaagttctccaatagtaagcgatgctgcattttgtacaatgttgaggctagcacgttgcacagcccctcctctttgcaattgggcgctcgacattgctgctgcgattcgtgtgatatctgttggtgattttgaaatggttttggatcttacacctgtgatcatggaagatgatagtaagaagccatcatctggcatctttgaacaaatagtaaatgggctgactattgcgtgcaaagcgggtcctcttccagcagattcatttactttcgtctttccggttctttatcatgtgctaagcactgttcctgcctatcaaccttcagttgggcctatgctgaatgagctatgcctaggtctaagaggccatgagttagcacaggctcttgtcggtgtatatgcaaaagaactgcatgttaggcttgcctgcttaactgctataaaatgtgttcctgtgcactctgtgcaacgagatttgcaggtgtcaacaagcctctggattgctgctcatgatccggagaaggtggttgctgaattagcagaggaattatgggaccgctttggttttgatgccatcactgattactctggtattttcaatgcactttcccataaaaattacaatgttcgtgctgcatctgctgaggctctggctgcggcattggatgaaaatcaagacaaaatgcaagatgcactttctacccttttctctctgtacattcgtgatattggcactagtgttgaatttggagatgcacactggctcggaaggcagggtattgcattagcactccactctatcgctgacgttttggcctctaaagatcttcctgttgtcatgacatttctcatctcacgcgccctggctgatccaaacgtcgatgttcgtggtagaatgattaatgctggcatccttattattgacaggcatggaaaggaaaatgttcctttgctatttcctatttttgagagctacttgaataaaagggcaagtactactttcctattaataattgtactagcatcagatgagaaaacatatgatcttgtgagggaaggtgttgttatttttactggtgctctggcgaaacatctatcaaaggatgatcccaaagttcacagtgtcattgaaaagttgttagatgtccttaacaccccatcagaggcagttcaacgtgctgtctcagattgtttgtccccacttatggtatccaaacaggaagagggtcaggctcttgtttctagactcttggatcggatgatgaaatgtgaaaagtatggtgagcgacgaggtgcagcctttggccttgctggtgtggttaaaggatttggaatttcttccttgaaaaaatatggcatcgctgtgacattgcagaaaaatttggaagacagaatgtctgcaaaatctcgtgaaggagctttacttggatttgagtgcctgtgtgagaagcttggcaaactatttgagccgtatgtcattcaaatgcttccgttcctacttgtgtgtttctctgatcaagtcctagcagtgcgcgaagctgctgagtgtgctgctcgggcaatgatgtctcagctcactggtcctggtgtgaagcttgttcttccgtcacttcttaaggtatcaatatatcttatttgatgctatcaaatcataacatttattgtgtccaaatgttctggagaatacaagtgtccagttcatctagttatatattgaaatctgacaaccacttaacttctgctgaatatttaggccattggcaccacaaactactagtttgttttcattaacttgaaagagcagaacatctt

SEQ ID NO: 206856 - DNA, 2997 bp, Zea Mays
ccttatcctaactgaccaaatcagtctaacttatctctttccttatcctaatcaaatcaatctaacttatctctttcctaacaaactaaaccaatctaatctatccggcactctacttgccacaacaatttaggtagaatgtgtttggagaaatagtgattagttgttacaaaaactcaagggcatagtgtaatcattgcttcccaaactagcagatgatgattgcttagccgtcctggatcttgttcaatcactgtttgtagaacagttcttcagggttcgagaatatttttcaatccattcattgctgcagctgctaatatatctactttgccatccaagctgggaagttagaaaggtagcttacgatgttaccaagaaaattttctcaagctccagtggtctagccgaagatattctatttttattcacagactggttgtcactggttggagagagactgtcaatattgaaacaaggtgatatggatagcccttcggattctcagctaccattctttccatctaccgaggtccttgtcaagtgtttgtttttgattgcaccttatgctgttgtgcatagtctgagatcatattctcgaattattttgtgctcccaccacccttgccttaccagctcctcaagcccagctggcgtatataagaggttgcaaagaaggcttagacaagaacagatcttttttgttgacttaattactcccaacatctctgttatctgcaagcacttcataggactccaggagcgcaccttgcacgattccttctctgagagtgatattaagatattctatactccagaggggcagttgtcaaccgagcaaggagtttacattgctgaggctgttgctaacaaaaatacaaaacttgcaaaggggcgtttccgtgcatatgatgatcagatgcaggagacagctcggtctattgtccctgcaaagaatgagaagaaagaatcctcaggcattggcaagcgagaaactgggaaatctacaaaaaggactgctcctatagacaaggctaagactgctaaagaggaggccagagagttgctcttgaaggaggaagcatctgtgcgtatgaaggttgggcaagtgcagaaggatctctccttaatgttggatgctcttggcaagttggctattgctaatcctatatttactcatggtcaactgccgtcactggtaaactatgttgaacctttgctaagttctccaatagtaagcgatgctgcattttgtacaatgttgaggctagcacgttgcacagcccctcctctttgcaattgggcgctcgacattgctgctgcgattcgtgtgatatctgttggtgattttgaaatggttttggatcttacacctgtgatcatggaagatgatagtaagaagccatcatctggcatctttgaacaaatagtaaatgggctgactattgcgtgcaaagcgggtcctcttccagcagattcatttactttcgtctttccggttctttatcatgtgctaagcactgttcctgcctatcaaccttcagttgggcctatgctgaatgagctatgcctaggtctaagaggccatgagttagcacaggctcttgtcggtgtatatgcaaaagaactgcatgttaggcttgcctgcttaactgctataaaatgtgttcctgtgcactctgtgcaacgagatttgcaggtgtcaacaagcctctggattgctgctcatgatccggagaaggtggttgctgaattagcagaggaattatgggaccgctttggttttgatgccatcactgattactctggtattttcaatgcactttcccataaaaattacaatgttcgtgctgcatctgctgaggctctggctgcggcattggatgaaaatcaagacaaaatgcaagatgcactttctacccttttctctctgtacattcgtgatattggcactagtgttgaatttggagatgcacactggctcggaaggcagggtattgcattagcactccactctatcgctgacgttttggcctctaaagatcttcctgttgtcatgacatttctcatctcacgcgccctggctgatccaaacgtcgatgttcgtggtagaatgattaatgctggcatccttattattgacaggcatggaaaggaaaatgttcctttgctatttcctatttttgagagctacttgaataaaagggcatcagatgagaaaacatatgatcttgtgagggaaggtgttgttatttttactggtgctctggcgaaacatctatcaaaggatgatcccaaagttcacagtgtcattgaaaagttgttagatgtccttaacaccccatcagaggcagttcaacgtgctgtctcagattgtttgtccccacttatggtatccaaacaggaagagggtcaggctcttgtttctagactcttggatcggatgatgaaatgtgaaaagtatggtgagcgacgaggtgcagcctttggccttgctggtgtggttaaaggatttggaatttcttccttgaaaaaatatggcatcgctgtgacattgcagaaaaatttggaagacagaatgtctgcaaaatctcgtgaaggagctttacttggatttgagtgcctgtgtgagaagcttggcaaactatttgagccgtatgtcattcaaatgcttccgttcctacttgtgtgtttctctgatcaagtcctagcagtgcgcgaagctgctgagtgtgctgctcgggcaatgatgtctcagctcactggtcctggtgtgaagcttgttcttccgtcacttcttaaggtatcaatatatcttatttgatgctatcaaatcataacatttattgtgtccaaatgttctggagaatacaagtgtccagttcatctagttatatattgaaatctgacaaccacttaacttctgctgaatatttaggccattggcaccacaaactactagtttgttttcattaacttgaaagagcagaacatctt

SEQ ID NO: 206857 - DNA, 1083 bp, Zea Mays
cttgtccattccatggctccggccagcaaagagccggattcttcctatcccctaccaaaccccaccaccacgagcggctgccgcgcgggagaccaggacgcatggtgactgcctcctccttcactgccatcttcttcagaagtgccttcgtcgcctgcttcgcggagccaaagtgcagatccagctgcaaaggaaggcaccattaacgccaccacctgtggctgcaacagccacaactgctgctggtggagggacactagccacaataacgtgcatcgccagagaggaaggggttgccacgctctagaagggcatcatccttggcccccactgtcagttcctctatgatggcctccacatcggcctgtgaaggctttcttcgtcagaggtgctgttgtgggtgatgtcagtttactaagcaagattcttgctgcgcttgccacaggtgtgatagctattgttgtggcaaatccaactgatctcgttaatgttaggttgcaagttgatggaaaggctaacactgtcaagaggagttattctagagcccttaatgtatatgctataataatcagacatgttactttaaccatcatgggcagtcactgcattgctgatagtgaggagcagaaagttcatgttattgctggtgtgatgacccttaccactccaattttagtccacccctattgaccacatagttcaaatgagtattatgggtgtgattacatgagtcatatctgcaacatggctcattttttaatgtttgctggtgggaggctcatctcttctatgtctacaagaatattttgccagtgatgacatgtgtttagaggatgggatccttgcaattgtcaaacaagatgagagaccccttgaattgcttgctaaagcatatgctatcaactcttttgacatagatcctcagaacccctctgatgttgttttcacgttagaatgggaatcagtcggtgtcctaccttgtggcgagaagaaagataatttttactaccgagggacttcagaattttaggctcattcatacattcactacaatgccttcgaactcatgaacatttatctctg

SEQ ID NO: 206858 - DNA, 922 bp, Zea Mays
tctgtgtcttgtccattccatggctccggccagcaaagagccggattcttcctatcccctaccaaaccccaccaccacgagcggctgccgcgcgggagaccaggacgcatggtgactgcctcctccttcactgccatcttcttcagaagtgccttcgtcgcctgcttcgcggagccaaagtgcagatccagctgcaaaggaaggcaccattaacgccaccacctgtggctgcaacagccacaactgctgctggtggagggacactagccacaataacgtgcatcgccagagaggaaggggttgccacgctctagaagggcatcatccttggcccccactgtcagttcctctatgatggcctccacatcggcctgtatgatcctgtgaaggctttcttcgtcagaggtgctgttgtgggtgatgtcagtttactaagcaagattcttgctgcgcttgccacaggtgtgatagctattgttgtggcaaatccaactgatctcgttaatgttaggttgcaagttgatggaaaggctaacactgtcaagaggagttattctagagcccttaatgtatatgctataataatcagacatgttactttaaccatcatgggcagctcatctcttctatgtctacaagaatattttgccagtgatgacatgtgtttagaggatgggatccttgcaattgtcaaacaagatgagagaccccttgaattgcttgctaaagcatatgctatcaactcttttgacatagatcctcagaacccctctgatgttgttttcacgttagaatgggaatcagtcggtgtcctaccttgtggcgagaagaaagataatttttactaccgagggacttcagaattttaggctcattcatacattcactacaatgccttcgaactcatgaacatttatctctg

SEQ ID NO: 206859 - DNA, 892 bp, Zea Mays
gctgcctctgtgtcttgtccattccatggctccggccagcaaagagccggattcttcctatcccctaccaaaccccaccaccacgagcggctgccgcgcgggagaccaggacgcatggtgactgcctcctccttcactgccatcttcttcagaagtgccttcgtcgcctgcttcgcggagccaaagtgcagatccagctgcaaaggaaggcaccattaacgccaccacctgtggctgcaacagccacaactgctgctggtggagggacactagccacaataacgtgcatcgccagagaggaaggggttgccacgctctagaagggcatcatccttggcccccactgtcagttcctctatgatggcctccacatcggcctgtatgatcctgtgaaggctttcttcgtcagaggtgctgttgtgggtgatgtcagtttactaagcaagattcttgctgcgcttgccacaggtgtgatagctattgttgtggcaaatccaactgatctcgttaatgttaggttgcaagttgatggaaaggctaacactgtcaagaggagttattctagagcccttaatgtatatgctataataatcagacatgttactttaaccatcatgggcagtcactgcattgctgatagtgaggagcagaaagttcatgttattgctgatgagagaccccttgaattgcttgctaaagcatatgctatcaactcttttgacatagatcctcagaacccctctgatgttgttttcacgttagaatgggaatcagtcggtgtcctaccttgtggcgagaagaaagataatttttactaccgagggacttcagaattttaggctcattcatacattcactacaatgccttcgaactcatgaacatttatctctg

SEQ ID NO: 206860 - DNA, 1204 bp, Zea Mays
aaacaccacacatttcctttcaatctagcgatgcctaccaggcaacaggatgctacaacctgctgtgctcggggttcatccagataaacaaccagatcgccatgggcgccagcatcttccctatctccaactacggcggctcccagtatgacatcaacatcttggtctggaaggaccccaaggagggcaactggtggctgcagttcggcaacgactacgtcctggggtactggccgtcgttcctcttctcgtacctggcggacagcgcctccatgatcgagtggggcggcgaggtggtgaactcggagcccgacggcagccacaccagcacgcagatgggcagcggccacttccccgaggaagggttcggcaaggccagctacttcaggaacgtccaggtggtggactccaccaacaacctcaagccgcccaggggcgtcggcaccttcaccgagcagtccagctgctacgacgtgcaggacggcagcaacgccgactggggcacctacttctactacggcgggcccgggaagaactcaaactgtccatagcccaagactgactgagctgagccgccgcctatcacactcactaccagagccgcctaaccttaacacacctcagctgtatcattcatgcatccggtcaattagtttatactgcctcagatttttaacttttttttttgttttcgttttgtttcgctctttcttgcttctacctaccccctagtttactgactcgtaccctaggtgagtgagcgtgtgtgttgttgacatgtgagattgttctctctctctctctgcctcagagagagtgagatgaaggagagatgtcggtcgtctggttctagggaagagaggaggactgtggcccgttttctgaagagaaaaacaaggcctcatggttgctgtgccttgtgcctgtcaaataattttgtttgtttcatcccatgctggactggactgctaatcctttgttttctgttatgaaaagtgggcaatcgagtgcttagctgttgggtagacgtgcaaagatgccaacttttccgtgcgcccgccgagtctgtctgttgcccacttgtgtcacctggaaaagtgcgtgtgcgggtgatcattttatatgtaaatgtgtttgttattaatattattatagcagcgtgtggtgctggtgctggtgctgctactgtaataagctggtggag

SEQ ID NO: 206861 - DNA, 1407 bp, Zea Mays
cgagaccaaagggaaagtgaggccacgcactatcatctctgtctctccccctagctctctattggattggcttgctcccccaataggagaaaagcgaggattcagaatcctcctcttcctcctccccttccacgccatctctctcttcagctagatagcttctcgattcaccttctttccttgcactcgtctctagcagccgtggtgcagctaggtgattgagtatatacgagatgcagcgcacgaccgatagggagctgtagctagagatcgatcgagacatgatacgtaccaccacacggtcgcggccagcagcaccagcaagaggaggaggaggaggaggctgtcgccgccatggtcccaacaactaggaacctgttgttgcaccatgacgtcgacggcaagagcagccgcggcaggccgtgctaccacccggccggccaccagtactacgtcggcatcgccgcccaactggaggcctcggcggcatccgccgcgtggcagcaggaccaccagagcaagccgtcgagatcccctcggctgctgggcatggcagacgacgacgagcagccggacgcggcggcagggcccagcacgagctccgcatcaccgggcggcgccggcgcaggaaacggacgaggaggagactggctccagcttggcctagccgcagccgcggcgtcggcgtcgtcctccggcgacaacagcaccatggatccggatcccccggctcccacggagctggagctttccgcctatgacaagcggaacgcctgcaggatgaggcggccgccgttgttcccgctgccgcttaggagctaccacccgccctacggctacggacggtatcgaccggcggcggcagcagctagccggtccatgccgttcatgcctccgtccaggtgctccagcagcgatgccataataagagtcatcagcccgccgcggcggcggacggaggcgcccaggctgtggctgacgcttcaggcagctcccaaccaaagtagagagcctgttttgcctcagatagcaaagagctacctaagaatcaaggacagcaacatgacggtggaggtggtgatgaagtacttggccgagaagctaggggtcgcgcggtctcggtctcggtctcggtctcatcagccaagcgaaggggccagcatgcaggggcgtccatgggcctgtgcaggctgggcgaccgcacagggcccccaaagttgaagggcccccaagttaatctaaaacatcaagccggcgggactgcaagaaccgagagcgcgcggccaaggccggaggccagagagactgcgggagcgggagcgcaccgtcaacccgtcgtgcccagtgcgtcaatgcccaccggccaccgccaaggcgacgtcggccagccgccagccgtagagcaga

SEQ ID NO: 206862 - DNA, 616 bp, Zea Mays
ggcttcaaatgtgcaatgtaaataagggttcttaagatacatgatttccccaaagttaaaaaaccaatgttcgacgatttttctatgattgcagctaatttcagtcgaaaattagtcacgtctaagtgtatagatatatggtagattaatatatagtatacacttgcacgtacacattaggaaaaaaatgtaaatacatgtgtgaaattatctgacaattcttcatatggtatttgtccacggtaggtaggctaggtgttcccttagtttttgtgcaaaatatggaggatgaatcactcgatgactattgaagtaaagaatacaaaacaattgtgttgttttagtttttttgaatgaataatgataatgaaatataatgcgcaccacaaagacattagagtcaacaggtacatgtttgaactaatcatagttgtccaactcggcagcgttaattatgacattgcgtgcgacatttgggccaaggccagtccacaaagctccaataccttcttggaaacatgaaagattttaaggacaacgaaaaaagaaatagtcttgtacacttactgcccatgatggttaaagtaacatgtctgattattatagcatatacatt

SEQ ID NO: 206863 - DNA, 982 bp, Zea Mays
tttgtgtgtacccttgaccctaattgacacaagtaaccataaatcccagcccttctccgtcctttccatggagacgaagccggagcggcaccaccgccacgaggaagcccgtgacggggaggacgacgcagtagccatggaacacggcgctctctcgctgcaacgcggcggagccaccttgtttggctggcggcaggacgaggaggccggccgccgccgccgagtagagatccgggaggtggacttcttctcgagggactccagagcccgcagccatgacgacgccggcgacggacgtgacgacgtcaacatcgggctacacctgctaaccacgacaagccccgacgaggaaatgacggcggcggcggccaagaatcaaaagatagaggcctcatcagctgttgaagcagagctcaggcgggtggtggaggataacaggcggctgcgtggcatgatgaacgagctcacacggaactatggcgcgatgtaccagcagcttctccaggtcacacaacaccacccacatcgacagcatcccgttgatctcatgatcaacagatcatcattggctcatacccgcctgaccaccgcggcctcgtacaacgacgacacgtccgctcagcagctgttgagggttgaggacgaggcggctagcgacggagctggagaggcgtcgccttcgctgagcaatggaggaaaccataacgacggcggcgacggcaagcagcggaggacgtcttcgaatgtgacagcaccgccggcgagagagaacggcggcggcgagcgggcggagttgccagcccacaagacaagggtgtctgtgcgtgcgcgatctgaggcaccaatgatcagcgacgggtgtcaatggagaaagtacgggcagaagatggccaaaggtaacccatgcccaagagcatactaccggtgcacaatggctgtggcatgccccgtgagaaagcagaaagggataccatgccattaa

SEQ ID NO: 206864 - DNA, 2151 bp, Zea Mays
ctaagccatactccatcacattgatcatgatattcacattcacaggcactgggcaccaactcatgataagaaattactcgctcaagttctccatttgcagtttcatggtagagaagtgcactcgttgtgtttcataaatccagcaagccattcagatcctgagaatagctcagatctgttgatagcaaccgggtgtgaagatggaactgtgcgccttacaggatttttgactggtagttctggaaaatggcattcctcaaagttgctaggggagcatgtaggcgggtcagctgtgcgagctacatgcttcataccagagacctacacagtaacatataattcatgtaactacagttcgaacggtatttctgatggcattgctgttgaaaaagacgagactttcttactcatatctgttggatcaaagcaagtcctcactacttggattttgcaaccgaggaatgcagaaaacagacaagtatattcaagtggcttagatattgactccaagcaaaactccagaaacttggaaaacgttgattcagccatgtcatttcaatggctaactacccacatgccaccaaagcttcctaggaacagactgaaatctggccacataaaacagagggttgaggaaggaaatttttctgttgttcagccaaatatggacgttatggatcacatggaaaatgactggcgttacctttctgttacagcatttcatttgaagcatccggttctcagcaggttgacagtatgttttgttgctgttgcttgctcggatgcaacagttgtgctccgtgctcttctgttaccttctcgattgtggtttgacgttgccttcttggttccacatgcatcaccagttttggtgctgcggcatattatcatcaatgctagccactataaagatgatgctggagacagataccttattgcgagtggatcaacagatggtagcatcactttttggaacctgacagagaccattcatggcttcatgcaactaatatcagagactcaaccacatatgagtattgattatcaaaagcgtcccaggacaggaagagggagtcaaggtggtcgtctccggtggagatcactgtcatacgcttcgaagaagagagatggagatatgtcatcctctgacggaagcaacccgggtagcctaaacactgctgaaaattcatctgaagcttctggtgtggaaaacactcagattgtagtgcatgaagcaagtgacagctcaaaaactgagatgccttcaagtacccagtcatgtgatatacctgaattgagaccaatgcactcgttatccggtgttcaccagtcaggcgttaattgcctccacatatcattctcaacacctgacaagtcatactgcattataagtggtggagatgatcaatctgttcagcgcttcaacttcagagtaatatcttcggaggattgcttaacaaccccagcaaggctaaattcgcatgacaatgacacacttaaaattctatatcaacataaggtagcatcagctcatagtgcagcagttaaaggaatctggacagacggcacttggtcgttctctactggccttgatcagagagtaagatgctggaagatgggattagccggccaattcacggaatactcccatgctatcattagcgtgcccgagcctgaaactctagatgttttccatgaccgggcaaagaggaagtaccacattgctgttgctggaaggggtatgcaaatggtcgagttctcaccacctgaagatgattgactacaatgattgcaacccctgctatggatgtcacatggatgttgattttgctcggcttgcgtggatcatgtagttctatactgagacggttttttttaaaaaaaaaatggttaaggatgtaacaaacagagaatttgatgtgttatcaggctatgacaaacagatcctacatatacacatataaaacactgttttgcatttgcaatgtataatgtactatttacagagtggagtttcaaatgagggattgagatgagtaagctgctagagatagtcttagaaacgtttggtgcgcaggggagcactgtagcagggaagtgtggcctgacgatacgtaaactgttgagatcatcgttgatgagagaataata

SEQ ID NO: 206865 - DNA, 4357 bp, Zea Mays
ccaaacctaactgacattcgagcaatcgagcggcagccgtcgccgtcaattccaagcagcctacgccgcctcgccgatggccgccggcggccacctccgcccgggctcctacctgggggacgtatcagcgctctccttgctcccctcctcgccgcaccctctcctcctcgccgggactggatcgcagctgctcttgtacgaggtgggcgctgccaggctcgttgcgtcgttccgagtgttcgacggggtgcgcgtccacggcatcgagccccggagcggaggccccggctgtcacagctacacgcttgcgttgtttggcgagaggagggtgaagctattctccctcggattcggtgttgaagcagatggcggtgaggcgcggctggagctggagcagaggctcccggggtttgaccattgggtgctcgacactcgtttccttgaggtcgatgggctgcttgcgattggtctgagtgacaattcagtagcgctgtgggatctgagcaagcgtgcgttggttacccgagtgaagtctccagagaagtgccttctgtattccatgagaatgtggggagactctgttagagagtttcttgtggcatccgggaccattttaaacgagattctcatatggaaattggcaccgcaagttctgggatcctccatggtatgctccaatgaaggaaatacttctgatgtaaacagtcccaaaattatgaatcctgatgatagtcagcacatggcagttcatcttggtaggctcaaggagcatgaaggctcaatattccgaatagcttggtcctctgatggatcaaagtttatgtctgtttctgatgaccgtagtgctcgcgtgtggactttgagtttcaaatcacagggtttcgccaatcatacagccagtcacgacaatgttgaaattataccaaaactcacactttttggccatagtgctaggatatgggactgctatgtttctgattctatggttataactgctggtgaggattgtacttgttgcatttggggaatggatgggaagcttatcaagatgttcaaagaacacattggacgaggaatatggcgatgtttatttgacccaagctcactgcttgtggtcaccgctgggtttgattcagcaatcaaagtgcaccatctatgcaactccatttttcatgacatagtggacgataaaaaggtctctggcctgaactatgattctgagatctttgtagtatcctctccttctgtttcggggcagtatggtcccctggatagcaaaagcgagtatgttcgctgtctacactttgcagaagaaaatgttctgtatgttgccacaaataatggatatctgcgtcaggccaaactctctaacatagaggatgtaagatggactaagattattcagggaggacataattgcccttggagatggacggggaaatgttactattgtccgtttaaccagtagcagcagtgaacctaaactagacctatcttttacctggtcagcagaaaaagataggcaactactaggagtgtactggtgcaaggctcttgaatgtagccacattttcacagctgatcctaggggtgtgcttaagttgtggaacataagaaatgtcctgttctcaagtactgatattatcaatgcacctcagatgtttccacctgtagcagtgtttgaaccgtcctttggagctcgaattatgtgtctagatgcatctcctgaagaggagatccttatagctggtgataaaaagggtaacatcacagcctatcctttccctaaaatattggtactgcatgacagtggtctgatgcaacagaagatgcttccatgttgtcgctttaaaggagctcatggcatttctagtgtcacgagtgttcatatagaagactccacttctgatcatattgaaattcacactaccgggggagatggttgcatttgctttttcaagtatggaagaattgcacaaaagattgaattttttggaatgaggcaagtaaaagaactgggcaccattcaatccatctacactaatcttgcatctgagagccaatctagtagtacctacgcaataggtttcacctctgcagattttatcatttgggaccttgagaatgaaacaaagatggctcaagtatcctgtggtggctggcggcgcccttattcttattatcttgggacagtccctgaatatcagaactgctttgcctttgtaaaggatcatgatattcacattcacaggcactgggcaccaactcatgataagaaattactcgctcaagttctccatttgcagtttcatggtagagaagtgcactcgttgtgtttcataaatccagcaagccattcagatcctgagaatagctcagatctgttgatagcaaccgggtgtgaagatggaactgtgcgccttacaggatttttgactggtagttctggaaaatggcattcctcaaagttgctaggggagcatgtaggcgggtcagctgtgcgagctacatgcttcataccagagacctacacagtaacatataattcatgtaactacagttcgaacggtatttctgatggcattgctgttgaaaaagacgagactttcttactcatatctgttggatcaaagcaagtcctcactacttggattttgcaaccgaggaatgcagaaaacagacaagtatattcaagtggcttagatattgactccaagcaaaactccagaaacttggaaaacgttgattcagccatgtcatttcaatggctaactacccacatgccaccaaagcttcctaggaacagactgaaatctggccacataaaacagagggttgaggaaggaaatttttctgttgttcagccaaatatggacgttatggatcacatggaaaatgactggcgttacctttctgttacagcatttcatttgaagcatccggttctcagcaggttgacagtatgttttgttgctgttgcttgctcggatgcaacagttgtgctccgtgctcttctgttaccttctcgattgtggtttgacgttgccttcttggttccacatgcatcaccagttttggtgctgcggcatattatcatcaatgctagccactataaagatgatgctggagacagataccttattgcgagtggatcaacagatggtagcatcactttttggaacctgacagagaccattcatggcttcatgcaactaatatcagagactcaaccacatatgagtattgattatcaaaagcgtcccaggacaggaagagggagtcaaggtggtcgtctccggtggagatcactgtcatacgcttcgaagaagagagatggagatatgtcatcctctgacggaagcaacccgggtagcctaaacactgctgaaaattcatctgaagcttctggtgtggaaaacactcagattgtagtgcatgaagcaagtgacagctcaaaaactgagatgccttcaagtacccagtcatgtgatatacctgaattgagaccaatgcactcgttatccggtgttcaccagtcaggcgttaattgcctccacatatcattctcaacacctgacaagtcatactgcattataagtggtggagatgatcaatctgttcagcgcttcaacttcagagtaatatcttcggaggattgcttaacaaccccagcaaggctaaattcgcatgacaatgacacacttaaaattctatatcaacataaggtagcatcagctcatagtgcagcagttaaaggaatctggacagacggcacttggtcgttctctactggccttgatcagagagtaagatgctggaagatgggattagccggccaattcacggaatactcccatgctatcattagcgtgcccgagcctgaaactctagatgttttccatgaccgggcaaagaggaagtaccacattgctgttgctggaaggggtatgcaaatggtcgagttctcaccacctgaagatgattgactacaatgattgcaacccctgctatggatgtcacatggatgttgattttgctcggcttgcgtggatcatgtagttctatactgagacggttttttttaaaaaaaaaatggttaaggatgtaacaaacagagaatttgatgtgttatcaggctatgacaaacagatcctacatatacacatataaaacactgttttgcatttgcaatgtataatgtactatttacagagtggagtttcaaatgagggattgagatgagtaagctgctagagatagtcttagaaacgtttggtgcgcaggggagcactgtagcagggaagtgtggcctgacgatacgtaaactgttgagatcatcgttgatgagagaataata

SEQ ID NO: 206866 - DNA, 3977 bp, Zea Mays
aaacaggccaaaccttccagaaacgagcgaaaaagcgtccccgatccagcacagacagacacacaccggaaggaggcgcaccttcccccagccccactatacgacgaccgccgcggtcgaaccaaaacagcttcctcctcccggcgtcgcctccgcgacgatcctttccgccgccccatagggttctgctgctcccgatccgggcgccagatctcgcgtggcgacgcgcggatctcggatttctctagaggcggcggcggcggcggccggagcaggaggagatggcgctctcggggatgcgggggctctcggtcttcatcagcgacgtacgcaactgccacaacaaggagcaggagcgcctccgcgtcgacaaggagctcggcaacatccgtacgcggttcaaaaacgagaagggcttgtcaccatacgagaagaaaaaatatgtatggaaaatgctttacatttatatgctgggttatgatgttgattttgggcatatggaaactgtctcgttgatatctgcaccaaagtatcctgagaagcaggttggttatattgtgacatcttgcttactgaatgagaataacgatttcttaagaatggtaataaatacagtaaggaatgacataatcggacgaaatgagaccttccagtgcttagcattgacaatggtaggtaacattggtgggaaagaattttctgagtcactagccccagatgttcagaaacttcttatttcaagcagttgccgtcctgttgtcagaaagaaggctgctctatgccttctgcggctttataggaagaatcctgatgttgtgaatattgatggctgggctgatcgaatggcacaacttctagatgagcgtgatctaggtgtgctgacatctgtcatgagtctttttgtttcactagtatccaacaattctgaagcatattggaattgtcttccaaaatgtgtaagaatattggagagattagcaagaaatcaagatattccacaagagtacacttattatggaattccatctccttggcttcaggttaagacaatgagagctcttcagtacttccctaccattgaagatcccaacgcaagacgggctttgtttgaggttttacagcgtattttgatgggtactgatgttgttaaaaatgttaacaagaacaatgcctcacatgctgttctctttgaagctcttgctctggtcatgcatctggatgctgagaaggagatgatgtcacagtgtgtggctcttcttgggaagtttattgcagtccgggagccaaacattcggtacctcggtctggaaaacatgactaggatgctgttagtaacagatgtgcaggatatcattagaaggcaccaggcccagatcattacatctttgaaggatccagatatcagcattagacggagggctcttgatttattatatggcatgtgtgatgttacaaacgcgaaagaaattgttgaggagttgttgcagtaccttgatacagctgaatttgcaatgcgtgaagagttgtctctgaaggcagctattcttgcagaaaaatttgctccacaactattgtgacaaagctggagattttgtaagtgatgatatatggtatcgagttgtacaatttgtcacgaacaacgaagatctacagtcatatgctgcagctaaggcaagagaatatcttgacaagcctgctttacatgagacaatggtcaaggtgagtgcctaccttcttggggagtatggccatcttttggcccggagacctggctgtagccctaaggaattgtttgctattataaatgataaacttccgacagtatcgacaagtactgtagctattcttctctcaacctatgccaagatattgatccacactcaacctcctgatgttggactgcagcaacaaatcctcacaatatttaaaaagtacgagagctatattgatgttgaaatacaacagagagcagttgagtattttgaactaagcaggaaaggccctgctttggcagatgtgttggctgaaatgccaaaattccctgagcgtgagtctgcacttctgaagaaggctgaagacgctgagattgacacagcagagcaaagtgctataaagctacgcagtcagcaacaaacttccagtgctcttgttgtagctgatcactcccctgcaaatggatctgcaccaccagctaatcatctcactcttgtgaagatgccaagccaaattgtttctgacactcaggagagtggggtaattcatgaagaagttcctaatcctcctgttgaagctcccaaagaaaatgggactcccgtcgaagtggaaagcagggacacaaacattactggaatcaacaatgaggttaaaactgaaccaccctctacatcgcattctacctctcccgcggacctcctggcagatcttttgggtcctcttgcgatagagggccctcctgccgtagagcaaaatcctacccaaggattgaatagtaatcaaagtccagttggtgacttggcacttgctacccttgatgatcaatccaactcagttcagccaattgtcaacgtcgaggaaaagttccatatattgtgcacaaaagatagcggagtgctgtacgaggatcctcacattcagattggtatgaaagcagagtggcgtgcccatcatggccgtcttgttcttttcctgggtaacaaaaatacttcagcccttacgtcagtgcgggtgctgattttgcctcctagtcatttgaaaatggaactttcgtctgttcccgatactattcctccaagggcgcaggtgcaagttccacttgaggttgcaaatctccgtgcaagtagagatgttgcggttttagatctctcatatacttttggaacttcactggtggatggcaaacttcgacttcctgttgtattgaataaatttttgcagcctataactcttacccctgaagaatttttcctccagtggaaagcgctgactgttcacttgctgaaggttcaagaagtggttaaaggtgtgaaaccaatgcctctttctgagatggctaatcttttcatgagccttcacttggcggtcgctcctggacttgataacaacccgaacaatctggttgcatgcacgacattcttttctgaagcaacacgggccatgctttgtctgataagacttgaaacagatccacaagacaggacccaactgcggctgacagttgcctcgggcgatcaacatttgacattcgagttgaaagagttcgtcaaggaacatttgattgatatcccaaggactcaggctgccccacctatggcaatggtccagccacagttgcttactgcagcacctgccacatacaatgaccctggtgccatgcttgctggattgctatgagaagtaaaaaaacaaaagccatagtgttttgatgtacatgacagatgttgatctaacatctccaaaagcatcttgctgccaagacgaacacgtggagcaacgaaagggctggcggagtagtcttcagctggattctaaaccgagaaaaagctagattcttttgggcggtttgaaggcctccttcccctccatggagcagtccccatattgtgtaagcgtaatttgttgtttctcatttatcatccccttttggcccatttatataacttgtattgcccaggtctgttggtggacagtcggtagttatgtgtgttaatataaggtgctaggttttccaccatgccggttgtaaagttgagttggtgcgcattgcattacgatttgtaccaataaggtcgaaatagggaaaggaaattaatagggttttgttttgtgcattttatacggtctgcatagttccgatcccttggactgtctgtttctttcctggtggcggtgggtgtgtgatggcacaagcacgaggttcacgaggctcgattacataatctaacctggttgacaccggcgcgtcatctttttgcctcttt

SEQ ID NO: 206867 - DNA, 432 bp, Zea Mays
gacaaaatagcaaatttctcggcttccgccacacccgctccaggtcccctcccccaaactgaaacgaagttgcggcggtcgcgactgagtgcagagatgctgcagttcccggcgctgatgcggcagtggccatcgccggcgctgatcccggcgtccacgctgctccccgtgccggccacctcccaggaggacgagcttctcctctccatggccgagtccgacctcgaggataagctgaacgagatccggaagaccaacagccacctggttatcatcgggaagcccacgggcgacaccaaggaggagtacgacgctgaggtggaggacgacgatgcagacaacgtcgaggagtctgacggcgacgacttcgaccaggagaccggttgacccaggatatctgcttcgttgctctagctaaatgcgtgaacagag

SEQ ID NO: 206868 - DNA, 5588 bp, Zea Mays
gtcagtatgcttcacaggaaaacacctggacgccatgcatagagcttgctagctccattgccgccacttgtccatgctctgctgctcctccttgcctataaacagacgcccttggcctcatcctctctctctccccccacaatgtcgtcgcccctcccctgcctctccctcctccgcgcccggcaccgccatgaccaagcagcagctaggtctgcgtgcgtgtgcaaatggagagaagggatgcgttggagaagaagatggaaagagcatggtcgtgccgcccagtgcttgccggggcgcgctagcgacttgtgcccatggcctggccggcggccggtgtcctctgttgccaagcgttctctgttgccggagaagaaatgtgcgtgcgttctgaaggaagaagaagacccctttgggtctatgacgtgtgggcccaaggcagggaccgagagatgatgatcgagccagtgatgtggtgccaaccacaagatgcagttggtggacgacctgaagactgatggacttacccagttgatgctcgccaagcgagtacccccccagcaaacactacctaagtgttaaattaaaggcaagccccggttttatgcataaccgttattgtatgttattttactacacttaatgtttgtaggcttgtactgtgcacttaagtgtaggagttgactgaaaccctagttgcatgaactcaggttcccttttgagatggatactagtatgctaggtcgagtagctgctttactaattagggatcttggtagaagtcgagtgatttttctagcactcgcgcgaggtcatgaattggttgtatccactttgataacagaatggtgatggtctgtggacacgagtccatggggacgcgtggtctacgagatgaaaattggaataaggattaacgtgcggatacctgtgtcaagcgtttgaacgtactaaacacataccgagaaatatggtaaatcggtaagcctagtacctgagtgaacctgcccgcagacatatcccctcacgcgacctgagacgtggtctcccattccggttatggtgggtacaagtgcggtcactgcacgacggcagtcggggtcagtgaggcattgtacgccaaggcggtgagccctgatctgttgccagggaatcgacggggacggttgatgtgtgtggggacggagtgccttgccacgtcgtgtgtttaggtttaccttgcaaggataaaaactcgattcgaatcgtctgcttctcgcagctaatgagactgcttgatccattgtactgcattgagtaataagtggaaatgaggtgactggcaaaagatgttgattgataaaatgtttgataccatgtatgaatagctaggtacacatctagtataaaggattctactaaaacttgaaaagctaaaacttgattttagactcagctagtgcttttggcaaaccaaacccctcagccaaacagctgcatgtctagaggtagaggagtagactcctcacaccgggtaagtctagctgagtattagtatactcagccttgcttgtggcataatttttgcaggttcccttagggtgattggttgctggtgtgacttggcctccatccctgccaccgggatagacggtcgagtgggttattgcttccgcaggagaggaccaggaggagtagtgtggccagacttcgccatgttactcggttcttctccgttagttatttccgctgcattaaaatttatggttattatttttgaaactctgataatgtaatcactaatgatacttattaaatttgtggtattatgttttattgtatttctctgtgcctcaccttcgtgtgagctagtggtattcgatcctggtaagtggctttatcggactagatccgagggactgacagattattcctgtttaagtgtgttgctgcccttaagggtgcgacttgggcacttaagctggaataattcgggcggttccgccacagttttgcgccttatgcaattgggaacccaacatacaccaatgttgagggaccaaatatgcctatcgagggatgtaatatgcatgtagagggatcaaatatgggtattgaggggaaaatggtatgtgagacacaacaccactaccaagactgatcacgttatgccaggtgttactaatgatttctttgggcacaaagacgtgggtcaagacgacgtcgaagtttaggttggtaaaagaaaacaagtgaacttttttcgtagcaaaattgcattattattctgagtcatcaacattatttatgaaagtatggaggctttagaggagaccgcaacataacatttttacgaagagtctaagggttgtacccaaaaatcacaatattgtgatctgttatttagttgttgatactttaaggtcaattcagttagtctgatgttagcttcaacgagtgttattagttctagcaaaactccttctagaggagaacaaagtgtatgctaacatgtaatgtacaaagaagctagcgagttcgttgattatgggtatcgaaaagatccacgtgtgtaggaactattgtatcctatattgaggtgaggattatgaaggcttacagagatgtctaaattatagtgctaatagatacaagacgaacaaagattatctcgggaaagagaatggagcctctgatgaagacctccagttagtagtattataatgttctaaaaccagtagatttttttgtaaaaatcctagaaacttcgcccaagtgtatttgatgcccaggataatgaacaaagatcttttgccttttttcttgtcacatttttattagagttaaatgcattgtagcccatgtacttgtcaagagatgtcatttaggtatacgaactttggaaatacatttatgggtccttaaatttattaagtggcataccgcagtggtcggtatgatccaaagatgaacttatcatttaccatttttacaagttcttagcatgtttaagggatccagaaatgcattttcaaagtttgtggatctaagtgacatacttaacatttaactccttttattatatcaaaaaagtttaaatgcatcaatagcaaggaaatgcatgaactatgtttaggatcattttacatacatgatgactctcttgtacatgtgattttattttagaatgtgaacatcattactccgttagtattacctgttctctaagtatcatacagtgacgttcaggttggctatagcaaataaacatatactccctccgttcttttttatttgtctcattttagttcaaaaataaactagttggtgacaaatattcgaaaaccgaggtaatatgtgattggttagctgtaccgtctcgtcccgcgtcaccacgtgcgttgactttatctgagtttgtgtttggttgcctgcacgtgtgaagtgcaggctgtatagacagacataaaataagttatattggttgcatccacacgtacgcctaaaacagtcgtacgtggttggccaggctcacgcgagattatacgcgtgggtacggtcatccaatcaggcgtatatgtaccaagtaccggattgcatcatcatcgacacgtagatatatgttgctacggggcaattatatcggttccacggatgcctaactgaattttgttgtcactgccgtgggggctctcatgctccaatcttcatggagtccactccacagaatcagatggacatggatttgcttcccatgccaattgcaacgagaaaggaaacatgtttgagaattttcgtcatgaaaaacctgcaggtggactcgattcagcagttaatcagttcgggcacatttatctccttgcgatcatggctgaagaatctgagggccggatccatctatgtctgcacgtatgggtcatggcgtgtctgcaagcatgcacactctactgcacatatctgctgccaaccaaactctcccgcgttgttcttcttcacaagcaacgcatgcaactctcttcagcgcgcctatataaacggccgtgggcatgcagcttactcactcaccaccaggtcaccatccaatccagcaaccagcaccagcaccaacctgagcaagccttgcaaaaagagctgcactatatccatcgattctgttctgatcttgttcgctagcttgagtgttcagcccgggctgcaagcctgcaactaaccacctgcactgcagcgtgattagctctacaaatcgcatccagcgggaagctgatgaagcttgtgtacatggtgaccctcctaccgttgctcttcatgtccggcgttcttgaggctgcaggagcgggcaatgacagctcggctgacggcacgaacggcaacttgcacagctctggcaccagcagacccgccgccgcgcccaggggaaggtcgctgcaagcatcgcagagcagcgtgtacagcgtcgaccgctacggtgcccgtggcgacgggaggaacgatgacacgcgggcgctggaaatggcgtggaaggcggcgtgcgcctcgccacggccggccgtcgtgctcgtccctgacggcaggcgttacctgctgaagctcctcaccctccgcggcccgtgcaagtccagcgtcacgctcacggtgaagggcactctggttgcatcgccaaaccgggcggattggagcgacaatgacaggaggcactggatcgtgttccggagcatcgacaagctcaccgtcaacggcggtggcgccatcgatggcaacggcgagaaatggtggcctcactcgtgcaagatcaacaaggctctcccttgcaaggaggctccgacggctctgtcattccactactgcgtcgacctgaaagtggaggatctgaaaatcgtgaacagccaacagatacacatgtcagtcgaggattctgcaaatgcgctgctggcgcggttgtccatcacagcgcctggcaccagccctaacactgacggcatccacatcactcgcagcaaagatgtacgcgtcacagactgcaagatcaagacaggggacgactgcatgtcaatcgagaacgggactcacaacctccatgtctccaaagttaactgtggtccagggcatgggatcagcatcggaagcctaggagacgacaactcaagagcagaagtctccggcatcaccatagattcagtgcaactacacggcacaaccaacggagcacgcatcaagacgtaccagggaggcagcggatacgccaaggacatcacgttccaaaatatggttatgtacgacgtcaagaacccgataatcatcgaccagaactactgcgacaaggctaagccatgcggagaacaagagtcagcagtgcaggtcagcggtgtcgtcttcaagaacattagagggacgaccagtaccaaggacgccatcaagatgaactgcagtgagaacgtcccatgccaaggcattaccttgcagaacatcgacccgctggacgtcgttaaaggtgtcctcgtactatccgtcgaggttgcggacgatgccgaggcctgccttcttactcccgctgctgctccgccccagcctgagtgcccagaccgagcacgccgggcggcggcgagcattcc

SEQ ID NO: 206869 - DNA, 2249 bp, Zea Mays
gtgaaccatcagcgcgctgctttactgctggtagcgctagcgcggcgcggcggcggcggcgtaggaggaggggtcggcggcggagatgaggatgaagacgctggcgtgctgccggcggcggcctcaagacttcagcatcgatatggaccaagagcccgacagggtggtgacatataatggcctcgagacctgcattatcaacagttccacctatgacgatgacagtggcatcagtgcaacaacaggcggagatggctgtatcaccactgattcccttgatgatgaagtctctagttgctctagtaaagatgcttctggttcttccttcacttcacacagtcttagcaagcaggaggagcattcactagatgagttgggtacacccatggcaattcatctactccctttcaaagggaagaaaacaatcacatataccttgagtgcttcagatattgaaaacatgaaggaaaaatttgcaaaactattgcttggtgatgatacttcaggaggagctaggggcgtttgtgtggctctggccttgtctaatggcataatcaatctctctgcaactgtctttggagaactctggaagctggaaccactgtgcgaagataaaaagatcaggtggagaaaagaaatggactggttgctgtctcctacaacttatatggttgagctggttccaacaaagcaaagcggagcagatggatgtacatttgagaatcaaagttatgaagggcaggcctggtgtagcggtgagacctgtctcactgagtcggatttgaaatagtttctcagcatttgtggagggaaggcttgtctcgatttatctcgagacctcattcatgtgggagcctctggctctttattcagaatctaacttggttatttttcaactgaaccatgcagattatgactccaaaggcccgctcagatgtccatgtgaaccttcctgcccttcagaagcttgacatgatgctcattgaagtaatggactcaatgatagatacagaattctggtatgaggagagtggcagcagagctgatggtcgggggaaaattacaggtccaaggaagagtaaaaagtggtggctcccgtctcctcgtgtccctgagcaagggctatctcaattccagcggaaaaggcttgtttttcaggctaagcttgttcaccagatcctcaaagccgcaaaatccatcaacgaacaagtcctgtcccatatgcctattccggccgctgtcatggatgcccttccgaagtctgggagggctagcttgggtgaagatttgtatcaggctataaccacagattatattcctgtagaggaaatatttgtttcgctcagtttgaaaaccgagcatagtgtgctcgagactattaaccggttggagggcgccgtgtttgcatggaaccaaagaattctggaggaaagaagcaagaggtccccaggacgccattcctggagcttcatgaaggatagctcgtcggaagttgacaagatgtccgcatgcatcgaaagggttgacgctctcgtgcagcttctgaaatccagatatcccaacctgcccccgacttttatagatgttttaaaggtccaatacaacgacgtgggccatgcaatcgtggaggcctacgctagggttcttgttggggtagcgttcagcatattgtcgcgcgtggcggagatactgctggaggatgacctgatcaagaagccgaacacccccatgaccacgctgaagttcgacctctcctctgacgtgtacttggccggcatcaccgagacgccaccgggacacatccggcggtccctgatggaccagatcagcatggtggacgggcgctacgatgccgttgttggcaagaagaaagaagtgaagcagctgaggtggtgagggcagtcagcagctgttgtgtgaatcttttgccgatgtacagggtgatgcggggcccagtgtccgctccacaaggttacctttagcaaatagcgcgatgtaatgtatttttgcgacgagtttatagcgtactgtactgtaagatcagcattaggcgagtcctgcctgtcgaagtctccgggtgttgctgttgcgtctgaacgatctgacgatgctcttggtcagcctctgctgcttttcttgctggcaccttgatgatgatagcatgtcgatgacgagaccttgcttgagtgcttgacgggttcatgctgacgcgtcttccgttctcgaagcgcggtccgtgtttctggggc

SEQ ID NO: 206870 - DNA, 2719 bp, Zea Mays
gtttgtcattgcaaggtgcaagcaaacttgaaaaaaaaaacacacgtcctgctccgtccgaatcgctactccgccgcgcttctcatcaccgtcaagagatagtcagacagttccagccccctttccacacgcacactcctctcccttcctctcctccgcttccatccctgggctgtgcgctactactccccctgctggccgctgctctgctctcacgcatgttttcacatccaagcgcctgcccctcgccctcgccgccacagtggtaacccgatccatgccgggcggcggccgctgacttgctgctgttggcttcaacggccgcaggcaaaggtcgtcatcgctttccggcagcccgtttcattgggaaagcgacgacgaggcgaggcgaggcgacggccgcgccctgccccagccgtgccgcactaaccgagtaaccgaccgacgcttgccgttgcagccccaccacgcgcaaaaaaaaaaaaaaaaccgcacgtccttcccctccacagtccacggctccacgcctgcccaatttttgtccagcccattgggcagttcctttcctccaccagtccccccagttcaaatttcaaacgcctccgcacggtcgccgccgcgctgcgtcgtcgtctcctcgaccgcggatcccctgatgctcctggtgctgtaaggcgcgttactgctggtagcgctagcgcggcgcggcggcggcggcgtaggaggaggggtcggcggcggagatgaggatgaagacgctggcgtgctgccggcggcggcctcaagacttcagcatcgatatggaccaagagcccgacagggtggtgacatataatggcctcgagacctgcattatcaacagttccacctatgacgatgacagtggcatcagtgcaacaacaggcggagatggctgtatcaccactgattcccttgatgatgaagtctctagttgctctagtaaagatgcttctggttcttccttcacttcacacagtcttagcaagcaggaggagcattcactagatgagttgggtacacccatggcaattcatctactccctttcaaagggaagaaaacaatcacatataccttgagtgcttcagatattgaaaacatgaaggaaaaatttgcaaaactattgcttggtgatgatacttcaggaggagctaggggcgtttgtgtggctctggccttgtctaatggcataatcaatctctctgcaactgtctttggagaactctggaagctggaaccactgtgcgaagataaaaagatcaggtggagaaaagaaatggactggttgctgtctcctacaacttatatggttgagctggttccaacaaagcaaagcggagcagatggatgtacatttgagattatgactccaaaggcccgctcagatgtccatgtgaaccttcctgcccttcagaagcttgacatgatgctcattgaagtaatggactcaatgatagatacagaattctggtatgaggagagtggcagcagagctgatggtcgggggaaaattacaggtccaaggaagagtaaaaagtggtggctcccgtctcctcgtgtccctgagcaagggctatctcaattccagcggaaaaggcttgtttttcaggctaagcttgttcaccagatcctcaaagccgcaaaatccatcaacgaacaagtcctgtcccatatgcctattccggccgctgtcatggatgcccttccgaagtctgggagggctagcttgggtgaagatttgtatcaggctataaccacagattatattcctgtagaggaaatatttgtttcgctcagtttgaaaaccgagcatagtgtgctcgagactattaaccggttggagggcgccgtgtttgcatggaaccaaagaattctggaggaaagaagcaagaggtccccaggacgccattcctggagcttcatgaaggatagctcgtcggaagttgacaagatgtccgcatgcatcgaaagggttgacgctctcgtgcagcttctgaaatccagatatcccaacctgcccccgacttttatagatgttttaaaggtccaatacaacgacgtgggccatgcaatcgtggaggcctacgctagggttcttgttggggtagcgttcagcatattgtcgcgcgtggcggagatactgctggaggatgacctgatcaagaagccgaacacccccatgaccacgctgaagttcgacctctcctctgacgtgtacttggccggcatcaccgagacgccaccgggacacatccggcggtccctgatggaccagatcagcatggtggacgggcgctacgatgccgttgttggcaagaagaaagaagtgaagcagctgaggtggtgagggcagtcagcagctgttgtgtgaatcttttgccgatgtacagggtgatgcggggcccagtgtccgctccacaaggttacctttagcaaatagcgcgatgtaatgtatttttgcgacgagtttatagcgtactgtactgtaagatcagcattaggcgagtcctgcctgtcgaagtctccgggtgttgctgttgcgtctgaacgatctgacgatgctcttggtcagcctctgctgcttttcttgctggcaccttgatgatgatagcatgtcgatgacgagaccttgcttgagtgcttgacgggttcatgctgacgcgtcttccgttctcgaagcgcggtccgtgtttctggggc

SEQ ID NO: 206871 - DNA, 2575 bp, Zea Mays
ctgatcgcctcgtggtttgtcattgcaaggtgcaagcaaacttgaaaaaaaaaacacacgtcctgctccgtccgaatcgctactccgccgcgcttctcatcaccgtcaagagatagtcagacagttccagccccctttccacacgcacactcctctcccttcctctcctccgcttccatccctgggctgtgcgctactactccccctgctggccgctgctctgctctcacgcatgttttcacatccaagcgcctgcccctcgccctcgccgccacagtggtaacccgatccatgccgggcggcggccgctgacttgctgctgttggcttcaacggccgcaggcaaagttactgctggtagcgctagcgcggcgcggcggcggcggcgtaggaggaggggtcggcggcggagatgaggatgaagacgctggcgtgctgccggcggcggcctcaagacttcagcatcgatatggaccaagagcccgacagggtggtgacatataatggcctcgagacctgcattatcaacagttccacctatgacgatgacagtggcatcagtgcaacaacaggcggagatggctgtatcaccactgattcccttgatgatgaagtctctagttgctctagtaaagatgcttctggttcttccttcacttcacacagtcttagcaagcaggaggagcattcactagatgagttgggtacacccatggcaattcatctactccctttcaaagggaagaaaacaatcacatataccttgagtgcttcagatattgaaaacatgaaggaaaaatttgcaaaactattgcttggtgatgatacttcaggaggagctaggggcgtttgtgtggctctggccttgtctaatggcataatcaatctctctgcaactgtctttggagaactctggaagctggaaccactgtgcgaagataaaaagatcaggtggagaaaagaaatggactggttgctgtctcctacaacttatatggttgagctggttccaacaaagcaaagcggagcagatggatgtacatttgagaatcaaagttatgaagggcaggcctggtgtagcggtgagacctgtctcactgagtcggatttgaaatagtttctcagcatttgtggagggaaggcttgtctcgatttatctcgagacctcattcatgtgggagcctctggctctttattcagaatctaacttggttatttttcaactgaaccatgcagattatgactccaaaggcccgctcagatgtccatgtgaaccttcctgcccttcagaagcttgacatgatgctcattgaagtaatggactcaatgatagatacagaattctggtatgaggagagtggcagcagagctgatggtcgggggaaaattacaggtccaaggaagagtaaaaagtggtggctcccgtctcctcgtgtccctgagcaagggctatctcaattccagcggaaaaggcttgtttttcaggctaagcttgttcaccagatcctcaaagccgcaaaatccatcaacgaacaagtcctgtcccatatgcctattccggccgctgtcatggatgcccttccgaagtctgggagggctagcttgggtgaagatttgtatcaggctataaccacagattatattcctgtagaggaaatatttgtttcgctcagtttgaaaaccgagcatagtgtgctcgagactattaaccggttggagggcgccgtgtttgcatggaaccaaagaattctggaggaaagaagcaagaggtccccaggacgccattcctggagcttcatgaaggatagctcgtcggaagttgacaagatgtccgcatgcatcgaaagggttgacgctctcgtgcagcttctgaaatccagatatcccaacctgcccccgacttttatagatgttttaaaggtccaatacaacgacgtgggccatgcaatcgtggaggcctacgctagggttcttgttggggtagcgttcagcatattgtcgcgcgtggcggagatactgctggaggatgacctgatcaagaagccgaacacccccatgaccacgctgaagttcgacctctcctctgacgtgtacttggccggcatcaccgagacgccaccgggacacatccggcggtccctgatggaccagatcagcatggtggacgggcgctacgatgccgttgttggcaagaagaaagaagtgaagcagctgaggtggtgagggcagtcagcagctgttgtgtgaatcttttgccgatgtacagggtgatgcggggcccagtgtccgctccacaaggttacctttagcaaatagcgcgatgtaatgtatttttgcgacgagtttatagcgtactgtactgtaagatcagcattaggcgagtcctgcctgtcgaagtctccgggtgttgctgttgcgtctgaacgatctgacgatgctcttggtcagcctctgctgcttttcttgctggcaccttgatgatgatagcatgtcgatgacgagaccttgcttgagtgcttgacgggttcatgctgacgcgtcttccgttctcgaagcgcggtccgtgtttctggggc

SEQ ID NO: 206872 - DNA, 431 bp, Zea Mays
ccgccacttgtccatgctctgctgctcctccttgcctataaacagacgcccttggcctcatcctctctctctccccccacaatgtcgtcgcccctcccctgcctctccctcctccgcgcccggcaccgccatgaccaagcagcagctaggtctgcgtgcgtgtgcaaatggagagaagggatgcgttggagaagaagatggaaagagcatggtcgtgccgcccagtgcttgccggggcgcgctagcgacttgtgcccatggcctggccggcggccggtgtcctctgttgccaagcgttctctgttgccggagaagaaatgtgcgtgcgttctgaaggaagaagaagacccctttgggtctatgacgtgtgggcccaaggcagggttcccttagggtgattggttgctggtgtgacttggcctccatccctg

SEQ ID NO: 206873 - DNA, 1474 bp, Zea Mays
ctcgacgcttgtcgcgaaacagaaaacaggcaaaccacacacccaggacggtggacggacacccgcgccgccgccgccatggccgacgccgccgcagcagcagcacgattgtgaagcaagacaaggaattcctttgtgaggattggaaagaatgcatcgagcccctcatgttatctggagagctggatgttgacccagatgattttagcttggagaaatatttatctgcaaaaactcttgtttcttcaaggtccttccagatagatagctatcatggatctggaatggttccattggctgaccttttcaatcacaagactgattgtgaacacgtgcatttcacgtctgcatcagatgcctcagactcagatggtgaagaagaagaagatgatcgaagtgatgcttctgctgatgacaaaccgactacaaaaaatcccacaagtagtcctccaggttcgagagctaacgacgaagatttggaaataatcattgttagagatgtcaatgaaggggaggaggtgtataatacatatggaacgatggggaatgctgctttgcttcacagatatggtttcacagaacttgacaatcaatacgacattgtcaacattgatttagcattggttactaagtggtgcacatccatattctccggtcgacatacaagagcaagggtatcactatggcgtaatctgggttattctgggtgcactagccaagataccgagtactttgagattgcatatgatggagagccccagcttgaactctcaatcctcctttacatcatcaacatgaaacctgatgtttatgacaagctgatctgcgtggcccatggtttcgttagtgacgaagagcatgagactatctgtaacgtgttcaagtttgtcaaagcaacaagctccaaccaaaattctgaagtcaatggcctcgagaaactgcctgatgtgaagaagttattgcatagtgagagcgtttgttcggcgcttctatcactcgctgacatgagggaaagcctctatggttcgaacactttggaagatgacgaggaagagcttcacgcatgctgcgttgtcaacgaaaggaagctctaccattctctggttttgcgggtgagtgagagaaggatacttcgtagattgagggagtttgcctctagtgggtcaaagggccggaagaggaagcacccctagtgtttaagcaatattctgcgggtcaggcttggtattcctgaacaccatgctcaataaaggtatggtgacgttctgcaattctgctgctcttgtaatggaatactaacatttttaggaacaataactacatacaggcatgctttgttttctttaagtagattagatacttgagatttacgacgtgggggacattatgtgttggtttgcgtggtaacaaacatttggacaagaaaaatccacaagaggttctctctcagtctctatagaaaataaatgtgcgg

SEQ ID NO: 206874 - DNA, 1443 bp, Zea Mays
cgcctgtcctacgtgtctatatttttgaatcccactctgctgaaacactgtttcgcacatctatttaggcctaccgattgtgaagcaagacaaggaattcctttgtgaggattggaaagaatgcatcgagcccctcatgttatctggagagctggatgttgacccagatgattttagcttggagaaatatttatctgcaaaaactcttgtttcttcaaggtccttccagatagatagctatcatggatctggaatggttccattggctgaccttttcaatcacaagactgattgtgaacacgtgcatttcacgtctgcatcagatgcctcagactcagatggtgaagaagaagaagatgatcgaagtgatgcttctgctgatgacaaaccgactacaaaaaatcccacaagtagtcctccaggttcgagagctaacgacgaagatttggaaataatcattgttagagatgtcaatgaaggggaggaggtgtataatacatatggaacgatggggaatgctgctttgcttcacagatatggtttcacagaacttgacaatcaatacgacattgtcaacattgatttagcattggttactaagtggtgcacatccatattctccggtcgacatacaagagcaagggtatcactatggcgtaatctgggttattctgggtgcactagccaagataccgagtactttgagattgcatatgatggagagccccagcttgaactctcaatcctcctttacatcatcaacatgaaacctgatgtttatgacaagctgatctgcgtggcccatggtttcgttagtgacgaagagcatgagactatctgtaacgtgttcaagtttgtcaaagcaacaagctccaaccaaaattctgaagtcaatggcctcgagaaactgcctgatgtgaagaagttattgcatagtgagagcgtttgttcggcgcttctatcactcgctgacatgagggaaagcctctatggttcgaacactttggaagatgacgaggaagagcttcacgcatgctgcgttgtcaacgaaaggaagctctaccattctctggttttgcgggtgagtgagagaaggatacttcgtagattgagggagtttgcctctagtgggtcaaagggccggaagaggaagcacccctagtgtttaagcaatattctgcgggtcaggcttggtattcctgaacaccatgctcaataaaggtatggtgacgttctgcaattctgctgctcttgtaatggaatactaacatttttaggaacaataactacatacaggcatgctttgttttctttaagtagattagatacttgagatttacgacgtgggggacattatgtgttggtttgcgtggtaacaaacatttggacaagaaaaatccacaagaggttctctctcagtctctatagaaaataaatgtgcgg

SEQ ID NO: 206875 - DNA, 3728 bp, Zea Mays
acccacacgaggctccagggcctccatcgccacaccggtgcgtgcgagcgcgattaccagaggcgggcggcagggacgatgctgctgcaaaggcgcggcggcctcctctgctgcgggtgcggcgccagcgccgtggccgtggccgtcagtggccgcgttccggaagacgacggcggtgccgtcgtcgatggccagccgcctgacgccaagagcgtgtctggtaccagtgtctccgctgccgtgacgaccgcaaacgcgaggcagctctcgtgggcgcaggtggaggccatgacgggaggcttcacgtcagccatcgtcggcgagggcggcttcagcaccgtttacctcgcccgcctcgctggctccctcgccgccgtgaaggtccatcgtagtagcgagcgtcttcatcgcgcgttccgccaggagctcgacgcgctcctccgcgttcgccatccccacatcgtccgcctcctcgccttctgcgaccagcgagacgaaggcgtgctggtgctagagttcgcgccgaacggcagcctgcacgagcagctccacggcggcggcgcgggcgcggcgccgatgccgtgggcgcggcgggtgccggtggcgctgcaggtggcccgcgccctggagtacctccacgagcggtgcgagccgcaggtggtgcacggcgacgtgaaggcgtcgaacgtgctgctggacgcgggcatgggcgccaggctgtgcgacttcgggtcggcgcgcgcggggttctcggcggccgtggccgttgccgctgcaggcccgcgcccgcgcgccgtgttcgggtccccgggctacgtcgacccgcactacctccgctccggcgtgagtccagcagatagaagcagtcaaccagcagcagcccaagtcaagcctcctcgcgtgtccctcggctcccacgcccacaccgaaatttcccccacggagctcaactgccggtgccggcgcgcgacaggcggcacacacgcccgctcctcgcgtatggcgaccacgttgacgcccacgcagcgctatgcggcggggacgctcctggcgctggcgctccgccaggcgcagatccaccagtccgagcccctcggctccggccccgacgacgaggagcgcgccagcagcgccagcgggagctcctcctccaccatatccagcaccggctccgacactacctcgggcgccggcctctggacgcacgattcccgcggcctcctccgccccgtcttcaggttcctggagatcgagcccaaggcatgggcggggatggaggagacggccgcgtcgccggacgccgccaagcatcacatcggtgcgtttataagcatactctttgaggaagacggcgagagctcttcagacaggctagagcaggagatcgcattggcgaaagcagttgatgtgatggtcatgagcttgggcagcgacactgcaccagatgagaatatcaaagacgagtttaaatactccacggcctgtacctatgcgaccttggagtctacggaggcaggctcatccgagaacttgcttggaatcgtcaagctgtccttggaaaatgttcctgtgaatgagcaccgcaagatggtgttgctgtatgcgcttctctctgcatgtatcgctgataagcctgtatcgcaagaggaagaggacaggaagtcgtctcacttcaggaagggctatgatgctcggcatcgtgttgctcttcggttgatagcagcatggcttgacgtcaagtggatcaaaatggaagctatggaggtgatggtcgcatgctctgccatggctgcggcaaaagaacaagaacaagagcgtgaaaatgcatcaccaagaagcaagtgggagaaatggaagcgtgggggaattattggtgccgctgccttgactggtggagcgttgctggctattactgggggtttagctgcaccagccattgctgcaggatttggtgctctagctccaacactgggcacacttgtccctttcataggggctagtggatttgctgctatggctgctgcggcaggatctgttgctggctctgtggcagttgctgcctcatttggaggttggtataaatgttcctttggaactcttatgatattatctggagctcttatttcttcattatatataacagtcaagatttgttttaagttagcaacggtcacctccattatttgtggtggttagtgtattgcttaggaaacctacacaattaatgaacatacaccactctgtataagcactggcacatttataaattactaaaagtgttcccaaatgcatttcttgtaaaagttaacttgtaatgcagtatccaaaaaagagatagaaagtggtgtacaaatgttgtacttagcttttaatgttcgttgaattgatttccgacaaattagctgctggggctggcttgacgggtaccaaaatggcaagacgaattggtaaagtgaaagaatttgagttcaaacctattggtgataaccataatcaggcgccttgctgttggcatcttggtttctggatttgcttttgatgaggaggatttctggaaaccttgggaaggatggaaggataacctagagaagtacatccttcaatgggagtccaagcacataattgcagtgagtacagcaatacaggattggctgacatcaaggcttgcaatggaattgatgaaacaaggtgctatgagaactgtcttaagtggccttcttgcagcatttgcttggcctgctacgttgcttgccgctacagattttattgatagtaaatggtctgttgctatcgacagatcagataaggcaggaaaaatgcttgcagaagtgcttcttaagggactgcaaggaaacaggcctgtgactcttgttgggttctcgcttggagcgcgagtcatattcaagtgcttacaggagctagctttatcaagcgacaatggtatctgttctttagttatagtaacctaaatttcatatgactttgctcttatgcttgatggaatgagtcagagggacttgtcgagagggttgtactccttggtgcacccgtttcagtgaaaggtgagaggtgggagcctgccaggaagatggttgcagggagatttgtgaatgtgtactcgagagatgactggattctcggtgtaaccttccgagcaagcctgcttacccaaggactggctggcatccaggccattgatgtgcctggtgttgagaacgtggatgttaccgggcttgttgatggccattcttcgtacctgtcagctgcccagcagatcctggagcaccttgaactgaatacctactatcctgtttttgttccccttccggaggtcaacaaataacagatgtagataggttgacaatagcagagaaaagatgtaaatatcagggaggaatataccttcgaatttacacaaaaaatgttacagctgtctagatgatgaatgctttgtagtttcttggtgactaatcctaatcgtacagtagctctagttacgtgtagatatctattgtgtacatagtaaaaacaaaacaataccgtctattgtgatcgcaagaaaagcttgaatctagaatagggaagtaagtacttccgtccaacaagagattaatctaataatatttatgttatatatttgatcttgagattgtttggggtttgctgactcgaaaagcgagctggatagagttcgattatcacatcgtcaactgcaaatgaactttaca

SEQ ID NO: 206876 - DNA, 527 bp, Zea Mays
tagtttcttcacccgtgctctctccctcatcccctgcgcataggaagccagctccttcacgtcgcctcctccctaggcggcgatcctacagagcctcgccggtcatccctgctccctcggcgtctctcccatggcgccctccctgctccttcacatggtgtggacgccagccccctctcttgttgccatggatagcccctctcccatctccttccccaagcacaagtcccatggtcgcccaaccccagctcgccctgccccagccatggacgctgtcgagccgcccgtttcctatctcccctcgccttcatcctctggctgccgcccctccctggatttcgccctctctactcgtcgatcttctctgttgtggcgcgcactggctgtcttccacctccatcggaccacgccgagctccctctttgctccagtcttctccatggtcgctcctctcctttccctgattaatactaggcgcagcagcaacatgccagatctctgtagcccagacgagcaagccactgtgg

SEQ ID NO: 206877 - DNA, 1343 bp, Zea Mays
aaattaactggccctgaccaagggatggaaagaagagacaaagaacggttggtcaaacttagaacacttaaaaatattcggctaattgatctatgcagtttccatcacaatccatatagtgcttggatttatgctcattgcattgatctggcaatacgatttctctcccttcacggttcttatcattgccattctcaatgacggtactatcatgaccatctctaaggacagagttaagccatctccgttgcccgacagttggaagctgaaggagatctttgttacgggcatcgacaaattcggtgtgaggtcgatcagggacagcgagcataagatgatgtccgccctgtacctccaagtgagtatcgtgagccaggctctgatcttcgtcacccgttcccgtagctggtccttcgtggagcgccctggtctgctcctggtcaccgcgttcctgctcgctcaacttgttgcgaccttcctcgctgtctacgccaactggggcttcgccaggatcaagggtatcggctgggctggtgttgtctggctctacagcatcgtcttctacttccccctggacctgatcaagttcttcatccgcttcgtgctcagcggcagggcatgggacaacctcctcgagaacaagaccggccgccttcaccaccaagaaggactacgggcggggagagagggaggcgcagtgggccaccgcgcaaaggacgctgcacgggctccagccgccggaggcttcctccaacacgctgttcaacgacaagagcagctaccgcgagctgtccgagatcgccgagcaggccaagagacgagctgagatcgcgaggctgagggagctcaacaccctcaagggccacgtggagtcggtggtcaagctcaagggcctggacatcgacaccatccagcataactacacggtgtgagagcccctctgctgcgatgtcgacgacaacacctttgctgcccgacgggagccatctgattacagataaaaattttccagatgaaggagctaacaatgaatccccagcttaattgcaccacgtttgaggtttatggttcgtgatgtgattgttctccagtcaaataactgggtacctcgacgtgaggagattaaggccaagataatcagtgaaattcactctgaggcagaaaagaatcttggattacgccctggagcagcatctgtcattaggaatggccgtagctcaccaggagggcccctttcacctggagggggatttccaatgaatcggtcaggaactggaggcatgatgtctgggatgcctggttcaaggaagatgcctggaatgcctgggttggacagtagatag

SEQ ID NO: 206878 - DNA, 2413 bp, Zea Mays
ttcacacctcctacggcacacccacactgcctttgcctactcccgtcccgtcgcagccgtctcgctcctccgtctccattccccgcctcgtcccgccgcagccgcggccgcgaggagccttccccgcctctcttcccgctcgctgggccctgcggctcgcagccagcattccgggctcctggtcgccgtgagccttgggaggttttgcgcggatctgaggctgcccgggctggggaattcgggctgatacctcgcggcgggagtcgggctgagttgatttggcgagtttaggtgtgcggagggaggaattccgggaggaacagttggttggtctgcgagagtttggtgggcggtagggtggtcgggcgggcgggcgggcgacgtacttgcgccccggaggccgccgtcgctgcttcgggcaagcgatgatcgagcagttcgtcaacttcgtcatccggccgcctcgtgcagagtacaatccagatcagtatttatgggagccagagttcactcttgccggaaggaagtataaaaggctagatttggaggcaacttacgaatgaaagaagtcagaccttaaagtgcagccactatgttcctgctgtcatcccagaaaacacttcccttccatgtgtagtctactgccatgggaatagtggatgcagagcagatgcaaatgaagccgctgtcatacttcttccttcaaatatcaccctttttacacttgactttgcgggatcagggctatcaagtggagattatgtcagccttggttggcatgaggatctcaaatgtgctgtgtcctttctgcgtaagaataagcaagtttcttgtataggtctttggggacgctcaatgggtgctgttacaagtctgctatatggagcagaagacccctcaattgctggcatggttctggatagtgctttcgctaacttatatgacttaatgatggagcttgtagaagtttacaaaatacgagttcctaagttcacggttaagatggctgttcagtacatgcgatgcgtcattcagagaagagctaaatttgacataatggatcttaatgttgtccagtttgcacccaagacgtttattcctgcactatttggacatgcttcaaatgatatgtttattcagcctcatcacacagaccatattcatcaggcttatgcgggggataaaaatctaatcaaatttgagggtgatcacaattcgccaagaccccagttttattacgactctgtttcaatattcttctacaacgttcttcacccacctcagtttccttcaacctgcacacataaacttgataagtattataaccttggtgcttttaagggtgctgctggtactaatgagagcttattgtatgagatcatcaatggtctacgggcagctggcactgatgcaggaagttcatcagctgctacagctagtttcacgaatgctacaaaatcagtagttgaattgctgacagagagggtaaatcagctatctgttaaaaatgataatgacttggtaagtcaatcattgcctgctcttcctcttctacttgagatttttaactccactcgagtgcaggattttcttttggatgaaaaccataaccttactgagatggacggtaacacaggagagtgtcatttagaggataaatcaaacagacaaacagatgaatgctgttcgtataccagctcaaaccgagagagctggggaagatgttcttccttgggtggagctagtgatggattgtcatcaggcgaacagcctgagatacctaatcataagcttaagagcttgacactaagggctctagcaaccccactgagacgggtacaaaggaaacctctcgcgatcccgaaggagaagaatcgatcactgtggaagaggttgaaaaaggagaggcaacagatgggggaaaacatatcccagcgtctgcggttgtgtctccaaggccaggctcgacacaagagaaccaaatcgtcttgacaactgtggatacatatttagctcttggacaaatctgctaggaactcactgatgattcagcaaccgagccgcgccgcaatttggagcttctggcactcagcgccaatcgtgccgtgtacattggttgaacattacctagaaatcttagatcatggattgtcccggacccaatgtgttaactgtcagtctttaatgttcgtttcttatgtttttttccccaatgtaatcctgtaaatttgaaggctagaactgcccatgtacttgtggttgagggagggacaccggttcgttgcttttttcaggatttgtgtagggtttggaggtcgagctgtatcgacagaatctcattttctatgttgctcggtaacgtctctgatttgctatgctggcgtgacatggttgattggttggtgaattgcac

SEQ ID NO: 206879 - DNA, 2349 bp, Zea Mays
cacacctcctacggcacacccacactgcctttgcctactcccgtcccgtcgcagccgtctcgctcctccgtctccattccccgcctcgtcccgccgcagccgcggccgcgaggagccttccccgcctctcttcccgctcgctgggccctgcggctcgcagccagcattccgggctcctggtcgccgtgagccttgggaggttttgcgcggatctgaggctgcccgggctggggaattcgggctgatacctcgcggcgggagtcgggctgagttgatttggcgagtttaggtgtgcggagggaggaattccgggaggaacagttggttggtctgcgagagtttggtgggcggtagggtggtcgggcgggcgggcgggcgacgtacttgcgccccggaggccgccgtcgctgcttcgggcaagcgatgatcgagcagttcgtcaacttcgtcatccggccgcctcgagtacaatccagatcagtatttatgggagccagagttcactcttgccggaaggaagtataaaaggctagatttggaggcaacttacgaatgaaagaagtcagaccttaaagtgcagccactatgttcctgctgtcatcccagaaaacacttcccttccatgtgtagtctactgccatgggaatagtggatgcagagcagatgcaaatgaagccgctgtcatacttcttccttcaaatatcaccctttttacacttgactttgcgggatcagggctatcaagtggagattatgtcagccttggttggcatgagaagcaggatctcaaatgtgctgtgtcctttctgcgtaagaataagcaagtttcttgtataggtctttggggacgctcaatgggtgctgttacaagtctgctatatggagcagaagacccctcaattgctggcatggttctggatagtgctttcgctaacttatatgacttaatgatggagcttgtagaagtttacaaaatacgagttcctaagttcacggttaagatggctgttcagtacatgcgatgcgtcattcagagaagagctaaatttgacataatggatcttaatgttgtccagtttgcacccaagacgtttattcctgcactatttggacatgcttcaaatgatatgtttattcagcctcatcacacagaccatattcatcaggcttatgcgggggataaaaatctaatcaaatttgagggtgatcacaattcgccaagaccccagttttattacgactctgtttcaatattcttctacaacgttcttcacccacctcagtttccttcaacctgcacacataaacttgataagtattataaccttggtgcttttaagggtgctgctggtactaatgagagcttattgtatgagatcatcaatggtctacgggcagctggcactgatgcaggaagttcatcagctgctacagctagtttcacgaatgctacaaaatcagtagttgaattgctgacagagagggtaaatcagctatctgttaaaaatgataatgacttggattttcttttggatgaaaaccataaccttactgagatggacggtaacacaggagagtgtcatttagaggataaatcaaacagacaaacagatgaatgctgttcgtataccagctcaaaccgagagagctggggaagatgttcttccttgggtggagctagtgatggattgtcatcaggcgaacagcctgagatacctaatcataagcttaagagcttgacactaagggctctagcaaccccactgagacgggtacaaaggaaacctctcgcgatcccgaaggagaagaatcgatcactgtggaagaggttgaaaaaggagaggcaacagatgggggaaaacatatcccagcgtctgcggttgtgtctccaaggccaggctcgacacaagagaaccaaatcgtcttgacaactgtggatacatatttagctcttggacaaatctgctaggaactcactgatgattcagcaaccgagccgcgccgcaatttggagcttctggcactcagcgccaatcgtgccgtgtacattggttgaacattacctagaaatcttagatcatggattgtcccggacccaatgtgttaactgtcagtctttaatgttcgtttcttatgtttttttccccaatgtaatcctgtaaatttgaaggctagaactgcccatgtacttgtggttgagggagggacaccggttcgttgcttttttcaggatttgtgtagggtttggaggtcgagctgtatcgacagaatctcattttctatgttgctcggtaacgtctctgatttgctatgctggcgtgacatggttgattggttggtgaattgcac

SEQ ID NO: 206880 - DNA, 3123 bp, Zea Mays
ctcctacggcacacccacactgcctttgcctactcccgtcccgtcgcagccgtctcgctcctccgtctccattccccgcctcgtcccgccgcagccgcggccgcgaggagccttccccgcctctcttcccgctcgctgggccctgcggctcgcagccagcattccgggctcctggtcgccgtgagccttgggaggttttgcgcggatctgaggctgcccgggctggggaattcgggctgatacctcgcggcgggagtcgggctgagttgatttggcgagtttaggtgtgcggagggaggaattccgggaggaacagttggttggtctgcgagagtttggtgggcggtagggtggtcgggcgggcgggcgggcgacgtacttgcgccccggaggccgccgtcgctgcttcgggcaagcgatgatcgagcagttcgtcaacttcgtcatccggccgcctcgcctgcaagttggtgggatttggcagccttcacgccattgccagtgatgatatgtcgccgcaattcctcacattttagtaggggggttattgtatgaatttcctacggatataagatagctagaccaacctaatgcaggtaaactgaggtaagcctttttccgcaccgtgtcctagcgactcagtgagatagatctcaccactgcaccaggtctgtccttctaccggccttggttctaaataaaaaagaagaagtataagcctctgttagaaggaaaaaaaaaacgtaccagcttctcactgtaatctcaacgattctcaaggcacaagaatgcaaaatttctgtacttgaatccttgctgtatccatttagaccatgtgttacattagtacatgagcaaaaagattgttgttcagcctttctattgagaatcatgtaccaggtttgcagtcaagcaagtagcttgtcataatcacatgtcctgtagttgcagaactaaacctgtttgtgttcgtaacccataacaaaactttacatttaattagcatgtgcatttataccaactgtacttttctaaattaactttgtgccttttctgtaagacgcgacaatgaatggataacgtaggttcatagccttcgggttttgatatctgcatcagattattttctctctattttctgctgagtggcgatgaactggcaatgcatttacagtgcagagtacaatccagatcagtatttatgggagccagagttcactcttgccggaaggaagtataaaaggctagatttggagcttacgaatgaaagaagtcagaccttaaagtgcagccactatgttcctgctgtcatcccagaaaacacttcccttccatgtgtagtctactgccatgggaatagtggatgcagagcagatgcaaatgaagccgctgtcatacttcttccttcaaatatcaccctttttacacttgactttgcgggatcagggctatcaagtggagattatgtcagccttggttggcatgagaagcaggatctcaaatgtgctgtgtcctttctgcgtaagaataagcaagtttcttgtataggtctttggggacgctcaatgggtgctgttacaagtctgctatatggagcagaagacccctcaattgctggcatggttctggatagtgctttcgctaacttatatgacttaatgatggagcttgtagaagtttacaaaatacgagttcctaagttcacggttaagatggctgttcagtacatgcgatgcgtcattcagagaagagctaaatttgacataatggatcttaatgttgtccagtttgcacccaagacgtttattcctgcactatttggacatgcttcaaatgatatgtttattcagcctcatcacacagaccatattcatcaggcttatgcgggggataaaaatctaatcaaatttgagggtgatcacaattcgccaagaccccagttttattacgactctgtttcaatattcttctacaacgttcttcacccacctcagtttccttcaacctgcacacataaacttgataagtattataaccttggtgcttttaagggtgctgctggtactaatgagagcttattgtatgagatcatcaatggtctacgggcagctggcactgatgcaggaagttcatcagctgctacagctagtttcacgaatgctacaaaatcagtagttgaattgctgacagagagggtaaatcagctatctgttaaaaatgataatgacttggtaagtcaatcattgcctgctcttcctcttctacttgagatttttaactccactcgagtgcaggattttcttttggatgaaaaccataaccttactgagatggacggtaacacaggagagtgtcatttagaggataaatcaaacagacaaacagatgaatgctgttcgtataccagctcaaaccgagagagctggggaagatgttcttccttgggtggagctagtgatggattgtcatcaggcgaacagcctgagatacctaatcataagcttaagagcttgacactaagggctctagcaaccccactgagacgggtacaaaggaaacctctcgcgatcccgaaggagaagaatcgatcactgtggaagaggttgaaaaaggagaggcaacagatgggggaaaacatatcccagcgtctgcggttgtgtctccaaggccaggctcgacacaagagaaccaaatcgtcttgacaactgtggatacatatttagctcttggacaaatctgctaggaactcactgatgattcagcaaccgagccgcgccgcaatttggagcttctggcactcagcgccaatcgtgccgtgtacattggttgaacattacctagaaatcttagatcatggattgtcccggacccaatgtgttaactgtcagtctttaatgttcgtttcttatgtttttttccccaatgtaatcctgtaaatttgaaggctagaactgcccatgtacttgtggttgagggagggacaccggttcgttgcttttttcaggatttgtgtagggtttggaggtcgagctgtatcgacagaatctcattttctatgttgctcggtaacgtctctgatttgctatgctggcgtgacatggttgattggttggtgaattgcac

SEQ ID NO: 206881 - DNA, 1888 bp, Zea Mays
gtaagggacataattattgagcttacgaatgaaagaagtcagaccttaaagtgcagccactatgttcctgctgtcatcccagaaaacacttcccttccatgtgtagtctactgccatgggaatagtggatgcagagcagatgcaaatgaagccgctgtcatacttcttccttcaaatatcaccctttttacacttgactttgcgggatcagggctatcaagtggagattatgtcagccttggttggcatgagaagcaggatctcaaatgtgctgtgtcctttctgcgtaagaataagcaagtttcttgtataggtctttggggacgctcaatgggtgctgttacaagtctgctatatggagcagaagacccctcaattgctggcatggttctggatagtgctttcgctaacttatatgacttaatgatggagcttgtagaagtttacaaaatacgagttcctaagttcacggttaagatggctgttcagtacatgcgatgcgtcattcagagaagagctaaatttgacataatggatcttaatgttgtccagtttgcacccaagacgtttattcctgcactatttggacatgcttcaaatgatatgtttattcagcctcatcacacagaccatattcatcaggcttatgcgggggataaaaatctaatcaaatttgagggtgatcacaattcgccaagaccccagttttattacgactctgtttcaatattcttctacaacgttcttcacccacctcagtttccttcaacctgcacacataaacttgataagtattataaccttggtgcttttaagggtgctgctggtactaatgagagcttattgtatgagatcatcaatggtctacgggcagctggcactgatgcaggaagttcatcagctgctacagctagtttcacgaatgctacaaaatcagtagttgaattgctgacagagagggtaaatcagctatctgttaaaaatgataatgacttggtaagtcaatcattgcctgctcttcctcttctacttgagatttttaactccactcgagtgcaggattttcttttggatgaaaaccataaccttactgagatggacggtaacacaggagagtgtcatttagaggataaatcaaacagacaaacagatgaatgctgttcgtataccagctcaaaccgagagagctggggaagatgttcttccttgggtggagctagtgatggattgtcatcaggcgaacagcctgagatacctaatcataagcttaagagcttgacactaagggctctagcaaccccactgagacgggtacaaaggaaacctctcgcgatcccgaaggagaagaatcgatcactgtggaagaggttgaaaaaggagaggcaacagatgggggaaaacatatcccagcgtctgcggttgtgtctccaaggccaggctcgacacaagagaaccaaatcgtcttgacaactgtggatacatatttagctcttggacaaatctgctaggaactcactgatgattcagcaaccgagccgcgccgcaatttggagcttctggcactcagcgccaatcgtgccgtgtacattggttgaacattacctagaaatcttagatcatggattgtcccggacccaatgtgttaactgtcagtctttaatgttcgtttcttatgtttttttccccaatgtaatcctgtaaatttgaaggctagaactgcccatgtacttgtggttgagggagggacaccggttcgttgcttttttcaggatttgtgtagggtttggaggtcgagctgtatcgacagaatctcattttctatgttgctcggtaacgtctctgatttgctatgctggcgtgacatggttgattggttggtgaattgcac

SEQ ID NO: 206882 - DNA, 1360 bp, Zea Mays
ttgaacccgcgacctagtgactcatttgcacccaagacgtttattcctgcactatttggacatgcttcaaatgatatgtttattcagcctcatcacacagaccatattcatcaggcttatgcgggggataaaaatctaatcaaatttgagggtgatcacaattcgccaagaccccagttttattacgactctgtttcaatattcttctacaacgttcttcacccacctcagtttccttcaacctgcacacataaacttgataagtattataaccttggtgcttttaagggtgctgctggtactaatgagagcttattgtatgagatcatcaatggtctacgggcagctggcactgatgcaggaagttcatcagctgctacagctagtttcacgaatgctacaaaatcagtagttgaattgctgacagagagggtaaatcagctatctgttaaaaatgataatgacttggtaagtcaatcattgcctgctcttcctcttctacttgagatttttaactccactcgagtgcaggattttcttttggatgaaaaccataaccttactgagatggacggtaacacaggagagtgtcatttagaggataaatcaaacagacaaacagatgaatgctgttcgtataccagctcaaaccgagagagctggggaagatgttcttccttgggtggagctagtgatggattgtcatcaggcgaacagcctgagatacctaatcataagcttaagagcttgacactaagggctctagcaaccccactgagacgggtacaaaggaaacctctcgcgatcccgaaggagaagaatcgatcactgtggaagaggttgaaaaaggagaggcaacagatgggggaaaacatatcccagcgtctgcggttgtgtctccaaggccaggctcgacacaagagaaccaaatcgtcttgacaactgtggatacatatttagctcttggacaaatctgctaggaactcactgatgattcagcaaccgagccgcgccgcaatttggagcttctggcactcagcgccaatcgtgccgtgtacattggttgaacattacctagaaatcttagatcatggattgtcccggacccaatgtgttaactgtcagtctttaatgttcgtttcttatgtttttttccccaatgtaatcctgtaaatttgaaggctagaactgcccatgtacttgtggttgagggagggacaccggttcgttgcttttttcaggatttgtgtagggtttggaggtcgagctgtatcgacagaatctcattttctatgttgctcggtaacgtctctgatttgctatgctggcgtgacatggttgattggttggtgaattgcac

SEQ ID NO: 206883 - DNA, 808 bp, Zea Mays
caccgtttcgcagaacgggaagaaaaggtatgggacgtatgtgcgtcttgaggtagtaatttataagggcgtggagggagtttgttgaattctgttaccgtcggagtcggactctatctctatctccaaaagtccgttctaatctaatctcttcgtgagtcgtcctaatcagcgcgagccgcagcccccgctgacgcgaatcgcgacctccgcgcgaccctccgctgacccggtctccctgccgcctggagcgatgaaaccgcaccctcgcgcccaagcccagactcaaaactcagccaaacccttcgcatcttcctgtggtggcgtcctcctccaacgttggtccgtgtttgtctccatggcgctctcgaatgcctaagccaaggccgaccgcgtcgagctggtgctgcaggtgctcgacgaaacgccccgcaggaccgagttctcgtagaccatgctcgtcgattctctggcgagggccggccgacagcacgacgcattctgcctctccgcggagatgcgggcctccagcgtggcctgcgactcccacgtctgcgtatgtcactacgggaagagctacatattcatcgtaaattatgtggaaaggatgtacaagcaagctgcccttgtgcagacagactcagaggtgtagagaagacatggtgtccgctgaggattgcaagatccattgctgcataggctgatgtatgcggcacaccatcaggagcagactgatcccgcacacataaggtcagggatggcctatgaccctttaagaactcatctagagcgaagagcagctgagcag

SEQ ID NO: 206884 - DNA, 806 bp, Zea Mays
ggaatattaacttaatttgcgggaaattcttgatggcgttacagacattgatatggtggttaatctgaaactaagagaagatgttatagtagagaagtgccttggcagaaggatttgcggccaatgtggaaagaacttcaatttggcctgcattgatgttaagggtgaaaatggactcccaccaatctacatggcaccactgttgcccccaaacaactgcatgtcgaagcttattacccgagctgatgataccgaagaggtggtcagaaatcggcttcagatatataatgacatgagtcaacctgtggaaggtttctaccgagagcaggggaagctcttggaatttgacttgcctggtgggatccctgaatcttggccaaagctgctccaggttctaaacctcgaggaccaagaggagttgaggttggctgcagcgtagccgcgtaggtctctgggagaccgacctacatactgggaaaaagaccataccacattttttttgaataatggagaagaggaaacttactccatagtttagtgcgttatgcagaagtaatggttttcttgtaaaaatcgatttgttggtttccaccggcgttttgatgatgagccggtactatgtaacttacgatagctgtaagcactaagcagcccattcttgcttgggacacagtttggagcgcatgaagacatgctgtagtgtttttttttttaattcataacaaacttgtagtacacatttgtgttcatgataaaacactgaagtagtatgatactacagaacaacacagacctgatgaatgcct

SEQ ID NO: 206885 - DNA, 368 bp, Zea Mays
attttgccatccctagctccacagcaccacttgctcctgcctcctgctgcttcttcccgagttcccgtgccgccgcgagcgctcccaaccaagcaacgagacaacaacaacaaccctgcaccgccgcagcacttgcgccgtccggtcctgtcctcccgcggtctcgacgccgccccctaccgtcctaccttatcgcgcaccgctccatggccgccaagtgggcccagaagaccgtcgttatcccggcgcatcggcggggctgccacctcatcacccccaagattctgagggagatcgagggcgacctggccgggttcaagtgcggtctcgcgcatttcttccaagaaagaacaggcatctagatgaag

SEQ ID NO: 206886 - DNA, 1322 bp, Zea Mays
ctcgtatcgtcccgggctcctctcaaaagatcacagagagagaaaacgaaacgccgctccctcgcctcatcccttccctcctcctgcatcctacctccctggtgcccgtcacgttcaccacgttcgcccgctcattcaccggcggcgtcgcccagctcggcctcccgccgcccacggaggccaggtccccgggccgcccgctcggtccgccacggaggcaagcttctggaggcttctcatatctatatgagccgttatggtggttgggaatgataactattttgcatgccccaaaggagagaaaaattgattctatgaaggaaatatggcatcttgcaacacagccaggttttattgtttattcatgcgtggcagtggcctgcgttctttttttgatatttcgggttgttgagcgctctgggcacagattgatgcttgtttacatagcaatctgttcattaatgggatctcttacggttatcagtgtaaaagcagttgctattgctttaaagctatcatttggtggatcaaatcaattcatctacgtccagacatggttcttcatagtagtagtcactatttgctgcttggtgcaattaaactacttaaacaaggctctggactcgttcaacacggctgtggtttctcctgtatactacgtgatgttcaccattcttaccattgttgcaaacatgatcatgtacaaggactgggcctcgcagactgcaacgcagatcgcaacacagctatgtgggtttgtgaccattgtcgcggggacttttctgcttcacaagactagggatatgggaaatccaccaccaccaccacctgaccaaatgtgcctgcaagaagccggggaatgtgctccacggtcaatgaccagttctagctgaacacactaagatgtcaaaatctcacagcctctatggactgaattggaattttgagctatatggtgacctttgtagatatattaggaaggagtaaagattggagtgcccagcagttggacataccgatgaagttttacgtttctgcaaaagaaagaatgaactgtatgaaggcatcggaatcttgtgaagacatgagattcaaactagctacctaactttggtaaatagcttgttatgccattttaaaacgatcatgatgctcaagaggcagggcgaattaggcttctctatactttttgtgataattaaaccctagttacaaatttaactttacccgagtgtccaatatatgtacaaaagctttaaaccttaatttcaactgtacgttgccatggcaagccgagttacccacctttatggatgatcctt

SEQ ID NO: 206887 - DNA, 733 bp, Zea Mays
gatttttgaagatggaaaaaatatggctctggactcgttcaacacggctgtggtttctcctgtatactacgtgatgttcaccattcttaccattgttgcaaacatgatcatgtacaaggactgggcctcgcagactgcaacgcagatcgcaacacagctatgtgggtttgtgaccattgtcgcggggacttttctgcttcacaagactagggatatgggaaatccaccaccaccaccacctgaccaaatgtgcctgcaagaagccggggaatgtgctccacggtcaatgaccagttctagctgaacacactaagatgtcaaaatctcacagcctctatggactgaattggaattttgagctatatggtgacctttgtagatatattaggaaggagtaaagattggagtgcccagcagttggacataccgatgaagttttacgtttctgcaaaagaaagaatgaactgtatgaaggcatcggaatcttgtgaagacatgagattcaaactagctacctaactttggtaaatagcttgttatgccattttaaaacgatcatgatgctcaagaggcagggcgaattaggcttctctatactttttgtgataattaaaccctagttacaaatttaactttacccgagtgtccaatatatgtacaaaagctttaaaccttaatttcaactgtacgttgccatggcaagccgagttacccacctttatggatgatcctt

SEQ ID NO: 206888 - DNA, 764 bp, Zea Mays
gccgacggcttcttctgttctcagtttctcactctcgctacccattttttcccaaacgctagtggcggcgggcggcggtcaccggggagtagtcgagtaggccaaccggaggcgcactctggcgtgtgtcgtaccgagggcgccaggagcctaccagtgcaggctacagcagcgcagcgccggagcggccggtcgctggccggctatcgggaccgcggccgcggccgcgtttggcccgtgctgatgcactgagaggagggtggaggccgcagggtggccgtccggcagcgtcgcgctgcacgtcaactgctctgaacctgtgtgacacaggaagccgctcggggctaggtgccaccatctgctctctaccaattggaggggcagcccttctttcattgaggtcatcatggcttgggagctcattgaggtcccgggcaacctgaatatctctctccaagactctacagttgatgtggtggccgccaagattgatcccaagctagctaatactctcattaggcagttaagccaggtgtgtccattggaaaatctgaggcatgtaaagcgtgtacgtcgagtcttgactgcgccatgcaggcagtccctacaggctggcgccatctctgtccctatcagccacataaggacagccatctgctgattggttctgattaggacagctagagatatgtagagatatgaggggatcctgattgttatgtttctatagctagagaccctgattggttatgtttctatagcta

SEQ ID NO: 206889 - DNA, 835 bp, Zea Mays
gccgacggcttcttctgttctcagtttctcactctcgctacccattttttcccaaacgctagtggcggcgggcggcggtcaccggggagtagtcgagtaggccaaccggaggcgcactctggcgtgtgtcgtaccgagggcgccaggagcctaccagtgcaggctacagcagcgcagcgccggagcggccggtcgctggccggctatcgggaccgcggccgcggccgcgtttggcccgtgctgatgcactgagaggagggtggaggccgcagggtggccgtccggcagcgtcgcgctgcacgtcaactgctctgaacctgtgtgacacaggaagccgctcggggctaggtgccaccatctgctctctaccaattggaggggcagcccttctttcattgaggtcatcatggcttgggagctcattgaggtcccgggcaacctgaatatctctctccaagactctacagttgatgtggtggccgccaagattgatcccaagctagctaatactctcattaggcagttaagccaggtgtgtccattggaaaatctgaggcatgtaaagcgtgtacgtcgagtcttgactgcgccatgcaggcagtccctacaggctggcgccatctctgtccctatcagccacataaggacagccatctgctgattggttctgattaggacagctagagatatgtagagatatgaggggatcctgattgttatgtttctatagctagagaccctgattggttatgtttctatagctagagatgtgaggagatcatgattggttctgtttccataaaccacacagatctcctccctatatatatgtaac

SEQ ID NO: 206890 - DNA, 769 bp, Zea Mays
cttcttctgttctcagtttctcactctcgctacccattttttcccaaacgctagtggcggcgggcggcggtcaccggggagtagtcgagtaggccaaccggaggcgcactctggcgtgtgtcgtaccgagggcgccaggagcctaccagtgcaggctacagcagcgcagcgccggagcggccggtcgctggccggctatcgggaccgcggccgcggccgcgtttggcccgtgctgatgcactgagaggagggtggaggccgcagggtggccgtccggcagcgtcgcgctgcacgtcaactgctctgaacctgtgtgacacaggaagccgctcggggctaggtgccaccatctgctctctaccaattggaggggcagccgtaagttcaaattcttctttcattgaggtcatcatggcttgggagctcattgaggtcccgggcaacctgaatatctctctccaagactctacagttgatgtggtggccgccaagattgatcccaagctagctaatactctcattaggcagttaagccaggtgtgtccattggaaaatctgaggcatgtaaagcgtgtacgtcgagtcttgactgcgccatgcaggcagtccctacaggctggcgccatctctgtccctatcagccacataaggacagccatctgctgattggttctgattaggacagctagagatatgtagagatatgaggggatcctgattgttatgtttctatagctagagaccctgattggttatgtttctatagcta

SEQ ID NO: 206891 - DNA, 3044 bp, Zea Mays
actaaccctaaactcccaaccttcgcctctcctcccgttgtcagccgccgtgcctgttctctctgcctttctaaaagtgcggcgactggttgggctgccgccgactgccggggccttcgccgacctcttcgccggcgaagaggtcccatcaggagaaggagtagatcgtcgacccagaaccctcgctgatggcgactttcgcgaaacctgagaacgcgctgaagagagccgaagaattaatccatgttggtcaaaagcagtcagccctgcaggctttacatgatctcattacctcgaaaaggtacaggtcatggcagaagcctctcgaaaagatcatgatgaagtatgtagaactctgtgttgacctgaggaaaggcagatttgcaaaagatggtcttattcagtataggattgtctgccagcaagtaaacgtgtcatccttggaggatgtcataaagcacttcatgcagctttcaaatgagaaagctgaacaagctaagagtcaggtcgaagcactggaagatgctctggatgtcgaagatcttgaagcagacaagcgtcccgaggacctcatgctcagttttgtcagtggggagaaaggaaaggaccgatcagataaagaggttgtaactccatggtttaagttcctctgggagacatacaggactgttctagagatactaaggaacaattcaaagcttgaagcgttatatgctatgactgctcatagggcttttcaattctgtaaacagtataagagaacaactgaattccgtaggttgtgtgagatcatcagaaatcatcttgctaatctcaacaaatatcgcgatcaaagagatcgtcctgatctgactgcacctgaaagtttacaactgtatcttgatacacgtgttgagcagcttaaagttgctacagaactctccctttggcaggaagccttccgatcggtggaagatatccatggtttgatgaccatggtgaagaaaatgccaaaaccatctatcttggtggtctattatgcaaagttgactgagatcttctggatatcggacagccacttatatcatgcgtatgcgtggctcaagcttttcaacttgcagaagagctacaataaaaacttgtctcagaaggatctacagttaatagcatcttctgttttacttgctgcactatccgtgtcaccttatgacaaaaaatatggtgcatttgagacagagaatgagaaagagcgcaacatgcgtctgtccaaccttgttaacttttcgcttgataacaagcgtgaaaacagggaaatgccttcaagaccatatcttctatcagagttggcctccaaaggagtcctttcatgtgcttcccaagaagtgcgagatttgtacaaccttttggaacatgagtttctacctctggatcttgcatcaaaagtgcagccacttcttttgaagatttcaaagattggagggaagctttcatcagcttcttctgttcctgaggtcaagttatctcagtacatttcagcattggagaagctgacaacattgagagtgctacaaggaagtccatcattgaaaaacgtaaagaagagcttgagcgtcaaatattggagaaggaaaaagaagaagaaaaaaagagaatgagcagtcaaaagaaaactgtggatgaggaaagggtgaggcttctcaatgaacagaggcagagggagcaggaccggattcgtagagagatagaggaaaaaaataaagcagaagcaaaaaagatgctagaagatttgaataaggcagggaaaaaacatgtcgttgttgaaggggagcttactaaggaggccatcatggaattggcacggaatgaacagttaaaggagcgccacgaaatggagaaaaaactgcagaagtttgcaaaaacaatggattatctggaaagggcaaaaaggcaggaagaggcaccactgattgagcaagcttttcaaaaacgtcttgaggaagagaagatccttcacgagcaagagcagcttcgggagattgaactcagcaagcaacaccatgccagcgacttgcaagagaaaaatagactttcacggatgttggagcacaagaatgctttacaggagagaatcatccaagaacgtgcagctgagtttggccgtctgaagaaagagagagatgaacggatgaatcggttgatatcttcaagaaagcatgaaagggagacagtaaggaagttgatgttttatctgaacctggaggaacagcggattgaaatgcttcgtgaggaagaggaagctagaaaacgtgaagcggaagagaggaggaagagagaggaggctgaaaggaaagctaaacttgatgccatcgctgaaaagcagcgattgagagagatagagctggaggagaaggcaaaggcaacaagggagaagctcttaaagggatccgaggctgtgcgcgctccagattctgcacctgttgcacagccacctcgagagtcagcagcagcgcctgcagctgctgcggcggcggctgctcctgctcctgctcctagtaaatatattcccaagtttaaacgcggtggtgatagcagcagcatcccttctggcagccgcgatgaagatcgctggggttcacgtggtccgctcaggcaagatggtcctcctgcacgactggatgcaccctcatcacggcaagatactgatcgctggcgtggatcaagatttccctctaactcaacgtcctcttcatcaacctggagccgttcacggaactgatcctatgctgcaggacttttttctagcccatgtgtcgacctccgtgcacaatgtctaatcgtacctttccaggcactgcactccatgcatattgtcgctgttttgtacttttgtagtaatactctacaatccatgattattgtccctgtttgttagtaatgctgttttatctgtgcatgaaacactctatacctacatatagccaagaattgcaggactgtatgcatgtaaaacttgcaagattatcaatttttatgagctataaaattaatatctgtgggcaccaaga

SEQ ID NO: 206892 - DNA, 2345 bp, Zea Mays
accggagcggaggcggtgtagaccaccgtggacgcgtgctctcagcccacggagggaaggaacaccatatggccacacaaccctcaaacaggttggagttactgtgtgatgatgccttcttggatcacccaaacacctgaaactggtgtcacagccgatagctttttgaaatctgtcgttttttacaggatacatgttggtatacaatcttcagaaggctttagctctatccatggaatcctcagaaggtttagtgactttctgaagctatcttctgatcttaagagcgcgtttcccagaaaagatgtcccatcggctcctccgaagcatgctttcttaagaataaattcaagcaggttgcttctagaagagagaaggcatgcattggaggagtggatgcagaagttactttctgacattgacttgtcaagaagtgctcctgttgctgcttttcttgagcttgaagctgctgcgcgttcatatttccaagaacggaatgggcgtccttctgaagtaggtccttctgcaaaaagcagtactaaatcttcctcacattctgatggacctgcttccggttctcttgctgagtccaatgaaataaatcaaggtcttactcgcggtagcagtctgacaggagcaactggtaatggtgtgcttggagaagctatcttagatcagtctgatgagcatgttagcagtgccttgaatcacaggaaagggaaccttgtattggaacatgatggtagaaatggttcggtagcgtcttataggggagttctttcagaagaggaccgtgattcttatcccggccatgctcggaaggactctgctgaaagtattgggagtgatttgagttctttaagaggaagtgaattatctgttccaggggctagtaattccctttgggatggtgctgtggtggatggacatgttagtcaaacagaacatcttactggtttagatatgcatcttttgtatgatatggatgcgcaagtcatccttccaaatgataaaaaacagaagttgactagacttttgatcacaatgcaacgaagaatagggacagcaaaaactgatatggaggatctcatagcacgattaaatcaggaaggagctgttaaagaatatcttactacaaaggttaaagatttagaggttgaattggaagccacaaagcaaaaaggtagagagacactgcaacaagctatcctggctgaaagagagaggattacccagatgcagtgggatatggatgagctccgtaggaagtactctgagatggagtcaaacctgaagaccgaacataatgagaaaactcgtgcggagtcagaaagaacaactgctagtggtgaaaatgaaacattacttgaagaattagaaatcaaacaaaaagaagttgagagtttgaaacagcaacttgtagaagctgaggcaaagtccaaagctgataagaaagttcttgtcaaagaggtcaagtctcttagaaactcccaaactgagatgaagaaagtgttgaatcagtatcttgaggagaagactgatttagagagagttattaatagagataaacagagatcagcacgtacaaagttatcccgagtaaaaattcttcatgagtgtcgactgctgcgggagcggctacaagactgcagtgctaaatttctagcagaagaacaagacaactttactattgatccatcatccttgcctgatgcattagatcttctagcaacatcagacaatagaatacgcctactcgttgctgaggctcaacttctagcacgagatgatgaacaaggctcttctgatggtggcgacgattctgatagtagatcctcattaactatgagcagtgaagatgcaaaagttaccgatgaagatactactaaaatgctttctgatctgctcattgacaatgcgcagctgagactacgcctcaatgctgtcatccgcaatgctgtaaatacttccgtgaagccagagaaagaaggtagtggcgaggttctccccaaaaagacagtccttaactggttgttggacagatgagagaaccaccaatatatatttatgtggattagttcttcaaacttacgcggcttgaccaaaattatatgatgagcgtacctatagtgccagggtagcatcaggaattcaggataaaaccttccctccatggagggaaggggagcctggaagcctttgtttctgttgcacgattttttatccacgcatggaagtcacggaggatggtatatatagggccacggctttggctcctaaaaaatgactgtctggcttctcttccagaaactctataaaagctagtgttttttaacaaatcgttt

SEQ ID NO: 206893 - DNA, 849 bp, Zea Mays
gctagccttggactttagctcgtcattgtgatattttgaaaatattacacacagagttattaatagagataaacagagatcagcacgtacaaagttatcccgagtaaaaattcttcatgagtgtcgactgctgcgggagcggctacaagactgcagtgctaaatttctagcagaagaacaagacaactttactattgatccatcatccttgcctgatgcattagatcttctagcaacatcagacaatagaatacgcctactcgttgctgaggctcaacttctagcacgagatgatgaacaaggctcttctgatggtggcgacgattctgatagtagatcctcattaactatgagcagtgaagatgcaaaagttaccgatgaagatactactaaaatgctttctgatctgctcattgacaatgcgcagctgagactacgcctcaatgctgtcatccgcaatgctgtaaatacttccgtgaagccagagaaagaaggtagtggcgaggttctccccaaaaagacagtccttaactggttgttggacagatgagagaaccaccaatatatatttatgtggattagttcttcaaacttacgcggcttgaccaaaattatatgatgagcgtacctatagtgccagggtagcatcaggaattcaggataaaaccttccctccatggagggaaggggagcctggaagcctttgtttctgttgcacgattttttatccacgcatggaagtcacggaggatggtatatatagggccacggctttggctcctaaaaaatgactgtctggcttctcttccagaaactctataaaagctagtgttttttaacaaatcgttt

SEQ ID NO: 206894 - DNA, 2055 bp, Zea Mays
gtgcgattttgttccacgaatacagcgaagatgctgaggctgtgaccccgggtgactcttgtttctacccacttatctttgcagtcgccactgcacgccactgattggctcgcgtgattcgtggaccttcttgccatggcgacgatgtctgcagcgtctcatcgctgctgtgcttcttccttgagagctttaacggtgttatttgtgttggcagctcttgtttcagatgttggcgggcgacatcatcatcatgtttgtcctcattatttctcctgtggtggtttaagcaatatatcgtatccatttcgtcggcaaggtgatccatctgggtgtggtgtccaatcgtacgagctggtttgcacggatacagatgctacaattcgcatcggcagtggaacatacaaggcatgcaggtgccctcgaatacaagctatccagatgttgttaagttcatgaggagtggatttgcccttggatttccctcgtatggtgataacatcagagaatgtctcgcaaaggatatgcgtactttccataaagaaccaagaaatagtacaggcatcaggcaacagatcttggacattcttacggtcgtcgacatattctgggcttgtgttatctatcaacttcaatcaactaattataatggtgtcacaactgttgtcatcggcatcattgaaacgatacaatatgttagcggggtcctggattatacagctggtgtttgcaggttcgtattaatgccgctggcagtattcgtcttcctagtctataaatactggaaaacaaggataacagtagatgcagtcgagaagttcttgcgaacgcagcagatgctcgttccgatgagatatgcatacacaaacatcattgctatcaccggccatttcagagacaagctcggacaaggtggttacggttctgtatacaagggggtgctacagccaggtgaagttcatgttgctattaagatgttgggcaactccaactgtaacggagacgagttcatcagtgaggtcgccaccattggcaagatccaccatgtcaatattgtgcgcctcatcgggttttgctccgaggaaaatagcagagcacttatctacgagttcatgccccatggatctctcgataagtacatcttctcgtcggagaagagtttctcatgggtcaaactcaatgagatcgctctgggcattgctagcggtctcaactacctacatcatgggtgtgatatgcagattgtacacttcgacatcaagccacacaacatccttcttgacagcaactttgttccaaaagttgctgattttgggcttgccaaactgttcccaagaggcgacagtttcgtgccactgagcgctatgcggggaacgataggatatatagctccagagatggtatctcgaagctttggtgtcatctctagcaaatccgatgtgtacagctttgggatgctactattggagatgacgggtgggcgaaggaacgcagatcctcatgcaggaagctccagtcaagcatactacccatccttggtgtacaaccagctgagccagggtgatgcgaacgggattagtgaaggtgttaatatgcacgatttagagaagaagctatgtactattgggctttggtgcatccaaatgaagccgcaagatcggccgacgatgagcgaggtcatagagatgcttgaatctggtgtcgatggcatgcaaatgcctccaagaccatacttttgtgatgaagagggtgacagttcttactctataatctctgaactggatacaattgaagagtaataattgtagtaaaatacacttgtgtctatgtgatcttaatgtattagactactaataatgcaaggttgtcataagctaaggtactggttgtatacttttattgagagtgtggtaatgtgttttgatataaaatacctccatgaacctatttttacaaagaactcctcaagaacatttgtttgcctacaagcagaggatcagagtcctagccgttctatcttccaaaggttgcacttcctatatacgaatccatgtgaag

SEQ ID NO: 206895 - DNA, 2366 bp, Zea Mays
gtgcgattttgttccacgaatacagcgaagatgctgaggctgtgaccccgggtgactcttgtttctacccacttatctttgcagtcgccactgcacgccactgattggctcgcgtgattcgtggaccttcttgccatggcgacgatgtctgcagcgtctcatcgctgctgtgcttcttccttgagagctttaacggtgttatttgtgttggcagctcttgtttcagatgttggcgggcgacatcatcatcatgtttgtcctcattatttctcctgtggtggtttaagcaatatatcgtatccatttcgtcggcaaggtgatccatctgggtgtggtgtccaatcgtacgagctggtttgcacggatacagatgctacaattcgcatcggcagtggaacatacaaggtgcttagcatcaactccacatattctcacttctgggttgttgatgccgacctggacatccagagcagttgcccccttccccggtgggattaccatgctcgttggatcaatctcaacttacatcgttggtggattgtgtcgagccaatattatttctattcttcttctttttatatggattcgtggcggtgggctatctttgtgaattgttctcagccaatagagaacaatgatactgataaatatcatatatatgagccggtgtcttgcttgagcaattcttctttcatctacttggtacctgactactggcatgcaggtgccctcgaatacaagctatccagatgttgttaagttcatgaggagtggatttgcccttggatttccctcgtatggtgataacatcagagaatgtctcgcaaaggatatgcgtactttccataaagaaccaagaaatagtacaggcatcaggcaacagatcttggacattcttacggtcgtcgacatattctgggcttgtgttatctatcaacttcaatcaactaattataatggtgtcacaactgttgtcatcggcatcattgaaacgatacaatatgttagcggggtcctggattatacagctggtgtttgcaggttcgtattaatgccgctggcagtattcgtcttcctagtctataaatactggaaaacaaggataacagtagatgcagtcgagaagttcttgcgaacgcagcagatgctcgttccgatgagatatgcatacacaaacatcattgctatcaccggccatttcagagacaagctcggacaaggtggttacggttctgtatacaagggggtgctacagccaggtgaagttcatgttgctattaagatgttgggcaactccaactgtaacggagacgagttcatcagtgaggtcgccaccattggcaagatccaccatgtcaatattgtgcgcctcatcgggttttgctccgaggaaaatagcagagcacttatctacgagttcatgccccatggatctctcgataagtacatcttctcgtcggagaagagtttctcatgggtcaaactcaatgagatcgctctgggcattgctagcggtctcaactacctacatcatgggtgtgatatgcagattgtacacttcgacatcaagccacacaacatccttcttgacagcaactttgttccaaaagttgctgattttgggcttgccaaactgttcccaagaggcgacagtttcgtgccactgagcgctatgcggggaacgataggatatatagctccagagatggtatctcgaagctttggtgtcatctctagcaaatccgatgtgtacagctttgggatgctactattggagatgacgggtgggcgaaggaacgcagatcctcatgcaggaagctccagtcaagcatactacccatccttggtgtacaaccagctgagccagggtgatgcgaacgggattagtgaaggtgttaatatgcacgatttagagaagaagctatgtactattgggctttggtgcatccaaatgaagccgcaagatcggccgacgatgagcgaggtcatagagatgcttgaatctggtgtcgatggcatgcaaatgcctccaagaccatacttttgtgatgaagagggtgacagttcttactctataatctctgaactggatacaattgaagagtaataattgtagtaaaatacacttgtgtctatgtgatcttaatgtattagactactaataatgcaaggttgtcataagctaaggtactggttgtatacttttattgagagtgtggtaatgtgttttgatataaaatacctccatgaacctatttttacaaagaactcctcaagaacatttgtttgcctacaagcagaggatcagagtcctagccgttctatcttccaaaggttgcacttcctatatacgaatccatgtgaag

SEQ ID NO: 206896 - DNA, 1904 bp, Zea Mays
tgactacccagtcagcggcatcacaattatgtggaccagtcatgtgcgattttgttccacgaatacagcgaagatgctgaggctgtgaccccgggtgactcttgtttctacccacttatctttgcagtcgccactgcacgccactgattggctcgcgtgattcgtggaccttcttgccatggcgacgatgtctgcagcgtctcatcgctgctgtgcttcttccttgagagctttaacggtgttatttgtgttggcagctcttgtttcagatgttggcgggcgacatcatcatcatgtttgtcctcattatttctcctgtggtggtttaagcaatatatcgtatccatttcgtcggcaaggtgatccatctgggtgtggtgtccaatcgtacgagctggtttgcacggatacagatgctacaattcgcatcggcagtggaacatacaaggcatgcaggtgccctcgaatacaagctatccagatgttgttaagttcatgaggagtggatttgcccttggatttccctcgtatggtgataacatcagagaatgtctcgcaaaggatatgcggtgtttgcaggttcgtattaatgccgctggcagtattcgtcttcctagtctataaatactggaaaacaaggataacagtagatgcagtcgagaagttcttgcgaacgcagcagatgctcgttccgatgagatatgcatacacaaacatcattgctatcaccggccatttcagagacaagctcggacaaggtggttacggttctgtatacaagggggtgctacagccaggtgaagttcatgttgctattaagatgttgggcaactccaactgtaacggagacgagttcatcagtgaggtcgccaccattggcaagatccaccatgtcaatattgtgcgcctcatcgggttttgctccgaggaaaatagcagagcacttatctacgagttcatgccccatggatctctcgataagtacatcttctcgtcggagaagagtttctcatgggtcaaactcaatgagatcgctctgggcattgctagcggtctcaactacctacatcatgggtgtgatatgcagattgtacacttcgacatcaagccacacaacatccttcttgacagcaactttgttccaaaagttgctgattttgggcttgccaaactgttcccaagaggcgacagtttcgtgccactgagcgctatgcggggaacgataggatatatagctccagagatggtatctcgaagctttggtgtcatctctagcaaatccgatgtgtacagctttgggatgctactattggagatgacgggtgggcgaaggaacgcagatcctcatgcaggaagctccagtcaagcatactacccatccttggtgtacaaccagctgagccagggtgatgcgaacgggattagtgaaggtgttaatatgcacgatttagagaagaagctatgtactattgggctttggtgcatccaaatgaagccgcaagatcggccgacgatgagcgaggtcatagagatgcttgaatctggtgtcgatggcatgcaaatgcctccaagaccatacttttgtgatgaagagggtgacagttcttactctataatctctgaactggatacaattgaagagtaataattgtagtaaaatacacttgtgtctatgtgatcttaatgtattagactactaataatgcaaggttgtcataagctaaggtactggttgtatacttttattgagagtgtggtaatgtgttttgatataaaatacctccatgaacctatttttacaaagaactcctcaagaacatttgtttgcctacaagcagaggatcagagtcctagccgttctatcttccaaaggttgcacttcctatatacgaatccatgtgaag

SEQ ID NO: 206897 - DNA, 2036 bp, Zea Mays
tcgttgatgatctgaaaaaaaaaaagaaggggtaatctcaggaaccatctagatacagcggcggtacgtggactggactggagcgagcaagcctgcgccggcgccgccgtcctcccgaaacagaagctgtagttggtcaagaactggggatactgagttgaatatgatctcaaatccggtggactggtatagtttcggacccggatagaattggtagggatgcaagattggagggtgcgtgagttcgaaggtaaattcactgatgagtttgcccacagcagtagcaacgaacataaaggtggagttgaggcttctggtgtcattagtagtaagaagttgaagcatgcagttgctaatgagaaaatccaaggtgtcatccccggtacaaatagctcaggttcactgaaacgtaattcagagaacatccaacatgcgaacggggtattatcccagaatataagctgcgctggtgactacaaaaatggctccattgcctttcctttgagagaagaaaatacaataactgagaccagatgtccagatgataactggaactcctgtcagtttgcactgaacaatggttcgtccattctcaataaccacagtgctccccaggatagcctcacttatggagataatgatctaaactacatcgaatggcctggcattgacaattttgaggatgtcgatacattattcaggagttctgattcaacatatggtcagcagcagctggagaatgcagatgggttatcttggattccgtcttcagatgctgtttactctaccgatgttgctttgcaacaagggcttgattcgtcttattcagattatggtattctggatgatctctccgcattccaatgtgcagaagataaatcactacccttggttgatccttcatcagctttatgtgataatcaattcaatgatacctacctgttcagtgaacaaaagaatgtgaatgcatatggtgaacagatataccaagaggatttgatggagttgttgcccactgaccagatatgcagcggacatgaaaacattgatatggttggaaaccagtatccatctgaaaatgcaattcaaggtaccgaagataagaaattctctatagcgtcaacttcccagctgagttctcagaatttactgaatcaaagacaccacttagattccagttcaccaagcaatattacttcggagtcctatccaggaaagttcggtccatctagctgttcttctgcacaaagaaactcaaaagtgcagaagaaaactgtcaacatacaaccaagacagccagcaaatgataatgttatgaacacaagcagagcttcttacccttgtgagaactatgaaactgaaagaagaggattagggaaagaactctgggggatcctcaagttacaatgggtagttcaatggtagtggatggctcatttgtatcatctatgtcctctgataactcagtcgaagaaagcagctttcaacaactgcaggatgctgttagtcagctggatgtgcaaaccaaattgtgcatcagggatggtttataccgattggcacgaagtgcgcaacatagacaagtttttccaaatacgatgaacagcaatggtggtagcgaggacggaaaggaactggagaacgcagaaacttcgtgcaagttcatggaccctcggagcatcgagacgcagacaaacccgatcgatcggtctatagctctgctacttttccgcgagtcatctggcggccatgtccatgtggctgtagcagccgacgatgcctcgtcactgaaatcccctgctggtgtatgatttcctgcctgccacatctcagttccagggccctgctgctaacccaggatgtttctaggcatgtatgtaaaaaaaaaaacaagcgtattgtgtagccaatagtctgtactctgtagtcacattaattttgtcatgcttgtatcctattgctagacggccgatgtgctaacctagtgctgttgactcaaattttatgcgtaatctaaaaaaaattatttcttttcg

SEQ ID NO: 206898 - DNA, 2066 bp, Zea Mays
tcgttgatgatctgaaaaaaaaaaagaaggggtaatctcaggaaccatctagatacagcggcggtacgtggactggactggagcgagcaagcctgcgccggcgccgccgtcctcccgaaacagaagctgtagttggtcaagaactggggatactgagttgaatatgatctcaaatccggtggactggtatagtttcggacccggatagaattggtagggatgcaagattggagggtgcgtgagttcgaaggtaaattcactgatgagtttgcccacagcagtagcaacgaacataaaggtggagttgaggcttctggtgtcattagtagtaagaagttgaagcatgcagttgctaatgagaaaatccaaggtgtcatccccggtacaaatagctcaggttcactgaaacgtaattcagagaacatccaacatgcgaacggggtattatcccagaatataagctgcgctggtgactacaaaaatggctccattgcctttcctttgagagaagaaaatacaataactgagaccagatgtccagatgataactggaactcctgtcagtttgcactgaacaatggttcgtccattctcaataaccacagtgctccccaggatagcctcacttatggagataatgatctaaactacatcgaatggcctggcattgacaattttgaggatgtcgatacattattcaggagttctgattcaacatatggtcagcagcagctggagaatgcagatgggttatcttggattccgtcttcagatgctgtttactctaccgatgttgctttgcaacaagggcttgattcgtcttattcagattatggtattctggatgatctctccgcattccaatgtgcagaagataaatcactacccttggttgatccttcatcagctttatgtgataatcaattcaatgatacctacctgttcagtgaacaaaagaatgtgaatgcatatggtgaacagatataccaagaggatttgatggagttgttgcccactgaccagatatgcagcggacatgaaaacattgatatggttggaaaccagtatccatctgaaaatgcaattcaaggtaccgaagataagaaattctctatagcgtcaacttcccagctgagttctcagaatttactgaatcaaagacaccacttagattccagttcaccaagcaatattacttcggagtcctatccaggaaagttcggtccatctagctgttcttctgcacaaagaaactcaaaagctggtgtgacacttaagtgcgcaaatgcagtgcagaagaaaactgtcaacatacaaccaagacagccagcaaatgataatgttatgaacacaagcagagcttcttacccttgtgagaactatgaaactgaaagaagaggattagggaaagaactctgggggatcctcaagttacaatgggtagttcaatggtagtggatggctcatttgtatcatctatgtcctctgataactcagtcgaagaaagcagctttcaacaactgcaggatgctgttagtcagctggatgtgcaaaccaaattgtgcatcagggatggtttataccgattggcacgaagtgcgcaacatagacaagtttttccaaatacgatgaacagcaatggtggtagcgaggacggaaaggaactggagaacgcagaaacttcgtgcaagttcatggaccctcggagcatcgagacgcagacaaacccgatcgatcggtctatagctctgctacttttccgcgagtcatctggcggccatgtccatgtggctgtagcagccgacgatgcctcgtcactgaaatcccctgctggtgtatgatttcctgcctgccacatctcagttccagggccctgctgctaacccaggatgtttctaggcatgtatgtaaaaaaaaaaacaagcgtattgtgtagccaatagtctgtactctgtagtcacattaattttgtcatgcttgtatcctattgctagacggccgatgtgctaacctagtgctgttgactcaaattttatgcgtaatctaaaaaaaattatttcttttcg

SEQ ID NO: 206899 - DNA, 2142 bp, Zea Mays
ctcaaggcgagacgcccatctcccctctcatcgtctctctcatctcatccagcctgtgccaaaacaaaacgagaaaaaaaagtcttgctgctgctggtggtggagcgagaaaggaaaaaaaaaaagaaggggtaatctcaggaaccatctagatacagcggcggtacgtggactggactggagcgagcaagcctgcgccggcgccgccgtcctcccgaaacagaagctgtagttggtcaagaactggggatactgagttgaatatgatctcaaatccggtggactggtatagtttcggacccggatagaattggtagggatgcaagattggagggtgcgtgagttcgaaggtaaattcactgatgagtttgcccacagcagtagcaacgaacataaaggtggagttgaggcttctggtgtcattagtagtaagaagttgaagcatgcagttgctaatgagaaaatccaaggtgtcatccccggtacaaatagctcaggttcactgaaacgtaattcagagaacatccaacatgcgaacggggtattatcccagaatataagctgcgctggtgactacaaaaatggctccattgcctttcctttgagagaagaaaatacaataactgagaccagatgtccagatgataactggaactcctgtcagtttgcactgaacaatggttcgtccattctcaataaccacagtgctccccaggatagcctcacttatggagataatgatctaaactacatcgaatggcctggcattgacaattttgaggatgtcgatacattattcaggagttctgattcaacatatggtcagcagcagctggagaatgcagatgggttatcttggattccgtcttcagatgctgtttactctaccgatgttgctttgcaacaagggcttgattcgtcttattcagattatggtattctggatgatctctccgcattccaatgtgcagaagataaatcactacccttggttgatccttcatcagctttatgtgataatcaattcaatgatacctacctgttcagtgaacaaaagaatgtgaatgcatatggtgaacagatataccaagaggatttgatggagttgttgcccactgaccagatatgcagcggacatgaaaacattgatatgttgcaggttggaaaccagtatccatctgaaaatgcaattcaaggtaccgaagataagaaattctctatagcgtcaacttcccagctgagttctcagaatttactgaatcaaagacaccacttagattccagttcaccaagcaatattacttcggagtcctatccaggaaagttcggtccatctagctgttcttctgcacaaagaaactcaaaagtgcagaagaaaactgtcaacatacaaccaagacagccagcaaatgataatgttatgaacacaagcagagcttcttacccttgtgagaactatgaaactgaaagaagaggattagggaaagaactctgggggatcctcaagttacaatgggtagttcaatggtagtggatggctcatttgtatcatctatgtcctctgataactcagtcgaagaaagcagctttcaacaactgcaggatgctgttagtcagctggatgtgcaaaccaaattgtgcatcagggatggtttataccgattggcacgaagtgcgcaacatagacaagtttttccaaatacgatgaacagcaatggtggtagcgaggacggaaaggaactggagaacgcagaaacttcgtgcaagttcatggaccctcggagcatcgagacgcagacaaacccgatcgatcggtctatagctctgctacttttccgcgagtcatctggcggccatgtccatgtggctgtagcagccgacgatgcctcgtcactgaaatcccctgctggtgtatgatttcctgcctgccacatctcagttccagggccctgctgctaacccaggatgtttctaggcatgtatgtaaaaaaaaaaacaagcgtattgtgtagccaatagtctgtactctgtagtcacattaattttgtcatgcttgtatcctattgctagacggccgatgtgctaacctagtgctgttgactcaaattttatgcgtaatctaaaaaaaattatttcttttcg

SEQ ID NO: 206900 - DNA, 2017 bp, Zea Mays
tctaggccccttcggtgagatgtatgcgtcacaagctttccgtgttttccagcgctgtttgatctgagcccaagtagttggtcaagaactggggatactgagttgaatatgatctcaaatccggtggactggtatagtttcggacccggatagaattggtagggatgcaagattggagggtgcgtgagttcgaaggtaaattcactgatgagtttgcccacagcagtagcaacgaacataaaggtggagttgaggcttctggtgtcattagtagtaagaagttgaagcatgcagttgctaatgagaaaatccaaggtgtcatccccggtacaaatagctcaggttcactgaaacgtaattcagagaacatccaacatgcgaacggggtattatcccagaatataagctgcgctggtgactacaaaaatggctccattgcctttcctttgagagaagaaaatacaataactgagaccagatgtccagatgataactggaactcctgtcagtttgcactgaacaatggttcgtccattctcaataaccacagtgctccccaggatagcctcacttatggagataatgatctaaactacatcgaatggcctggcattgacaattttgaggatgtcgatacattattcaggagttctgattcaacatatggtcagcagcagctggagaatgcagatgggttatcttggattccgtcttcagatgctgtttactctaccgatgttgctttgcaacaagggcttgattcgtcttattcagattatggtattctggatgatctctccgcattccaatgtgcagaagataaatcactacccttggttgatccttcatcagctttatgtgataatcaattcaatgatacctacctgttcagtgaacaaaagaatgtgaatgcatatggtgaacagatataccaagaggatttgatggagttgttgcccactgaccagatatgcagcggacatgaaaacattgatatgttgcaggttggaaaccagtatccatctgaaaatgcaattcaaggtaccgaagataagaaattctctatagcgtcaacttcccagctgagttctcagaatttactgaatcaaagacaccacttagattccagttcaccaagcaatattacttcggagtcctatccaggaaagttcggtccatctagctgttcttctgcacaaagaaactcaaaagctggtgtgacacttaagtgcgcaaatgcagtgcagaagaaaactgtcaacatacaaccaagacagccagcaaatgataatgttatgaacacaagcagagcttcttacccttgtgagaactatgaaactgaaagaagaggattagggaaagaactctgggggatcctcaagttacaatgggtagttcaatggtagtggatggctcatttgtatcatctatgtcctctgataactcagtcgaagaaagcagctttcaacaactgcaggatgctgttagtcagctggatgtgcaaaccaaattgtgcatcagggatggtttataccgattggcacgaagtgcgcaacatagacaagtttttccaaatacgatgaacagcaatggtggtagcgaggacggaaaggaactggagaacgcagaaacttcgtgcaagttcatggaccctcggagcatcgagacgcagacaaacccgatcgatcggtctatagctctgctacttttccgcgagtcatctggcggccatgtccatgtggctgtagcagccgacgatgcctcgtcactgaaatcccctgctggtgtatgatttcctgcctgccacatctcagttccagggccctgctgctaacccaggatgtttctaggcatgtatgtaaaaaaaaaaacaagcgtattgtgtagccaatagtctgtactctgtagtcacattaattttgtcatgcttgtatcctattgctagacggccgatgtgctaacctagtgctgttgactcaaattttatgcgtaatctaaaaaaaattatttcttttcg

SEQ ID NO: 206901 - DNA, 1942 bp, Zea Mays
tttccgtgttttccagcgctgtttgatctgagcccaagttggtcaagaactggggatactgagttgaatatgatctcaaatccggtggactggtatagtttcggacccggatagaattggtagggatgcaagattggagggtgcgtgagttcgaaggtaaattcactgatgagtttgcccacagcagtagcaacgaacataaaggtggagttgaggcttctggtgtcattagtagtaagaagttgaagcatgcagttgctaatgagaaaatccaaggtgtcatccccggtacaaatagctcaggttcactgaaacgtaattcagagaacatccaacatgcgaacggggtattatcccagaatataagctgcgctggtgactacaaaaatggctccattgcctttcctttgagagaagaaaatacaataactgagaccagatgtccagatgataactggaactcctgtcagtttgcactgaacaatggttcgtccattctcaataaccacagtgctccccaggatagcctcacttatggagataatgatctaaactacatcgaatggcctggcattgacaattttgaggatgtcgatacattattcaggagttctgattcaacatatggtcagcagcagctggagaatgcagatgggttatcttggattccgtcttcagatgctgtttactctaccgatgttgctttgcaacaagggcttgattcgtcttattcagattatggtattctggatgatctctccgcattccaatgtgcagaagataaatcactacccttggttgatccttcatcagctttatgtgataatcaattcaatgatacctacctgttcagtgaacaaaagaatgtgaatgcatatggtgaacagatataccaagaggatttgatggagttgttgcccactgaccagatatgcagcggacatgaaaacattgatatggttggaaaccagtatccatctgaaaatgcaattcaaggtaccgaagataagaaattctctatagcgtcaacttcccagctgagttctcagaatttactgaatcaaagacaccacttagattccagttcaccaagcaatattacttcggagtcctatccaggaaagttcggtccatctagctgttcttctgcacaaagaaactcaaaagtgcagaagaaaactgtcaacatacaaccaagacagccagcaaatgataatgttatgaacacaagcagagcttcttacccttgtgagaactatgaaactgaaagaagaggattagggaaagaactctgggggatcctcaagttacaatgggtagttcaatggtagtggatggctcatttgtatcatctatgtcctctgataactcagtcgaagaaagcagctttcaacaactgcaggatgctgttagtcagctggatgtgcaaaccaaattgtgcatcagggatggtttataccgattggcacgaagtgcgcaacatagacaagtttttccaaatacgatgaacagcaatggtggtagcgaggacggaaaggaactggagaacgcagaaacttcgtgcaagttcatggaccctcggagcatcgagacgcagacaaacccgatcgatcggtctatagctctgctacttttccgcgagtcatctggcggccatgtccatgtggctgtagcagccgacgatgcctcgtcactgaaatcccctgctggtgtatgatttcctgcctgccacatctcagttccagggccctgctgctaacccaggatgtttctaggcatgtatgtaaaaaaaaaaacaagcgtattgtgtagccaatagtctgtactctgtagtcacattaattttgtcatgcttgtatcctattgctagacggccgatgtgctaacctagtgctgttgactcaaattttatgcgtaatctaaaaaaaattatttcttttcg

SEQ ID NO: 206902 - DNA, 1933 bp, Zea Mays
ttccagcgctgtttgatctgagcccaagttggtcaagaactggggatactgagttgaatatgatctcaaatccggtggactggtatagtttcggacccggatagaattggtagggatgcaagattggagggtgcgtgagttcgaaggtaaattcactgatgagtttgcccacagcagtagcaacgaacataaaggtggagttgaggcttctggtgtcattagtagtaagaagttgaagcatgcagttgctaatgagaaaatccaaggtgtcatccccggtacaaatagctcaggttcactgaaacgtaattcagagaacatccaacatgcgaacggggtattatcccagaatataagctgcgctggtgactacaaaaatggctccattgcctttcctttgagagaagaaaatacaataactgagaccagatgtccagatgataactggaactcctgtcagtttgcactgaacaatggttcgtccattctcaataaccacagtgctccccaggatagcctcacttatggagataatgatctaaactacatcgaatggcctggcattgacaattttgaggatgtcgatacattattcaggagttctgattcaacatatggtcagcagcagctggagaatgcagatgggttatcttggattccgtcttcagatgctgtttactctaccgatgttgctttgcaacaagggcttgattcgtcttattcagattatggtattctggatgatctctccgcattccaatgtgcagaagataaatcactacccttggttgatccttcatcagctttatgtgataatcaattcaatgatacctacctgttcagtgaacaaaagaatgtgaatgcatatggtgaacagatataccaagaggatttgatggagttgttgcccactgaccagatatgcagcggacatgaaaacattgatatgttgcaggttggaaaccagtatccatctgaaaatgcaattcaaggtaccgaagataagaaattctctatagcgtcaacttcccagctgagttctcagaatttactgaatcaaagacaccacttagattccagttcaccaagcaatattacttcggagtcctatccaggaaagttcggtccatctagctgttcttctgcacaaagaaactcaaaagaagaaaactgtcaacatacaaccaagacagccagcaaatgataatgttatgaacacaagcagagcttcttacccttgtgagaactatgaaactgaaagaagaggattagggaaagaactctgggggatcctcaagttacaatgggtagttcaatggtagtggatggctcatttgtatcatctatgtcctctgataactcagtcgaagaaagcagctttcaacaactgcaggatgctgttagtcagctggatgtgcaaaccaaattgtgcatcagggatggtttataccgattggcacgaagtgcgcaacatagacaagtttttccaaatacgatgaacagcaatggtggtagcgaggacggaaaggaactggagaacgcagaaacttcgtgcaagttcatggaccctcggagcatcgagacgcagacaaacccgatcgatcggtctatagctctgctacttttccgcgagtcatctggcggccatgtccatgtggctgtagcagccgacgatgcctcgtcactgaaatcccctgctggtgtatgatttcctgcctgccacatctcagttccagggccctgctgctaacccaggatgtttctaggcatgtatgtaaaaaaaaaaacaagcgtattgtgtagccaatagtctgtactctgtagtcacattaattttgtcatgcttgtatcctattgctagacggccgatgtgctaacctagtgctgttgactcaaattttatgcgtaatctaaaaaaaattatttcttttcg

SEQ ID NO: 206903 - DNA, 131 bp, Zea Mays
acgccgccgtcgtgaggtcacgagtcacctgaagatcatcctggtacctggaatctcaagtcccaggcaagttgtgcccttgatcacttcgtttacccactcatgttctaataaatcataatgatctacat

SEQ ID NO: 206904 - DNA, 4230 bp, Zea Mays
cttcatcactgtcagttcacacacagactcactgctcgagctcgaggaggtgttttgctaattttgcagcgccagggctggaaaaaaatattccgaacaaccacaggggcgtccaagtccaagcaaagccccgctcctgtcacagacaaatttccacgggagtatctccccccctgcttttttcttcttcccttcaccccccgcgtgcgcgctcagtccctctcgcctgtggcgacgcttgagcgaccgctgctgccgctcgacgccagatcttcgccgtgccgctccggtgacgagcaccctccagcgtaaggaggggagtcggagatgttttactcgcagttcattttggccaaaaagggtcccctcgggaccatatggattgccgcgcacttggagcggaagctgcgcaagaaccaggtcgcggacacggacatcggcgtctccgtagattctatcatattccctgatgttccaattgcacttcggttatcaagtcatcttatgttaggcgtggtcagaatctattctcggaaggtcaactacctattccatgactgcagcgaagctttgctgaagataaaacaagctttcaggtccactgctgttgatcttcctcctgaagagtcaactgctccgtatcactctataactctgcctgagacattcgatcttgatgattttgaactgccagaagctgcgtttcaaggcgacactgatcatcatgtgagcacaaaagaacagatcactttgcaagacaacccagagaaaacagggtattcaacatcccagtttggcctagatgaaagatttggtgatgccagttcatcacatattggctttgacttggaggaggaattaattctgaacaaggaccactcaattcatctccaatctgatgatggcattattattcaaggtcggtcatcagtcccttctactgatatggacattgatgataacaaaagtcaagacataatagctgaaggataccacaacatggatggtgggcattctagtcatggaaagctaggttcactgaatctgaatgcaattgacctaggaggaaacagtatccctaactggactggttacaatgtacatactcctgatttgaatgatatattattgcataatgagggtattgcagggccatcagcttcgtacattcaacctagcccatatacttgtgatgaacctgcatcaccagagttcattagtgctcaggccccagctacacctggtttaatggaagagacagttccttctagagtccatgaaagtcctgttctaagtccacagagaaaaccatcaccgtcaaccaatgatgaaactgcaaagactgacactcctgctgctccagcctcagattttcttcattcggctacaggaaatgccaatgatgttggtgctgaaaggacagaacttggattggcgaagcatgtgcaagttgagtcttctgctttctgggacgctgatgcatcgggacaacagcacacaagtgagggtttaccatcccagggtcaagctgatcacttagaacccgctgctgataaattggtcaattctgatggtatagccgcatctgttgaaactgtaactgtcaatgcaaccattaaagatgtacctttggctgtaaatgattcagagccatgtgttgatggttctactgaaccatctgtggtggagaacctggtacagattaatgggccattaattgatgcacaaggtacaattacacaaattgcagattttcaacatgaagcccaagcaatgcaacaagtagtggcatctaatgatagactgaatgaactagcaacttcagaatttgctgagcctgagaaaatgctgtcagttccagattctgaattcaatcatccaattgacttggggctcataactgcggaaaagggaacaactgaatctgatggaagtaacataataggcagccttgctagcagaaaaagacatctggaagatagcttaccagctttagagagtgagaccactgaaaggttgtctagccgaccacatggtatacgaaccaacgattttgttccccatgatgatgatatactggcatctattttagtcggtagaaggacccctggattcacacttgattcaacaccactaccaccgagggaatcgtctctgaaacgccggaggttgggctcgaagatgggcacactcaagaggaaagtgcaaatagacgatgccatggtcctgcatgctgatactatacggcaacagttgatcaacactgaggatatacggcgcattcgtaaaaaagctccatgcactcgttccgaaatatggatgattgagaaaggttcactggaagatgatatattccacgagcccatcttttcctgcctatctgaggagctaaacaaattacacaatcggacatatgaggctattgtacatcctgctgtacagaacatggaactgcaaggtcaattagacatgcctgaagcaattacagaagatagcaatattgctgggtttggtgctgctactattgatggcccacttcacataccagatgggattcaatcagatgccatgctgccacgtgccaatgatgcatatggcgctacagctgcttttagtttgcaagttcctcctaacaaccaggttaacggtgcatctaatgattttgttattggcactctgtttcaaggggtgactggaccttttattggtaatgagaaagaagtggcacttgctgacagagagcgtgctcaagtaaatacactgtatagtgaccattttcaagatgtcccatctgatttgcatagtactgatgcaaacatttctagtcaagatgtgactctagataactctggccaagcttgcgctcacgcaacggacggcatgacaagggagcttactcattttgttcatagtaatgctaatattttcgagagtaatgaggtccctgcttctgagattactggggtggaatataatcaaggtgcctctggtttccctcaatcaacggaggatgaaaatgcgaagatgttcaagatgcctctggttttcctcgaccaacggaggatgaaaatatggtagattataatcaagatgcctctggttttcctcgaccaacagaagatgtaaatgcggtgggatataatcaagatgcctctggttttgctcgaccaacggaagatgtaaatgcggtgggatgtaatcaagatgcctctggttttcctcgatcaatgaaggatgaaaatgcggtggaatataatcaagatggctctggttttcctcgaccagctgaaaatgaaaatgatgtgtctgctatgggagataattctggcttccatgaaaacaacatgggttctcttacggatctggatatggtgaatgactatgaactgaaggaaagcaatgattttgggagtgcaattaatggtgttgatacagattttctgaactacgacgatgatgacggcggggacttcgacgacgccaacgacgatgagccaaatcccaacgagtttcagtctctcgacaacagtggttggtcttctcgcaccaggggcgttgcaagatacctcaaggctttattcgacgacgagtctggtctggagaggaagagcgttgctatcgaccatctggtgcgcgggaagacgcggaaggaagcgtcgagaatgttcttcgagaccttggtgctgacgacgaaggactacatcagcgtggaccaaccgaaccccttcgacttggtgagaataaagccaggctcaaagctgctgatgtcggaattctagaccgtccaagccagcttttacccctggcgccatacatacgtgttaccaattgtatccatcacaccgacctaccgcaccccctcctttaccccctccaaatccatttttgtttgtttgtttgtttgtttgttgttgttgttgttaagttatcctcctctgtgtagcatctcccgcgcgctagggctcgagtaggatggctgctatgttgtaccgtcggctgtatatatgatttagtgacacatgtgaagcctgccatgtaatctgatagcgctggctccctccctccctcccctccgatccactaaagctattgtataatttgtatttgcttggctaaagcccgtaggaatttgcgtattggtaacaagacgatatgatggtgtacctgttgattatgtcaggatctattgacagctttaactcagctattattggactgacctttcttgtg

SEQ ID NO: 206905 - DNA, 2128 bp, Zea Mays
attctcgggtcgagacggcaagcgtcagaccagtgacgaagcaaatctaccatgcgatgcgagcatgacaaataaataccctttacctcgtccttgccgccgcggccgccggggcgtcccggatcgtggtggtgcttgccgtcgctggcgggggattcgcgcgggggaggatacgtatcggcggaggggagctggagctcgccgcggccaccgcgttccagaagatctgcaccctgtcgtcgcggcggcgtggcggcggcggcagcgccaccttttaccggccggtcggcgtcccagaggggttctcgctcctgggttactactgccagcctaactgccgcccgctccacggccacgtcctcgttgccagagcgggggagcgcccgtccggcgcctcacctcagccgccgccgccgccgctctgcaagccgctggactatacgctcatctgggaattccaagccagtggcgataccggctacggctacggtcgaagcgacgcctacttctggatccccgtgccgccggagaggtatcgggcgctcgggtgtctcgtgaccacggaaccacggagaccaccgctcgaggaggtggtatgcgtccgcgaggacctgacggacgagtgcgagccgcacggctcgctgctctgcctagagcagccgcggccgtcttcgttcttcaccgtgcggggcgttcgtccggtgcgccgagggatacgggagaaaggagtgtgcgtgggcaccttctgctgcgccgctgacgggctccccccgcgcgagcacggcatggcgtgcctgggcaacgtcgagctcgacctgtcggcgatgccaacgctggagcaggcgcacgcggtgatccggcactacggccccacgctgttcttccaccccaaggaggtctacctgccgtcgtccgtctcttggttcttcaagaacggcgccgcgttgtacaggcgagggggagacaccgcgggcgaggagatcgacggcgaggggtccaacctccctggtggcggttgcaacgacggggagttctggatcgacgttcccagcggcgagcggggccgcgccgtgtgccgcggcagcatcgacagcgcggagctctacgcgcacgtgaagccggccatgggcggcacgtgcaccgacgtggccatgtgggtgttctgcccgttcaacggcccggcgaggctcaagctgggcccgatcagcctcccgctgggcaagaccgggcggcacgtcggggactgggagcacttcacgttccgcgtcagcaacctcaccggtgagctcatgggcgtgtactactcgcagcacagcggcgggcactgggtggacgcctccgcattggagtacatcgacggcaaccggcctgtggtgtactcgtccaggaacgggcacgcgagctacgcgtaccctggcgtgtacctgcagggctcggcggcgctcggggtcggcatccgcaacgacgccgctcggagcagcctattcgtggactccagcgccaggtaccgcatcgttgcggcggggtatctgggcgagggcgccgtcgtcgagccgcagtggctgcagttcatgcgggagtggggtccgacggtggtgtacaagtggaggaagcggatggagtgggtgatcggccgcctacctccctggctcaggtgcagagcggagagcatgctgaacaagatgcccaacgagctgtccagggaagaagggccgaccgggcccaaggagaagaacaactgggagggagacgagagatggtaagactggtacgtaggaacagtgctcaacgatgtgattttataacatgtgtggcttaaattaaggggcgtgctatatttaggtgtttgaaaaacagcttcttcgcggaccatacactagtacaatttggctctataccagcggtacgctttttacatcacagacggttcggttagaaaaccgcctgtaatgtcccaggcggttcagtacgcctgtgatgtaatagtatcacaagcggtttttgtttaggaccgtctgtggtgctctatccttttcacaaacggaccctaagaaaaaaccgcctctgattgtaaaaatatttttaatttttaacagaaatatgcaaatacaatttaaatgaattaata

SEQ ID NO: 206906 - DNA, 1395 bp, Zea Mays
cggctcgcgacagagggaaaaaaactcagaaacccaactcgctcgttcccgcaactcgcatcttctcgtcgacagctccaactccggaacccttgtcgccggcgccggcgatgtcgtcatctaccgcccccgccccggcggcggcgatggccgtggacgatgcggaggacgaccagctcgcctccatgtccacggaggacgacatccgggcctcccgcctcctcgacaacgagatccgcgtcctcaaggacgagttgcagcggacgaacctggagttggagtcgttcaaggagaagatcaaggaaaaccaggataaaattaagctcaacaaacagctaccctacctcgttggcaatttcgttgagatcttggaaatgaatcctgaggatgaagctaaggaggatggtgctaacattgatttagattcacaaaggaaaggaaaatgtgttgttctgaagacctccacaagacaagatccgaaggcagagaatcctaatgagatggttacagctggtgtgctttcaagccttcagaatttcctacgcaagtgcctcatagctagcctctcatatggcccaatgccgaagcacattgcatttattatggatggcaatcgtcgatatgctaaattcagaagcatgcaagaaggagctggtcacaggatgggtttctctacccttattgcaagtctgatgtactgctatgaaatgggtgtgaagtacatcactgtctacgcattcagcatcgacaattttaaaagggacccaagtgaggtggaatccttgatgcagttaatggaggaaaaaatcaacgaactcttagagaaccaaagtgtaatcaacaagattaagtgtaagatcaacttttggggtaacttggacttgttatatgagccggtgcggttggcggctgagaagctgatggcgagcacagctgggaacacagggctggttttttctatctgcatgccatacaactcgacttctgagattgtcaatgctgtcagtgaagtctgtgcggaaaggatggaaatgtttcagagcgaacatattggcgactgcaatggtcatgctgcaaataacggtgtgcgttcagagatttcagtggcagagttggatcgccacatgtatagtgccggatgcccagatcctgatatcgtcatccggacttcgggcgagactcgattgagcaatttcctcctttggcagacaacgtttagtcacttgcagaatccagatcctttgtggcccgagttctcctttaggcaccttgtttgggctatcttgcagtatcagagagtttaccctgctctggagcataacagaaagttggctaagaagcagttgtgattccatgttatttgcaaagagctcactcgaacgcttgacctttttc

SEQ ID NO: 206907 - DNA, 1628 bp, Zea Mays
ctcctgttcagatgggcctatgttcggtcgcacgggcgtgtaccgaagcttcatgttcagcagcccgactgtgctggtgacgacggcggaggggtgcaagcaggtgctgatggacgacgacgcgttcgtgacggggtggcccaaggcgacggttgcgctggtcgggccgcggtcgttcgtggcgatgccgtacgacgagcaccggcgcatccgcaagctgactgccgcgcccatcaacggcttcgacgcgctgacggggtacctgcccttcatcgaccgcaccgtcacgtcgtcgctgcgcgcgtgggcggaccacggcggcagcgtcgagttcctgacggagctgcggcgcatgacgttcaagatcatcgtgcagatcttcctgggcggcgcggaccaggccaccacgcgcgcgctggagcgcagctacacggagctcaactacggcatgcgcgccatggccatcaacctgcccggcttcgcgtaccgcggggcgctgcgcgcgcgccgccgcctcgtggccgtgctgcagggcgtgctggacgagcgccgcgccgccagggccaagggggtctcgggcggaggagtggacatgatggaccggctgatcgaggcccaggacgagcgcgggcggcacctggacgacgacgagatcatcgacgtgctcgtcatgtacctcaacgccggccacgagtcgtccggccacatcaccatgtgggccaccgtgttcctgcaggagaacccggacatgttcgcgagagcaaaggcggagcaggaggcgatcatgaggagcatcccgtcgtcgcagcgggggctgacgctcagggacttcaggaagatggagtacctgtcgcaggtgatcgacgagacgctgcggctcgtcaacatctccttcgtctccttccgtcaggccaccagagacgtcttcgtgaacggatacctcatccccaaggggtggaaggttcagctctggtaccggagcgtgcacatggacccacaggtgtaccctgaccccaccaagttcgacccgtcgagatgggagggccactcgccgagagccggcacgttcctggcgttcgggctgggcgccaggctctgccccggcaacgacctcgccaagctggagatttccgtcttcctccaccacttcctcctcggctacaagtaactaaataactatctgtgtcgtcgagacgacgattattcctttctttttttttagctggtcgagcagatgaactgttgctgatcgacgggcatgcgtgcgtgcaggctggcgaggacgaaccctaggtgccgggtgaggtacctgccgcacccgaggccggtggacaactgcttggccaagatcaccagagtcggtagctagctgctagattgtgatggaagtacgaatgaaaaaaaagcccagcagaaactctagcggctgggccggctggaaattatgggccgggccattgtggttgccccccctgtctgtgcaaaaataaaacaagcagaaaggaataaaaaaaaggaaaagtattacttcgaacgctgaaattcttggtcgggtcgggcctgttttcggcccatctcaggcagccaggtgcgctcgtgtcgtcccactgtctcgaaatcaaaacacc

SEQ ID NO: 206908 - DNA, 1551 bp, Zea Mays
gtgttgctcactcgcttgctcctcctcgcagtctcaatggatggatgaatcagttcggtcgcacgggcgtgtaccgaagcttcatgttcagcagcccgactgtgctggtgacgacggcggaggggtgcaagcaggtgctgatggacgacgacgcgttcgtgacggggtggcccaaggcgacggttgcgctggtcgggccgcggtcgttcgtggcgatgccgtacgacgagcaccggcgcatccgcaagctgactgccgcgcccatcaacggcttcgacgcgctgacggggtacctgcccttcatcgaccgcaccgtcacgtcgtcgctgcgcgcgtgggcggaccacggcggcagcgtcgagttcctgacggagctgcggcgcatgacgttcaagatcatcgtgcagatcttcctgggcggcgcggaccaggccaccacgcgcgcgctggagcgcagctacacggagctcaactacggcatgcgcgccatggccatcaacctgcccggcttcgcgtaccgcggggcgctgcgcgcgcgccgccgcctcgtggccgtgctgcagggcgtgctggacgagcgccgcgccgccagggccaagggggtctcgggcggaggagtggacatgatggaccggctgatcgaggcccaggacgagcgcgggcggcacctggacgacgacgagatcatcgacgtgctcgtcatgtacctcaacgccggccacgagtcgtccggccacatcaccatgtgggccaccgtgttcctgcaggagaacccggacatgttcgcgagagcaaaggcggagcaggaggcgatcatgaggagcatcccgtcgtcgcagcgggggctgacgctcagggacttcaggaagatggagtacctgtcgcaggtgatcgacgagacgctgcggctcgtcaacatctccttcgtctccttccgtcaggccaccagagacgtcttcgtgaacggatacctcatccccaaggggtggaaggttcagctctggtaccggagcgtgcacatggacccacaggtgtaccctgaccccaccaagttcgacccgtcgagatgggagggccactcgccgagagccggcacgttcctggcgttcgggctgggcgccaggctctgccccggcaacgacctcgccaagctggagatttccgtcttcctccaccacttcctcctcggctacaagctggcgaggacgaaccctaggtgccgggtgaggtacctgccgcacccgaggccggtggacaactgcttggccaagatcaccagagtcggtagctagctgctagattgtgatggaagtacgaatgaaaaaaaagcccagcagaaactctagcggctgggccggctggaaattatgggccgggccattgtggttgccccccctgtctgtgcaaaaataaaacaagcagaaaggaataaaaaaaaggaaaagtattacttcgaacgctgaaattcttggtcgggtcgggcctgttttcggcccatctcaggcagccaggtgcgctcgtgtcgtcccactgtctcgaaatcaaaacacc

SEQ ID NO: 206909 - DNA, 1283 bp, Zea Mays
ccgaagttgcctttatgaagccgttggcatctcattctgggcggcggcggccctgaccctgagccggaggaggaggaggaggagggcgtcacggcggcgtacgcggagcggtggccgcggtggctgcagccgctgctgtccgcgcgcttcttcgcgcagtgcaggacgcacagcgactccaaccgcagcggcgaatgcaacatgttctgcctggactgctcggccgccgggggcacgggcacgggcgcgggcgcgctctgctcgctgtgcctggcgcagcacgggcaccgcgaccaccacaccatccagatccggcgctcctcctaccacgacgtcatccgcgtctcggacatccagcgcttcatggacatcgccggcgtgcagacctacgtcatcaacagcgcccgcgtcgtcttcctcaacgagcggccgcagcagcagaagccgggtggcggcaaggccgcgtcgtcgtcgtcggcctccgccaacctctgcgaggtctgcgcccgcagcctcctcgacaacttccgcttctgctccctcggctgcaaggtcgtcggctgctcccccgacgccgccaaggccaggaactggctcctccgggccgccgacggcgacggttccaccacatcctcctcggccccgcgcaacgccgacaggaagctgagcttcacgccgcccacgccgcagccgaccctgccgacgaagcgccgcaagggcatcccgcaccgcgccccgttcggcagcctcatcgtcgagtactagaatctccttctcccccagccatcgctgtccacgtccgttgcttctgcattggcagttggcactacacgcgcgcggtagagtggaagtactcttcaaacgacggaatggaatcgcacagtgagccagtgaatccagattacaggcaagccaataggttggccaccacttgggtggcctggcccgcctttctttgccacggcacttcggttggtgggtgcttatcgaggtggatgccatttgctcgctggcttcgctttccagaaaggggagggaggagaaaggaaggtggatggattggatcggacatcggaggaagaatcaaaaccagcttttcatcactgttcacgagatatatgtttctttctgtctgagaaatacatgtaaattttatgtcttgctctgctccaaatcatcgtagcggagcagtatagctagcttttgtgatgcttttaccagattgtattgttataggttgtctgaagaaacgagataaccaacgcacagtgcttgtgtgttca

SEQ ID NO: 206910 - DNA, 903 bp, Zea Mays
acgcaggacgcggaccaacccacctgctccattttatgcttcgccctcgctcgcctcgccctcgccgcaacgctttgcgatagagtttctgtctgctaccagcaccacagcctagcaccccaccgcgtctagggttttctgctccaatggccgccgcgagggcagacggggagcgcaggatcggggtggccatcgactactcggagagcgccaagaaggcgctggactgggccatcgacaacctgctccaccacggggacaccctcgtcgtcgtccacgtcctgcaccacggcgcggaggagaccaagcacacgctctgggccaagtccggatccccgctgatcccactctccgagttccgggagcccgaggtgatgcagggctacggcgtgcgccccgacgccgaggtgctcgacgcgatcgacacggcagcgcgccagaagcagctgaaggtggtggcgaagctgtactggggcgacgccagggagaagctctgcgacgccgtcgaggatctcaggatcgattccctcgtcatgggtagtcgcggcctcggcccgatccagaggtatagtacaatcctaagactccattactactactatagtactattgaaatgttgcctcatcaggactggaatgcgctgttcagcctctgatagtaagttagtttctcgctttttctttttgttcggataagcgcgtcaattgagtgtctggaataaatggatatagtctagcgtgcatggatggctcgattgatgatagggatagcccgcatgccaagtcagtatgctggtgcagtactgaaatgttcaaacacagcacatctagttcttgttcttaatagcaatacttatctgaaaaatgctcttgttccttgtatcgttgcatccggtgattctg

SEQ ID NO: 206911 - DNA, 1657 bp, Zea Mays
ttttgtcaggtgtcagaaacaattaggtatcccaattaagaaccatcgtgccaagaccttcaaggaggcgtcatgccattcaagttgtcacggcatttgatgatgatcctggggatttctcgctggtgcacgatgacggggacgagcagtttggtgttcctcagtattcaagcgagagtgaatggagcgatgatgatgtcatattgacggcattcacagatgttgagttaccgatggcagtcaagagccgggccgagggtgcactaactatagctgcccataggttcgccacgattgacaaagggcataagaagagcagaactcaacaagggctgatgaataatgttggactggttgctttcttagtgatgttacttttctttgtcgactggtgttcttggaagattgttagactaccactggactctttttacttgacacgtccttttttaacatcggcagttttatcagcacttgctggattcctttttgcaccagtcgctgatagtctgaagatccaccatttccggaggagaggaaagtctgtttctccatcaagtagaaagccaacccctggaatgggaggattattctttgttcctgttggtatttttgttgcaaaaagagaggttggttccaactcgaatggagttaatggagcagctatgattaccctcatatttgcgatggttgggttgcttgatgatatttctagtctagcagtagatcacaattataaaataccgcgatggataaggttcttggttcaaattgttgctggcatttacttctctaactggttgggttctacagatatttcaacaccatatagcatgaaatatctggttcctctgccgcctcctttcggccttgcactcattggaaaagtatatatggttctggctgctgcatgttcactttccatgggtccggcagtaacactcgttgatggtcttgatggtttggctggtggtattgctgctttggcactcatagcactatctgttgcagctctcccgatttgctctgaattcagtgtttttggagcatcaatgtcaggtgcttgcattgggtttctttttcacaacagatacagggcctccgtggttatgagccgggttggttctttcgcactcggaggagcagttgccacaattgcatcatgcagtggaatgtttcttccaatgttaatagcatgcagtctcttctttgttgagctactgtttgcaatattgcaggttccttttcacatggctaaaaactctttccgcggaacaagcagacatcccctgaaaatccgcccctcgcattactacctcagacttctagggataaaggaaccttatatcgtggcgggcgcatacatgatatcatgcttcctaactctgttggcaggataccttggccttgtctcagcgtagatgaactctcgtcgcttcctctctttttcttttcagttgtggtacatgataaaatccaggcagccattattgcttcatttttatgccaggtctgtgtttcagtgacacagagaatttaacagatgtagtcgttctttaatgttatgttatatattaggtgtagacgtagattatacggtgtttccataggtaacagtgctgccatcgcgtcaaaggcactgtaggcggtagagtag

SEQ ID NO: 206912 - DNA, 1510 bp, Zea Mays
ctagcgtttctccttggtggcggtatcccaattaagaaccatcgtgccaagaccttcaaggaggcgtcatgccattcaagttgtcacggcatttgatgatgatcctggggatttctcgctggtgcacgatgacggggacgagcagtttggtgttcctcagtattcaagcgagagtgaatggagcgatgatgatgtcatattgacggcattcacagatgttgagttaccgatggcagtcaagagccgggccgagggtgcactaactatagctgcccataggttcgccacgattgacaaagggcataagaagagcagttttatcagcacttgctggattcctttttgcaccagtcgctgatagtctgaagatccaccatttccggaggagaggaaagtctgtttctccatcaagtagaaagccaacccctggaatgggaggattattctttgttcctgttggtatttttgttgcaaaaagagaggttggttccaactcgaatggagttaatggagcagctatgattaccctcatatttgcgatggttgggttgcttgatgatatttctagtctagcagtagatcacaattataaaataccgcgatggataaggttcttggttcaaattgttgctggcatttacttctctaactggttgggttctacagatatttcaacaccatatagcatgaaatatctggttcctctgccgcctcctttcggccttgcactcattggaaaagtatatatggttctggctgctgcatgttcactttccatgggtccggcagtaacactcgttgatggtcttgatggtttggctggtggtattgctgctttggcactcatagcactatctgttgcagctctcccgatttgctctgaattcagtgtttttggagcatcaatgtcaggtgcttgcattgggtttctttttcacaacagatacagggcctccgtggttatgagccgggttggttctttcgcactcggaggagcagttgccacaattgcatcatgcagtggaatgtttcttccaatgttaatagcatgcagtctcttctttgttgagctactgtttgcaatattgcaggttccttttcacatggctaaaaactctttccgcggaacaagcagacatcccctgaaaatccgcccctcgcattactacctcagacttctagggataaaggaaccttatatcgtggcgggcgcatacatgatatcatgcttcctaactctgttggcaggataccttggccttgtctcagcgtagatgaactctcgtcgcttcctctctttttcttttcagttgtggtacatgataaaatccaggcagccattattgcttcatttttatgccaggtctgtgtttcagtgacacagagaatttaacagatgtagtcgttctttaatgttatgttatatattaggtgtagacgtagattatacggtgtttccataggtaacagtgctgccatcgcgtcaaaggcactgtaggcggtagagtag

SEQ ID NO: 206913 - DNA, 3367 bp, Zea Mays
cgcttcccttcccgcgcccatggcaatggctgccgctcctcacagtcatcacactccagtgggggccgcagcggccacgtccgccgccgtatccatgccctgctgctcctccgcttcctgttacgacgacaaggacggcgacccgtcctcctcctggtcgctgtcctcgccgcggcgccggcagccgtaccggcgcctcctccgcgacgaggcgcagcggctccggcgcgcgcggcggagccagggcccgggcgccgacacgccgcggtgggtgcggcgcaccacggatcagatggcccggtacatcgaggacgaccgcgcggggcacgtgtacgggcggcacgtggtcgccgccgtccgcgcggtgcgggccacggcgtcgcgcccgtccgcggacatgcgccaggccatggcgtcgtttgttaccaggctcaccttccgcgagatgtgcgtcgtgctccgcgagcagcgcggctggcgtcaggcgcgcgacttcttcgcttggatgaagctccagctgtgctacgaaccaagcgtcgtcgcctacaccgttctgctgcggttgtatggcagggtcgggaaggtgaagcttgccgaagagacgtttcttgagatgctccaggttggctgcgagcctgacgccgtggcgtgcgggaccctcctgtgcgcgtacgctaggtgggggcggcacgaggacatgatgctgttctactcggcggtgcgcgggcggggcctagtccctccgatctctgtctacaactacatgatctcgtctctgcagaagcagaagctgcacggcaaggtcatccatgtgtggaagcagatgctggaagctggcgcgccgcctaaccaattcacctacacagtcgtcatcggctcccttgtgaaggaagatctcctggaggaggccgtcgatttgttcggtgagatgcggcggcgtaggttcgttccggaagaggcgacttacagcctgttgatcagtgcgagctccagacatggcaaaggagaacaggcgttgcggctcttcgaagagatgaagggccagggaatcgcccccagcaactacacctgtgcgtctctcttggcactgcactgcaagaacgaagactacccaaaggctcttgctctcttctctgacatggaaagcagcaaggtcattcctgacgaggtcatctacgggattcttatcaggatatacgggaaactcgggctttacgaggaggcacgtcagacgtttggcgagatcgagaaggcaggtcttctgaacgacgagcagacttacgtggcaatggctcaggtccacctgaacgctggagactgtgacagagcactggaggtgttagaatctatgaagacgagaggcgtgaagccttcgcgcttctcttacagcgctcttctcagatgtcacgtcgcaaaggaagacgtagtcgccgcagaagacaccttcagagctctctcccagtcccagcacggcctccctgacgcgttctgctgtaacgacatgctcaggctgtacatgaggctgggacgtctagacaaggccagggcactggtttcggtgctgctgagggaagatggtttccagcttgacgagaacctctctacgacagtgatggagttttactgcaaaagcggtatggttgaggacgcagagaagttactcgaagatattcagaggaacaggaaacccgtgaaggttccaacgctgcttttgcttgtagagatgtacgctagaaacagacccagtgtggttctggaagaacgcagctcgtcgagggcactcggcagttcagcagctagcgtggccttgaactccctgttggacatgcctgggggcttgtccagtgtgtccctactgatcagcagattggctagggaaggtgagaacaacggggcacagcactcgtgtgcctaaccataacaatctctgaccgctgtctatatatacatgtactattttgctgtagggagcacagatgaggcgagattcatttacgatcagctgactgaactgggaaccaagcctgacgattcggcggtcgctactctgatcgtccagtatggccaggcaaagcagttagagcgagcacaagaactattcgattcagcgtcagcgtcgttcccagatggggcgcttgtctgcaacgccatggtcgacgcgttctgtaaatgtggcagagctgaggacgcgtaccatcttttcatggagatggctgatcaaggcagttacagaaatgctgtgacagctagcattcttgtcactcacctgactaagcatgggaaatttcaagaggttgagaacatcatgcatggctgtttccgagatgaagtccagctcgacactgccttgtacaacacatttatcaagtcgatgcttgaatcagtttccaagcaggtaaactgcattcggccgtcagcatatacgatcgcatggtatcctctggcgtttctcagtccatgcagacgttcaatacaatgataagtgtttatggcaaaggaggaaagctggacaaggccgttgagatgtttgctgctgcgcaggagctgggcctgccgatcgacgagaagatgtacacgaacatgcttagcttatatgggaaagccggcatcaagaggcgtctttgatgttcaaaagaatgaaggaagatggcatcagacctggaaagatcagcttcaactccatgatcaatgcctacgccacttcaggactgttcagcgaggcgaaaagcgtgttccaggagatgcaggactgcgggcacgcccccgactccttctcctacctcgcgctgatcagagcgtacacggaggctaagctgtacaccgaagcagaagaagccatccggacgatgacgctgagcagcagcaacacgaccccttcctgcccgcacttcagccacctgattctcgcgttcttgaaggaaggccgggtcggtgaagcccggaggatctacggccagatgatggaggtaggcgtggctcctgacctggcctgctgtagggccatgatgagggtgtacgtggaccgcggtctcgtcgacgatggcatctcgctctatgagacgacgtgtgggtcgttgaaacctgatagcttcgtcttgagcgctgcgtttcatctgtatgagcgtgcgggcagggagtgtgaagcccagggtgtcctggagtccatcagtgcgagtggtacctccttcctgaggaacatgaagattggatttggatcgtctttaagaagttagaacttaaacatgctagtttttctcttttttttcaagtgtttgggttaaatatcttaacttatattctagcttttccaatatttggcttaaatactgctagacattcccacacatgtaaataatttagtaaggac

SEQ ID NO: 206914 - DNA, 3197 bp, Zea Mays
cgcttcccttcccgcgcccatggcaatggctgccgctcctcacagtcatcacactccagtgggggccgcagcggccacgtccgccgccgtatccatgccctgctgctcctccgcttcctgttacgacgacaaggacggcgacccgtcctcctcctggtcgctgtcctcgccgcggcgccggcagccgtaccggcgcctcctccgcgacgaggcgcagcggctccggcgcgcgcggcggagccagggcccgggcgccgacacgccgcggtgggtgcggcgcaccacggatcagatggcccggtacatcgaggacgaccgcgcggggcacgtgtacgggcggcacgtggtcgccgccgtccgcgcggtgcgggccacggcgtcgcgcccgtccgcggacatgcgccaggccatggcgtcgtttgttaccaggctcaccttccgcgagatgtgcgtcgtgctccgcgagcagcgcggctggcgtcaggcgcgcgacttcttcgcttggatgaagctccagctgtgctacgaaccaagcgtcgtcgcctacaccgttctgctgcggttgtatggcagggtcgggaaggtgaagcttgccgaagagacgtttcttgagatgctccaggttggctgcgagcctgacgccgtggcgtgcgggaccctcctgtgcgcgtacgctaggtgggggcggcacgaggacatgatgctgttctactcggcggtgcgcgggcggggcctagtccctccgatctctgtctacaactacatgatctcgtctctgcagaagcagaagctgcacggcaaggtcatccatgtgtggaagcagatgctggaagctggcgcgccgcctaaccaattcacctacacagtcgtcatcggctcccttgtgaaggaagatctcctggaggaggccgtcgatttgttcggtgagatgcggcggcgtaggttcgttccggaagaggcgacttacagcctgttgatcagtgcgagctccagacatggcaaaggagaacaggcgttgcggctcttcgaagagatgaagggccagggaatcgcccccagcaactacacctgtgcgtctctcttggcactgcactgcaagaacgaagactacccaaaggctcttgctctcttctctgacatggaaagcagcaaggtcattcctgacgaggtcatctacgggattcttatcaggatatacgggaaactcgggctttacgaggaggcacgtcagacgtttggcgagatcgagaaggcaggtcttctgaacgacgagcagacttacgtggcaatggctcaggtccacctgaacgctggagactgtgacagagcactggaggtgttagaatctatgaagacgagaggcgtgaagccttcgcgcttctcttacagcgctcttctcagatgtcacgtcgcaaaggaagacgtagtcgccgcagaagacaccttcagagctctctcccagtcccagcacggcctccctgacgcgttctgctgtaacgacatgctcaggctgtacatgaggctgggacgtctagacaaggccagggcactggtttcggtgctgctgagggaagatggtttccagcttgacgagaacctctctacgacagtgatggagttttactgcaaaagcgagatgtacgctagaaacagacccagtgtggttctggaagaacgcagctcgtcgagggcactcggcagttcagcagctagcgtggccttgaactccctgttggacatgcctgggggcttgtccagtgtgtccctactgatcagcagattggctagggaagggagcacagatgaggcgagattcatttacgatcagctgactgaactgggaaccaagcctgacgattcggcggtcgctactctgatcgtccagtatggccaggcaaagcagttagagcgagcacaagaactattcgattcagcgtcagcgtcgttcccagatggggcgcttgtctgcaacgccatggtcgacgcgttctgtaaatgtggcagagctgaggacgcgtaccatcttttcatggagatggctgatcaaggcagttacagaaatgctgtgacagctagcattcttgtcactcacctgactaagcatgggaaatttcaagaggttgagaacatcatgcatggctgtttccgagatgaagtccagctcgacactgccttgtacaacacatttatcaagtcgatgcttgaatcagtttccaagcaggtaaactgcattcggccgtcagcatatacgatcgcatggtatcctctggcgtttctcagtccatgcagacgttcaatacaatgataagtgtttatggcaaaggaggaaagctggacaaggccgttgagatgtttgctgctgcgcaggagctgggcctgccgatcgacgagaagatgtacacgaacatgcttagcttatatgggaaagccggcaggcatcaagaggcgtctttgatgttcaaaagaatgaaggaagatggcatcagacctggaaagatcagcttcaactccatgatcaatgcctacgccacttcaggactgttcagcgaggcgaaaagcgtgttccaggagatgcaggactgcgggcacgcccccgactccttctcctacctcgcgctgatcagagcgtacacggaggctaagctgtacaccgaagcagaagaagccatccggacgatgacgctgagcagcagcaacacgaccccttcctgcccgcacttcagccacctgattctcgcgttcttgaaggaaggccgggtcggtgaagcccggaggatctacggccagatgatggaggtaggcgtggctcctgacctggcctgctgtagggccatgatgagggtgtacgtggaccgcggtctcgtcgacgatggcatctcgctctatgagacgacgtgtgggtcgttgaaacctgatagcttcgtcttgagcgctgcgtttcatctgtatgagcgtgcgggcagggagtgtgaagcccagggtgtcctggagtccatcagtgcgagtggtacctccttcctgaggaacatgaagattggatttggatcgtctttaagaagttagaacttaaacatgctagtttttctcttttttttcaagtgtttgggttaaatatcttaacttatattctagcttttccaatatttggcttaaatactgctagacattcccacacatgtaaataatttagtaaggac

SEQ ID NO: 206915 - DNA, 3275 bp, Zea Mays
cgcttcccttcccgcgcccatggcaatggctgccgctcctcacagtcatcacactccagtgggggccgcagcggccacgtccgccgccgtatccatgccctgctgctcctccgcttcctgttacgacgacaaggacggcgacccgtcctcctcctggtcgctgtcctcgccgcggcgccggcagccgtaccggcgcctcctccgcgacgaggcgcagcggctccggcgcgcgcggcggagccagggcccgggcgccgacacgccgcggtgggtgcggcgcaccacggatcagatggcccggtacatcgaggacgaccgcgcggggcacgtgtacgggcggcacgtggtcgccgccgtccgcgcggtgcgggccacggcgtcgcgcccgtccgcggacatgcgccaggccatggcgtcgtttgttaccaggctcaccttccgcgagatgtgcgtcgtgctccgcgagcagcgcggctggcgtcaggcgcgcgacttcttcgcttggatgaagctccagctgtgctacgaaccaagcgtcgtcgcctacaccgttctgctgcggttgtatggcagggtcgggaaggtgaagcttgccgaagagacgtttcttgagatgctccaggttggctgcgagcctgacgccgtggcgtgcgggaccctcctgtgcgcgtacgctaggtgggggcggcacgaggacatgatgctgttctactcggcggtgcgcgggcggggcctagtccctccgatctctgtctacaactacatgatctcgtctctgcagaagcagaagctgcacggcaaggtcatccatgtgtggaagcagatgctggaagctggcgcgccgcctaaccaattcacctacacagtcgtcatcggctcccttgtgaaggaagatctcctggaggaggccgtcgatttgttcggtgagatgcggcggcgtaggttcgttccggaagaggcgacttacagcctgttgatcagtgcgagctccagacatggcaaaggagaacaggcgttgcggctcttcgaagagatgaagggccagggaatcgcccccagcaactacacctgtgcgtctctcttggcactgcactgcaagaacgaagactacccaaaggctcttgctctcttctctgacatggaaagcagcaaggtcattcctgacgaggtcatctacgggattcttatcaggatatacgggaaactcgggctttacgaggaggcacgtcagacgtttggcgagatcgagaaggcaggtcttctgaacgacgagcagacttacgtggcaatggctcaggtccacctgaacgctggagactgtgacagagcactggaggtgttagaatctatgaagacgagaggcgtgaagccttcgcgcttctcttacagcgctcttctcagatgtcacgtcgcaaaggaagacgtagtcgccgcagaagacaccttcagagctctctcccagtcccagcacggcctccctgacgcgttctgctgtaacgacatgctcaggctgtacatgaggctgggacgtctagacaaggccagggcactggtttcggtgctgctgagggaagatggtttccagcttgacgagaacctctctacgacagtgatggagttttactgcaaaagcggtatggttgaggacgcagagaagttactcgaagatattcagaggaacaggaaacccgtgaaggttccaacgctgcttttgcttgtagagatgtacgctagaaacagacccagtgtggttctggaagaacgcagctcgtcgagggcactcggcagttcagcagctagcgtggccttgaactccctgttggacatgcctgggggcttgtccagtgtgtccctactgatcagcagattggctagggaagatgaggcgagattcatttacgatcagctgactgaactgggaaccaagcctgacgattcggcggtcgctactctgatcgtccagtatggccaggcaaagcagttagagcgagcacaagaactattcgattcagcgtcagcgtcgttcccagatggggcgcttgtctgcaacgccatggtcgacgcgttctgtaaatgtggcagagctgaggacgcgtaccatcttttcatggagatggctgatcaaggcagttacagaaatgctgtgacagctagcattcttgtcactcacctgactaagcatgggaaatttcaagaggttgagaacatcatgcatggctgtttccgagatgaagtccagctcgacactgccttgtacaacacatttatcaagtcgatgcttgaatcagtttccaagcaggtaaactgcattcggccgtcagcatatacgatcgcatggtatcctctggcgtttctcagtccatgcagacgttcaatacaatgataagtgtttatggcaaaggaggaaagctggacaaggccgttgagatgtttgctgctgcgcaggagctgggcctgccgatcgacgagaagatgtacacgaacatgcttagcttatatgggaaagccggcaggcatcaagaggcgtctttgatgttcaaaagaatgaaggaagatggcatcagacctggaaagatcagcttcaactccatgatcaatgcctacgccacttcaggactgttcagcgaggcgaaaagcgtgttccaggagatgcaggactgcgggcacgcccccgactccttctcctacctcgcgctgatcagagcgtacacggaggctaagctgtacaccgaagcagaagaagccatccggacgatgacgctgagcagcagcaacacgaccccttcctgcccgcacttcagccacctgattctcgcgttcttgaaggaaggccgggtcggtgaagcccggaggatctacggccagatgatggaggtaggcgtggctcctgacctggcctgctgtagggccatgatgagggtgtacgtggaccgcggtctcgtcgacgatggcatctcgctctatgagacgacgtgtgggtcgttgaaacctgatagcttcgtcttgagcgctgcgtttcatctgtatgagcgtgcgggcagggagtgtgaagcccagggtgtcctggagtccatcagtgcgagtggtacctccttcctgaggaacatgaagattggatttggatcgtctttaagaagttagaacttaaacatgctagtttttctcttttttttcaagtgtttgggttaaatatcttaacttatattctagcttttccaatatttggcttaaatactgctagacattcccacacatgtaaataatttagtaaggac

SEQ ID NO: 206916 - DNA, 3269 bp, Zea Mays
cgcttcccttcccgcgcccatggcaatggctgccgctcctcacagtcatcacactccagtgggggccgcagcggccacgtccgccgccgtatccatgccctgctgctcctccgcttcctgttacgacgacaaggacggcgacccgtcctcctcctggtcgctgtcctcgccgcggcgccggcagccgtaccggcgcctcctccgcgacgaggcgcagcggctccggcgcgcgcggcggagccagggcccgggcgccgacacgccgcggtgggtgcggcgcaccacggatcagatggcccggtacatcgaggacgaccgcgcggggcacgtgtacgggcggcacgtggtcgccgccgtccgcgcggtgcgggccacggcgtcgcgcccgtccgcggacatgcgccaggccatggcgtcgtttgttaccaggctcaccttccgcgagatgtgcgtcgtgctccgcgagcagcgcggctggcgtcaggcgcgcgacttcttcgcttggatgaagctccagctgtgctacgaaccaagcgtcgtcgcctacaccgttctgctgcggttgtatggcagggtcgggaaggtgaagcttgccgaagagacgtttcttgagatgctccaggttggctgcgagcctgacgccgtggcgtgcgggaccctcctgtgcgcgtacgctaggtgggggcggcacgaggacatgatgctgttctactcggcggtgcgcgggcggggcctagtccctccgatctctgtctacaactacatgatctcgtctctgcagaagcagaagctgcacggcaaggtcatccatgtgtggaagcagatgctggaagctggcgcgccgcctaaccaattcacctacacagtcgtcatcggctcccttgtgaaggaagatctcctggaggaggccgtcgatttgttcggtgagatgcggcggcgtaggttcgttccggaagaggcgacttacagcctgttgatcagtgcgagctccagacatggcaaaggagaacaggcgttgcggctcttcgaagagatgaagggccagggaatcgcccccagcaactacacctgtgcgtctctcttggcactgcactgcaagaacgaagactacccaaaggctcttgctctcttctctgacatggaaagcagcaaggtcattcctgacgaggtcatctacgggattcttatcaggatatacgggaaactcgggctttacgaggaggcacgtcagacgtttggcgagatcgagaaggcaggtcttctgaacgacgagcagacttacgtggcaatggctcaggtccacctgaacgctggagactgtgacagagcactggaggtgttagaatctatgaagacgagaggcgtgaagccttcgcgcttctcttacagcgctcttctcagatgtcacgtcgcaaaggaagacgtagtcgccgcagaagacaccttcagagctctctcccagtcccagcacggcctccctgacgcgttctgctgtaacgacatgctcaggctgtacatgaggctgggacgtctagacaaggccagggcactggtttcggtgctgctgagggaagatggtttccagcttgacgagaacctctctacgacagtgatggagttttactgcaaaagcggtatggttgaggacgcagagaagttactcgaagatattcagaggaacaggaaacccgtgaaggttccaacgctgcttttgcttgtagagatgtacgctagaaacagacccagtgtggttctggaagaacgcagctcgtcgagggcactcggcagttcagcagctagcgtggccttgaactccctgttggacatgcctgggggcttgtccagtgtgtccctactgatcagcagattggctagggaagggagcacagatgaggcgagattcatttacgatcagctgactgaactgggaaccaagcctgacgattcggcggtcgctactctgatcgtccagtatggccaggcaaagcagttagagcgagcacaagaactattcgattcagcgtcagcgtcgttcccagatggggcgcttgtctgcaacgccatggtcgacgcgttctgtaaatgtggcagagctgaggacgcgtaccatcttttcatggagatggctgatcaaggcagttacagaaatgctgtgacagctagcattcttgtcactcacctgactaagcatgggaaatttcaagaggttgagaacatcatgcatggctgtttccgagatgaagtccagctcgacactgccttgtacaacacatttatcaagtcgatgcttgaatcaggtaaactgcattcggccgtcagcatatacgatcgcatggtatcctctggcgtttctcagtccatgcagacgttcaatacaatgataagtgtttatggcaaaggaggaaagctggacaaggccgttgagatgtttgctgctgcgcaggagctgggcctgccgatcgacgagaagatgtacacgaacatgcttagcttatatgggaaagccggcatcaagaggcgtctttgatgttcaaaagaatgaaggaagatggcatcagacctggaaagatcagcttcaactccatgatcaatgcctacgccacttcaggactgttcagcgaggcgaaaagcgtgttccaggagatgcaggactgcgggcacgcccccgactccttctcctacctcgcgctgatcagagcgtacacggaggctaagctgtacaccgaagcagaagaagccatccggacgatgacgctgagcagcagcaacacgaccccttcctgcccgcacttcagccacctgattctcgcgttcttgaaggaaggccgggtcggtgaagcccggaggatctacggccagatgatggaggtaggcgtggctcctgacctggcctgctgtagggccatgatgagggtgtacgtggaccgcggtctcgtcgacgatggcatctcgctctatgagacgacgtgtgggtcgttgaaacctgatagcttcgtcttgagcgctgcgtttcatctgtatgagcgtgcgggcagggagtgtgaagcccagggtgtcctggagtccatcagtgcgagtggtacctccttcctgaggaacatgaagattggatttggatcgtctttaagaagttagaacttaaacatgctagtttttctcttttttttcaagtgtttgggttaaatatcttaacttatattctagcttttccaatatttggcttaaatactgctagacattcccacacatgtaaataatttagtaaggac

SEQ ID NO: 206917 - DNA, 2808 bp, Zea Mays
gaaaatacaagtctttgcaacctctcccagcctctgttaatgaaagcacacaacttttagaagaacgatcacacacacttacgtacactctagtgactatcaatccgaagactagaccgtcacccatgatcctgagcaaaaaagaccttaaccacttgcatcaaacgttacgtagcctccaccataaaaagacgagaatctgacttttacagtacagtccacgtgcgaagctaatggaagatagtatggataaccgccaccaaggagaaacgctagctgcttttcctcgagaagtacgaagaagccaagatgtggtgggtttgcttgacgaatctgacattctgactgaagtttggacatagcattggggtgggtgcctgactgcctggtcagggttcgcaccgagatccttggacggaagaactgaggcgatttcgacacaatcttcttgggctcaaacaggtgaacggagaattcaggtcccacttcatccgacgatcacgcatccactccatttgccactgacctctctgttactgcgtccaggggtaagatcttgagagagcaacgcaagaacagagctcactagtagctgtatagcaatcttcgttttcttgttaaaaagggagaaaaacaagagagcacagcagatatttttgtattccattcctgaacctggtctcactttccattccattccattccattggatgccaaaccaaatcacaacccgtggttgaaaccaggacaagctcgcaagaatttggcatcagcagtccctagtagccgtttggaccttccgtagtctgaaaccaccaaagtttggccacggaatctgtagacatgaaaactaagtctccagatttttattaggtgtatacccaaacctgtcaaaatctggaaactacgaagcttctgttctgaagatggctattgccagggaacggcggtgtcttgtttgcgctcacttgacgcatatctgcccaaaagggtttcatgtttctctctgattcaactattgtcaccaggagcagaaagcagaagcagtacatgtcttctaccaataggcagttacaaatcgttttcaagagtcccatcagaaattcagaatccaacttgcagaagagtaacacagtgtggtgtgaaagaaggatgcatgtctatgtaataacaaggcaagtaccccgtgagttatctccactcttcatgaatcaacgtatatatttccaggtgctcagactctcgaacaagggtcacgagttagcaaagctgagagtgatgcagggatcaaaagcaaccaaatggatacatgtgatgaagctaaaaggtactagaacagatgttggcggcccagtatacaggcttctagttctagcgaaggtgcaaactcacaggcagcatgtgacaaaagttcagcatctggaaggcaacgaatgcattgtaagaaaggccaagctgaaccccgcaatcggaatatttatatttcttcacaacggattaagtaaactcctttttatttatatatctgtccatacaacttcattggcgaagccttttggagggttcctgctgtatgcctgcattggtacatcagcaaagaaaaacaaggacgatattttcaatatacctctccaataacagtcatgtgttgcaagaaaggcacatgaatgcaggtataatctaggcaacatgtgtaatataatgtgtgcaattgaacgggaatactaaatattgatcaggaggtgcttgcatgcactagagctaattgttagttgactaaaaaattgctagtgaaattagctagctaacaaatatctagttagactgtttgaatgtcttcaactaattttaacagctaactattagctttagtgcattcaaatatggccttaatcttcagcaactttgctgcattttccaatgatgccgaactgtttgctttggatggcagagtaatgatgccaagctggctaaaaagttactagtagaatactagaattagctagctagcaaatagttagctaactattagttgatttgctaaaagtagctaatagctgaactattagctagggtgtttgaattcctgcggctaatcttagcaactaactataagctctagtgcattcaaacataccttcgtcgaccacatccttgacggccttgcagttgtgtgataagtacgaagctgcggtgtatatcatttagtttggtgtaatatttaacaagtttagatatttacaaatacatgtttaaactacaggaatctaagtgacagcgtgcgacaagttcatgagcctcttatgcatttcactcaatttaataacaataagttagccatgctaagctttcatatcaatatctcaactgcatatatttcatctaattcacactatcagaaggcagctgaagttttgcacattcactcattgcataaatttcatgtcccataggtcataaaatggtatggcttcatttagacagaaaatcatgacaaactatatatcttaggagcgaccttttcttgctactaagaatatagttttctatatcttaagaagaaatttcaaaaacttttagtgattgattatttccatctgacactgaaaattttgcattgagtctaaaaaggcgatacaacacaatgagctagcagataccattcgtagctaacctaccaaaaaacacgagcagaaaactaagaccattcgtttgcagagaaacaaagagaccaaaaaaatgtcactttccattgaagtccacatcaaatatcttactttcatgtctcattgatcctcttccaatcct

SEQ ID NO: 206918 - DNA, 2811 bp, Zea Mays
aaagcacacaacttttagaagaacgatcacacacacttacgtacactctagtgactatcaatccgaagactagaccgtcacccatgatcctgagcaaaaaagaccttaaccacttgcatcaaacgttacgtagcctccaccataaaaagacgagaatctgacttttacagtacagtccacgtgcgaagctaatggaagatagtatggataacctaattgtttctgacacctgacaaaagcaacatgttcaagctcaccgccaccaaggagaaacgctagctgcttttcctcgagaagtacgaagaagccaagatgtggtgggtttgcttgacgaatctgacattctgactgaagtttggacatagcattggggtgggtgcctgactgcctggtcagggttcgcaccgagatccttggacggaagaactgaggcgatttcgacacaatcttcttgggctcaaacaggtgaacggagaattcaggtcccacttcatccgacgatcacgcatccactccatttgccactgacctctctgttactgcgtccaggggtaagatcttgagagagcaacgcaagaacagagctcactagtagctgtatagcaatcttcgttttcttgttaaaaagggagaaaaacaagagagcacagcagatatttttgtattccattcctgaacctggtctcactttccattccattccattccattggatgccaaaccaaatcacaacccgtggttgaaaccaggacaagctcgcaagaatttggcatcagcagtccctagtagccgtttggaccttccgtagtctgaaaccaccaaagtttggccacggaatctgtagacatgaaaactaagtctccagatttttattaggtgtatacccaaacctgtcaaaatctggaaactacgaagcttctgttctgaagatggctattgccagggaacggcggtgtcttgtttgcgctcacttgacgcatatctgcccaaaagggtttcatgtttctctctgattcaactattgtcaccaggagcagaaagcagaagcagtacatgtcttctaccaataggcagttacaaatcgttttcaagagtcccatcagaaattcagaatccaacttgcagaagagtaacacagtgtggtgtgaaagaaggatgcatgtctatgtaataacaaggcaagtaccccgtgagttatctccactcttcatgaatcaacgtatatatttccaggtgctcagactctcgaacaagggtcacgagttagcaaagctgagagtgatgcagggatcaaaagcaaccaaatggatacatgtgatgaagctaaaaggtactagaacagatgttggcggcccagtatacaggcttctagttctagcgaaggtgcaaactcacaggcagcatgtgacaaaagttcagcatctggaaggcaacgaatgcattgtaagaaaggccaagctgaaccccgcaatcggaatatttatatttcttcacaacggattaagtaaactcctttttatttatatatctgtccatacaacttcattggcgaagccttttggagggttcctgctgtatgcctgcattggtacatcagcaaagaaaaacaaggacgatattttcaatatacctctccaataacagtcatgtgttgcaagaaaggcacatgaatgcaggtataatctaggcaacatgtgtaatataatgtgtgcaattgaacgggaatactaaatattgatcaggaggtgcttgcatgcactagagctaattgttagttgactaaaaaattgctagtgaaattagctagctaacaaatatctagttagactgtttgaatgtcttcaactaattttaacagctaactattagctttagtgcattcaaatatggccttaatcttcagcaactttgctgcattttccaatgatgccgaactgtttgctttggatggcagagtaatgatgccaagctggctaaaaagttactagtagaatactagaattagctagctagcaaatagttagctaactattagttgatttgctaaaagtagctaatagctgaactattagctagggtgtttgaattcctgcggctaatcttagcaactaactataagctctagtgcattcaaacataccttcgtcgaccacatccttgacggccttgcagttgtgtgataagtacgaagctgcggtgtatatcatttagtttggtgtaatatttaacaagtttagatatttacaaatacatgtttaaactacaggaatctaagtgacagcgtgcgacaagttcatgagcctcttatgcatttcactcaatttaataacaataagttagccatgctaagctttcatatcaatatctcaactgcatatatttcatctaattcacactatcagaaggcagctgaagttttgcacattcactcattgcataaatttcatgtcccataggtcataaaatggtatggcttcatttagacagaaaatcatgacaaactatatatcttaggagcgaccttttcttgctactaagaatatagttttctatatcttaagaagaaatttcaaaaacttttagtgattgattatttccatctgacactgaaaattttgcattgagtctaaaaaggcgatacaacacaatgagctagcagataccattcgtagctaacctaccaaaaaacacgagcagaaaactaagaccattcgtttgcagagaaacaaagagaccaaaaaaatgtcactttccattgaagtccacatcaaatatcttactttcatgtctcattgatcctcttccaatcct

SEQ ID NO: 206919 - DNA, 4413 bp, Zea Mays
atggaagatattagcaatatatttcacaatgacctgctcccatctctaggagcaaaagcaaacgagtcaatcaagttgaggaaattcatcatttctccttatgattcgtgttacagaacctgggagacgttcttgcttgtgcttgttgtttactcagcatggatctgtccatttgagctagcatttctgagacatctctcatgggtgctttttctggttgagaacattgtcaacagcttctttgctatagatatcatcctaacctttttcctggcataccttgataaaaaatcatatcttctagtggataatccgaaaaggattgcagcaagcatgtatgcagatatatctcctcttggttcatttttgacgtttgctcaacaattccatatcaagcgtttggtctactatttaaaaagcatgcaaatggcctcgcttacagaattcttaacatgctacggttatggcgccttcgtcgcctcagtgatctatttgccaggatgtttcaattacctgatagctgatagataccccaatccagcaagaacctggataggagcagcaagaccagactacagatcagagagcctatgggttcgatatgttacatcgatttattggtctattacaacacttacaacaactggttatggagacttgcatgcagagaatccaagagagatgttattcagtatatgctacatgctgtttaatctgggactgacagcatacctcataggaaacatgacaaatctggttgtccagggaagttgccgtaccagaaatttcgtaagttctcttccaaatacccgcagctaatgtttgtatagctctgctaatgtcgatgttactgctttgcacagttaaacaggacagaactagaaaatagggaagggggtattttaaggggaaattgaggcatgtgccctcaagtactatatgtcaggaactcaggatatacctttgttcagagaattatgtgatctttcctttcttgcatgatgcagagggacacaatccatgcagcttcccagtttgcctcaagaaatcagttacctgaatacataagggatgaaatgctatctcatatttgcctaaggtataagacagagagtctgaaacagaaggaaactttggacagtctccccaagggaatccgatcaggcatagcataccacttattcttccctgtcattgaaaaagtgtacctttttcgtggtgtttcttatacttgcatgctccaactggtcactgcaatggaagcagagtactttccaccgagagaacttgtgatactacaaaatgaagcaccgacagatgtttacatattagtttccggagcagtggaagaacgattcgtgattgatggggttgaaaacaaaatgcaggtccagggagtaatgtacgctggcgaaatatttggtgaaattggggctctgtgcagtgttccccagccatttacaatctgtacaaccaaaatttcacaactcctgagggtgagcacaactgtgctaaaaaatattatagaggaaaacaaagacgacgaacaaattgtacttaacaatattttccaggtgtttatagttttatataaaatgatattctgttatataatgtacttgttgtatgtagaaaggggaactaattttagtattaattatttggcagaaaacagcccaagatcaaagattctctactgaggttagcgggaaatttcttggaaaactcaatcaagaattcagaaagcccaacaactattcagccttcaatcaagtcggtcaagaaaatgaatcagaagcaaaaggaagagtaacatcatgttgcagaaatgagcgctgtaaagaactcaacgaatcagagagatgcaatcatgtaactattcacaaaactgcaaaacaggatgacttcaacataatcaatagttttcctgctaaaggtgaaagcaaggaaaaacatattctcacaaatttgatgtttatggagtctgtgtacagaggagaggcagatgttcatcgacaaatattacctgacagtagcctgacaagatctgaagaggatggcagttctgtggttttagaaataaagagagtgacaattcatgtatatccacagcagaacaaaaaatatgtgccctgtgcaaaagttataaaactaccaggatctctggatgaacttttcaacatagcttgtcagaagttctctggctattgcccaaccaaagtgttcaatcaagaatttgcagaaattgatgatgttacagttattcgagatggtgaccgtttgtttcttatggaatcttgattacggaagctcaatatcatcaaggcatcaactaagaaaagagtaagaattcctattcctttagaaaaccaatcactagaatggttcctgatcagctcccttgcgccgatttatgagccatgaccacagaggctcgctatgatcagtccttgagttgggctatacttcagcgagaggagttgaaggcggtggtgccagaggggttacgactcttgatgtgggcagccacgacacttttttttccagtcacataggtggcagtctagtctcaggactgaaggctactaatttgtgtttatcttaaacttttcttatgttgttagttgtgtgttctaaacaaaagccggaagttgtatcgaggctttgtatcttcttggtgtactgttcttggtatctataaaatgcttcctttatcgaaaaaaatattagtcctccaacctctaataaaagagtacagtaggcctaccgaacatggttgcctatccaacattccttaaaagtcctagacttcacagaactctagcgatctgactgatgcaagtccatgcagaagtttgatgatctcatagatggcatgtggccaacgtaaaagttcctagggccatcttgtattttttcctctacgaggcaatgcaccataactattacaacagtgtacgaggtatccagtttatccatgttgtatgaacaaaaaggctctttcgcttcctcaaacatagcactgccgaacaaccacaaactttgtcatctaagacgtttgtttaaaaaaatttcatgtactagtgtttcaaaatacaaagtctctaatgattagatgagctgctattacttctgaggaaacattcaatctagatttacttagtcaagatcagatgcaaaacaatcagtgtttcaccttgcaaaaaagcaaggacatcggactgaagcagcagcaggcggagacgataactgctaaaggagaataattggatgattaattgcttagggaatagtacaatatatacgctaaaaaacctagggttacatccctcagcctatccctaagaccctaataggacacatgggccaggttctagacccatagatacaatagagagtctaatgtccttccttgtagtcggaactctagccacaatgtattgagaccggatagaaactctgaaaacactgaggggaggccttcaatgaagatattggcgaattttgaagtcatcgaagcgtggagaagtcgaagatccctgatggctacatgatcatggacagagtggagatcaatccacgatgatattgggacaggatagaaactccaaaggcacttgagttgcttggtgcctgcggatttcagggtcgacctcacatttaacgtattatatttgcggccatttatcattaatgaggatgagcttgagtcgaggatgactcaaatgcaagtagggaaagagaatgatgacacccctctcacgatacaaccctaggggcccttcgcgtcttgaagcaccacttgctccgaacattagagtacctagcgcatcaaccttcgaggcacctctggccctgacccctaggacacctcaagcatctactcttagagcacattctgccccgactcctagggcatctcatgcattgacccctaaggcacctcctaccctgaccactagggcacctcttgccccgaccccagggcacctcggccatctgccctcaccccttccaatgacaccacgatgcataaacaacaaggaccaacgactcatgctcacgctcatcaacttaattatcaattacaatcgttcctaacaaaccatttactcttcttaagaagggatgctactaaagtcttgattcttgaaatgattatcttattattagaaatggtggagagaattcacttggttgtggaacaaaggtttaaaggatggaaacattagtttggagcacctaaacttggcccttttagccttatttcccaaagacctcttaggaggggtggattaggattttagttaccctggccgcctaacatactccctccagtacagtaaaggtagtcgtttaggacatgattgtgcataccaaggagtgattaattatcatagagttttccctgtt

SEQ ID NO: 206920 - DNA, 5150 bp, Zea Mays
atggaagatattagcaatatatttcacaatgacctgctcccatctctaggagcaaaagcaaacgagtcaatcaagttgaggaaattcatcatttctccttatgattcgtgttacagaacctgggagacgttcttgcttgtgcttgttgtttactcagcatggatctgtccatttgagctagcatttctgagacatctctcatgggtgctttttctggttgagaacattgtcaacagcttctttgctatagatatcatcctaacctttttcctggcataccttgataaaaaatcatatcttctagtggataatccgaaaaggattgcagcaagatatatctcctcttggttcatttttgacgtttgctcaacaattccatatcaagcgtttggtctactatttaaaaagcatgcaaatggcctcgcttacagaattcttaacatgctacggttatggcgccttcgtcgcctcagtgatctatttgccaggtaagtgtttttttcaaaacttaaaaataagatagccagaaactaatagggtaaagcatctcctgtagactagaaaaggatattaggttggactactactggataaggtgcatcaaactaatatctgtaagtttgtgtgtttccttcaaacataaaacaagtcaaatatgtagtacctcaatagaataaacttactatattttcgagtaaattctgcaggttactctttttacagtacattgttcaggatgtttcaattacctgatagctgatagataccccaatccagcaagaacctggataggagcagcaagaccagactacagatcagagagcctatgggttcgatatgttacatcgatttattggtctattacaacacttacaacaactggttatggagacttgcatgcagagaatccaagagagatgttattcagtatatgctacatgctgtttaatctgggactgacagcatacctcataggaaacatgacaaatctggttgtccagggaagttgccgtaccagaaatttcgtaagttctcttccaaatacccgcagctaatgtttgtatagctctgctaatgtcgatgttactgctttgcacagttaaacaggacagaactagaaaatagggaagggggtattttaaggggaaattgaggcatgtgccctcaagtactatatgtcaggaactcaggatatacctttgttcagagaattatgtgatctttcctttcttgcatgatgcagagggacacaatccatgcagcttcccagtttgcctcaagaaatcagttacctgaatacataagggatgaaatgctatctcatatttgcctaaggtataagacagagagtctgaaacagaaggaaactttggacagtctccccaagggaatccgatcaggcatagcataccacttattcttccctgtcattgaaaaagtgtacctttttcgtggtgtttcttatacttgcatgctccaactggtcactgcaatggaagcagagtactttccaccgagagaacttgtgatactacaaaatgaagcaccgacagatgtttacatattagtttccggagcagtggaagaacgattcgtgattgatggggttgaaaacgtccagggagtaatgtacgctggcgaaatatttggtgaaattggggctctgtgcagtgttccccagccatttacaatctgtacaaccaaaatttcacaactcctgagggtgagcacaactgtgctaaaaaatattatagaggaaaacaaagacgacgaacaaattgtacttaacaatattttccagaaaacagcccaagatcaaagattctctactgaggttagcgggaaatttcttggaaaactcaatcaagaattcagaaagcccaacaactattcagccttcaatcaagtcggtcaagaaaatgaatcagaagcaaaaggaagagtaacatcatgttgcagaaatgagcgctgtaaagaactcaacgaatcagagagatgcaatcatgtaactattcacaaaactgcaaaacaggatgacttcaacataatcaatagttttcctgctaaaggtgaaagcaaggaaaaacatattctcacaaatttgatgtttatggagtctgtgtacagaggagaggcagatgttcatcgacaaatattacctgacagtagcctgacaagatctgaagaggatggcagttctgtggttttagaaataaagagagtgacaattcatgtatatccacagcagaacaaaaaatatgtgccctgtgcaaaagttataaaactaccaggatctctggatgaacttttcaacatagcttgtaagtattctttaactcattcacatcattaggtattgtaggcatctatgtgagagtatagcaaccttcacagagaagtcccaaagaagcttcgacttcgatgtagaaaacagggcaagcttccttgagaagtccttctggcttcaatatgtcacgaagagcctaggtttcaaattgcttattgctggagtactttgcatcccattttatacaaaaaatcaaaacaatcttcctgaatgaagtgaaaataaagggtaaaacaaagtattgatcagcaaaaacactgccagcctgcagtccatcaggacatttaatactgcagaaattgtgcttgcctgaaaagaaaacattagaaggttaagttgtccaagattgagttataatcactgaaatattcagcattggttgtacggacattatatgaataaatattgatttatgacctattgaccttccagtttatctattgtttcattagaatatcaaactgtatttgcattggtttaagtgtgatagaggcccataactagtccacataccattagtgagaaaataaaggaaaggcagtcgataccactgtcttatcctacaattcttggtgcaggtcagaagttctctggctattgcccaaccaaagtgttcaatcaagaatttgcagaaattgatgatgttacagttattcgagatggtgaccgtttgtttcttatggaatcttgattacggaagctcaatatcatcaaggcatcaactaagaaaagagtaagaattcctattcctttagaaaaccaatcactagaatggttcctgatcagctcccttgcgccgatttatgagccatgaccacagaggctcgctatgatcagtccttgagttgggctatacttcagcgagaggagttgaaggcggtggtgccagaggggttacgactcttgatgtgggcagccacgacacttttttttccagtcacataggtggcagtctagtctcaggactgaaggctactaatttgtgtttatcttaaacttttcttatgttgttagttgtgtgttctaaacaaaagccggaagttgtatcgaggctttgtatcttcttggtgtactgttcttggtatctataaaatgcttcctttatcgaaaaaaatattagtcctccaacctctaataaaagagtacagtaggcctaccgaacatggttgcctatccaacattccttaaaagtcctagacttcacagaactctagcgatctgactgatgcaagtccatgcagaagtttgatgatctcatagatggcatgtggccaacgtaaaagttcctagggccatcttgtattttttcctctacgaggcaatgcaccataactattacaacagtgtacgaggtatccagtttatccatgttgtatgaacaaaaaggctctttcgcttcctcaaacatagcactgccgaacaaccacaaactttgtcatctaagacgtttgtttaaaaaaatttcatgtactagtgtttcaaaatacaaagtctctaatgattagatgagctgctattacttctgaggaaacattcaatctagatttacttagtcaagatcagatgcaaaacaatcagtgtttcaccttgcaaaaaagcaaggacatcggactgaagcagcagcaggcggagacgataactgctaaaggagaataattggatgattaattgcttagggaatagtacaatatatacgctaaaaaacctagggttacatccctcagcctatccctaagaccctaataggacacatgggccaggttctagacccatagatacaatagagagtctaatgtccttccttgtagtcggaactctagccacaatgtattgagaccggatagaaactctgaaaacactgaggggaggccttcaatgaagatattggcgaattttgaagtcatcgaagcgtggagaagtcgaagatccctgatggctacatgatcatggacagagtggagatcaatccacgatgatattgggacaggatagaaactccaaaggcacttgagttgcttggtgcctgcggatttcagggtcgacctcacatttaacgtattatatttgcggccatttatcattaatgaggatgagcttgagtcgaggatgactcaaatgcaagtagggaaagagaatgatgacacccctctcacgatacaaccctaggggcccttcgcgtcttgaagcaccacttgctccgaacattagagtacctagcgcatcaaccttcgaggcacctctggccctgacccctaggacacctcaagcatctactcttagagcacattctgccccgactcctagggcatctcatgcattgacccctaaggcacctcctaccctgaccactagggcacctcttgccccgaccccagggcacctcggccatctgccctcaccccttccaatgacaccacgatgcataaacaacaaggaccaacgactcatgctcacgctcatcaacttaattatcaattacaatcgttcctaacaaaccatttactcttcttaagaagggatgctactaaagtcttgattcttgaaatgattatcttattattagaaatggtggagagaattcacttggttgtggaacaaaggtttaaaggatggaaacattagtttggagcacctaaacttggcccttttagccttatttcccaaagacctcttaggaggggtggattaggattttagttaccctggccgcctaacatactccctccagtacagtaaaggtagtcgtttaggacatgattgtgcataccaaggagtgattaattatcatagagttttccctgtt

SEQ ID NO: 206921 - DNA, 1103 bp, Zea Mays
tccaaacgccccgtaagtggtatgggtttgggtaagacaaccgatcccagtgcggccgagcacggagtacgtcagaaaccggcaggaagcaggaaacgggaggcaggcatgtcgtcgtccaaggacgctcctctcagccctcgatcccagctggcgctcagttgcttcgaggagctcctcgactgcgccgtggcggacgtcgcgtcggagtgccaccgcatcgcgcgcctcggcctggaccgcagcgtcgacggcgaggaggaggagctccgcgtctgggcggcacgtgcggcggccgccgccgctggaggtgaccaccaccaccctggaggaggcggggccgccgaggagggtgggagcaagggcggggtcgacgtgttcggccagacgcaccccgccatcgccgccgatgtcgtcgagtgtatgaactgcggtcgccctgtcgtcgccggccgcttcgccccgcacctcgagaagtgcatgggcaagggacggagagcccgaacgaaaattacaaggagcagtacggctgggcgcatgagaagcagcaatggcagcgttgccactccctactctccatactccaccacggcgaaccctaatagggcaagcatccctaatggtgtgactgacggcggcggcggcgcaaggggagattacagcaaccatgcgccctaggtgtgctgactgatcctctactcaagtttggttgtgccgtagcgggtgctggctgactcagcctgtattcatgtttccttgccgtggatggcatgaaacacgttttgttgataagtatggtctatgtatgaacccccgaaaaccactctggtgaccagtgaaggtgaggagccatgggcgaaggtttgaatcatgtctttgaaccccgtcgagaagatcacctgttggtcagtggatttaaccttttgtacagcttgttggttcgatcagtatccagtagtttgttgcagtacattttgtagagcactctgtatgactcgtctatggcgcatctggatttgcgagaagaaaagtgaggcagactgagcaagctgctgaactgatccgtgccaccatcgcccaccattgcagggaatctggatggg

SEQ ID NO: 206922 - DNA, 1700 bp, Zea Mays
accttcattgtgtaggctccatgtcttccctgaaaattattggtgaacttatcttgttggcagttcagttaacctgcatgttttatttatataaaagaaaaatgggagacatttgctaattattgatcccaactcactggagttcttcttgtgactacattttgtacttctgttctgtatcttatataagttccaagcactgcactcataggtctaaatctgttcaatatataattatgcagagttttgaagctttgaaccccagggcggttactgttgtcgtagaccccatatagagtgtgaaggggaaagtagttattgatgtattccgcctaattaatcctcagaccatgatgcttggccaggagccacggcagacgacatcaaaggtcgggcacctaaataactcatcgattcaggctcttatccatgggctgaacagacactactaatttgcaatcaattaccgcaaaaatgagctcgagaagaaaatgttgttgaacttgcacaaaaagaaatggatagatgggctaattttgaagaggtttgacactcactcaaaaaaccaacgagcaaactgtccaggttccatccgtcttgtatgggaatgaccattgagcaagccaaaaaattacatgtgctcggattgtgctaaagaaaatggtgcaaagagaccctcaaactcatacccagtttcaccaaactctgattctaagatatggacctcggtggttttctccacgttaggaaagctggaagagtcttttctactcagttttatgataacagtggtgttatggtcaaacaaagtcttgcgtttcctattctttaccagcccgagccacacaaatggtcgagtaactttgcatacctactgttcagtaagtttgcactgggacaagccccagccgcacaaatggcggagaccagcccagcggcgcggcaccagaacacctagaagaagaggttgaagtggaagtgggagaggaatcagttcctcaatcagaaacttctccagctgcagttcctcctgaaggtactctagtaggttacccggttaattgtgatattcttgtggaagagcctgacactcctcctcatcaaggcaagccccggtgcatttaaccctttccttgtgttttaaaaacttttatcacttatatgctgcattaggtggtaggagttgtgtgaataaacatttgatgcattcccattccttggaatattgattatcatccttgatacctgtttttcaaagctagaaatgcttagtatgcttatagattaggaacaaaatgtttttgatttatgaatcatgtttttacaaaagaaaaaggctgggaatgatgaaggcgtcaaaggccttgatgaattcatcattccagcggattacctctgacaagtacaagtttctgagaaatagtttaaaatgagaccagacgttgagcaggaaaggtcgtccgtctatgtcgtttaaggaccgtaacgattattggcctacatgatctaggaccttttaactggccacatgcctcatcatgggtaagcttagcttcggctggaccaataccagaaaggccggcccgcactaggagtggagagatggcgagagtatcgtgtacccacctggcaagaggttggacggtggggtactgagctctcaggtggcggggacccgttctggtcttgagaaacccggg

SEQ ID NO: 206923 - DNA, 1178 bp, Zea Mays
ttggctgccctgtttgctttggaacgtgcaacgtttctgggaatgtcaagaattattttggagactgatgctatggagttgaagaagggcctgacaacgacgaccctagaccggagtgtagatggcagcttgttcagacaaatcagagaattcatgaatgtgtcatttgattgttgggaggttcaacattgtccaaggacgtgcaacaaagtggcagattgccttgcgaagtatggggcgagcgtggtttgctctggttcgaatgttttcatgagccaagtccccgcctttgtttccaatttagtctccggcgatctgcctggagatgttgtttaacagtctctatgagtctgtgtttcaaaaaaaaagtcttcttcgttcttccaatctccttcctattcctctgttagggtagccagtagctaacagctaggtcctgctctgctggtacgctgtcatcctggatctaccgcgcgtcatcctccttgcctaggcgtagcgctcgggcggaaccgagctgcggccttaagcatcgacaccgtcctcgacttccccaccagtacctacagtgaaggccgaccagattgaagtgaagcgccaacgccgacctgtagatctcgcctccaccgccgctagtgccctccatcccctgtccgcgagtctcggcaaccaaatctgagttttgaagctttgaaccccagggcggttactgttgtcgtagaccccatatagagtgtgaaggggaaagtagttattgatgtattccgcctaattaatcctcagaccatgatgcttggccaggagccacggcagacgacatcaaaggtcgggcacctaaataactcatcgattcaggctcttatccatgggctgaacagacactactaatttgcaatcaattaccgcaaaaatgagctcgagaagaaaatgttgttgaacttgcacaaaaagaaatggatagatgggctaattttgaagaggtttgacactcactcaaaaaaccaacgagcaaactgtccaggttccatccgtcttgtatgggaatgaccattgagcaagccaaaaaattacatgtgctcggattgtgctaaagaaaatggtgcaaagagaccctcaaactcatacccagtttcaccaaactctgattctaagggtttgtggtcattgttgtggctact

SEQ ID NO: 206924 - DNA, 1247 bp, Zea Mays
ttggctgccctgtttgctttggaacgtgcaacgtttctgggaatgtcaagaattattttggagactgatgctatggagttgaagaagggcctgacaacgacgaccctagaccggagtgtagatggcagcttgttcagacaaatcagagaattcatgaatgtgtcatttgattgttgggaggttcaacattgtccaaggacgtgcaacaaagtggcagattgccttgcgaagtatggggcgagcgtggtttgctctggttcgaatgttttcatgagccaagtccccgcctttgtttccaatttagtctccggcgatctgcctggagatgttgtttaacagtctctatgagtctgtgtttcaaaaaaaaagtcttcttcgttcttccaatctccttcctattcctctgttagggtagccagtagctaacagctaggtcctgctctgctggtacgctgtcatcctggatctaccgcgcgtcatcctccttgcctaggcgtagcgctcgggcggaaccgagctgcggccttaagcatcgacaccgtcctcgacttccccaccagtacctacagtgaaggccgaccagattgaagtgaagcgccaacgccgacctgtagatctcgcctccaccgccgctagtgccctccatcccctgtccgcgagtctcggcaaccaaatctgagttttgaagctttgaaccccagggcggttactgttgtcgtagaccccatatagagtgtgaaggggaaagtagttattgatgtattccgcctaattaatcctcagaccatgatgcttggccaggagccacggcagacgacatcaaaggtcgggcacctaaataactcatcgattcaggctcttatccatgggctgaacagacactactaatttgcaatcaattaccgcaaaaatgagctcgagaagaaaatgttgttgaacttgcacaaaaagaaatggatagatgggctaattttgaagaggtttgacactcactcaaaaaaccaacgagcaaactgtccaggttccatccgtcttgtatgggaatgaccattgagcaagccaaaaaattacatgtgctcggattgtgctaaagaaaatggtgcaaagagaccctcaaactcatacccagtttcaccaaactctgattctaagaattggtagttttgcctgcatttccactcccaaattatatcatgagcagtgcttagttttgggcggtcgattacaagtgctctttatggaagcat

SEQ ID NO: 206925 - DNA, 949 bp, Zea Mays
cgggtcgctggatgagtgggcgcgagtgaggagtaagggatcatgttccaggacatcacgacactgctgctcgaccccaaggcgttccgtgacaccatcgacctcttcgttgagcggtacaaggaccaagggatcaccgtagttgctggtgtggaagctagagggttcatttttggtcctcctatcgctctagccatcggtgctaaatttgtacctttgaggaagccgaagaagttgccaggcgaggtgatctccgaagaatattctctggaatacggaactgacaagatagagatgcatgttggagctgtacaggccaacgatcgggctcttgtagtcgatgatcttattgccaccggtggaacactctgtgcagctgtcaaacttattgaacgtgttggagcaaaggttgttgagtgtgcttgcgtcattgaattgccagaactgaagggccgagacaaacttggggacaggccagtttttgttcttgtggaagcagatgcttgagcggaacttgggacttctcttctcagagagttagagttggtgctgttgatgctacctctctgtcaacaacaaagtttcccatgttggctatattcttgctgacacgtaataaagtttcattccaaattgtgatcccctgaatgatttgtcaatgtagacatgattgctggtccttgtatactgtggcttattattcacatcaattaaggataatcctgattggagcttatcggtgcaactattggtgttatgtggggccaccactactagcgcagatcgtgcggccagaagcaacaaacgccggcagcaaaggcttaggcgctagcatgaagataagcatggctagaaagtaggagataagtattagagttgtttagataagatgataagtggcatgagtttgttagggaaccgggctatacaatgctggcaggcgattgaa

SEQ ID NO: 206926 - DNA, 1373 bp, Zea Mays
ctcttccacgtgctgttcctcgtctttggcggagacgctcaacatgttcttggggatgggccgaccggcgtggagggaggcgcgcgccacgctacaaaaaatcctctcagccgacgagccagtcttgcgtgacaacgaagccctgaggaataaatgtcttattccaatgagtgatatcgagatggttctaccaatcacggttggaggttacacagatttcttttgttctgtgcaccatgcaaggaactgcggattcatcttccgagggccgcagactccagttaatccaaattggttttatcttccaataggatacaatggacgagcatcatctatagttgtgtctggaaccgatgtaattaggcccagaggacaaggacatccaacaggaaactccgctccttattttggtccctctcagaagcttgattttgagcttgagatggctgccattgttggtccaggaaatgaattaggcaaaccaattgatatcaatgatgctgaagaacatatttttggcctaactttgatgaatgattggagcgccagagatattcaggcttgggagactatacctcttggacctttccttgggaaaagcttcagtaccaccatatcaccatggattgttactcttgatgctttgaagcctttcatgtgtgaggctcctaagcaggtcttgattaagcctaaagatcaaaatgttgcactaattgtcacaaaaactaatttcaagcatctgtattggacggtgacgcagcagctaacacaccacactatcaatggatgcaacatgaggccgggggatatatttgcaactggcacactcagtggacctgaaccggactccctcggatgtctattggagctaacatggaacgggcagaaggagataccagtgggcaatttgacccgcaagtttctagaagatggagatgaggtcatcttgacaggatgctgcaagggtgaaggctacaacattggttttggaacttgcactgggaaggtcctgccggcacttccctgagccaacacgtctttacatcagttctcgagtccaaacactcaacaatctagcaagatgctatgtaactgaacaacgggggttgttttcgcataggaaactgatactctgttgtggaataaaatcggttcaccattttatacacattttctctctcaagaattgtgttattaaacttgtaaaaatgcaatgtctctcatctcttcatccatcgcccagtgagatttgaattctgtgagtatctgtgtatatgggcctggccgcccactagggttccatatactcttgtactcctgcagctagggtattgtattctatactgcaacatggtatcaaagctttatgtttc

SEQ ID NO: 206927 - DNA, 1349 bp, Zea Mays
cactacggcgcccgcaaccaaaccatcggagacgctcaacatgttcttggggatgggccgaccggcgtggagggaggcgcgcgccacgctacaaaaaatcctctcagccgacgagccagtcttgcgtgacaacgaagccctgaggaataaatgtcttattccaatgagtgatatcgagatggttctaccaatcacggttggaggttacacagatttcttttgttctgtgcaccatgcaaggaactgcggattcatcttccgagggccgcagactccagttaatccaaattggttttatcttccaataggatacaatggacgagcatcatctatagttgtgtctggaaccgatgtaattaggcccagaggacaaggacatccaacaggaaactccgctccttattttggtccctctcagaagcttgattttgagcttgagatggctgccattgttggtccaggaaatgaattaggcaaaccaattgatatcaatgatgctgaagaacatatttttggcctaactttgatgaatgattggagcgccagagatattcaggcttgggagactatacctcttggacctttccttgggaaaagcttcagtaccaccatatcaccatggattgttactcttgatgctttgaagcctttcatgtgtgaggctcctaagcaggaacccgaacctttaccatacctagctgaaaagaatcacataaactatgacattcctcttgaacagctaacacaccacactatcaatggatgcaacatgaggccgggggatatatttgcaactggcacactcagtggacctgaaccggactccctcggatgtctattggagctaacatggaacgggcagaaggagataccagtgggcaatttgacccgcaagtttctagaagatggagatgaggtcatcttgacaggatgctgcaagggtgaaggctacaacattggttttggaacttgcactgggaaggtcctgccggcacttccctgagccaacacgtctttacatcagttctcgagtccaaacactcaacaatctagcaagatgctatgtaactgaacaacgggggttgttttcgcataggaaactgatactctgttgtggaataaaatcggttcaccattttatacacattttctctctcaagaattgtgttattaaacttgtaaaaatgcaatgtctctcatctcttcatccatcgcccagtgagatttgaattctgtgagtatctgtgtatatgggcctggccgcccactagggttccatatactcttgtactcctgcagctagggtattgtattctatactgcaacatggtatcaaagctttatgtttc

SEQ ID NO: 206928 - DNA, 1615 bp, Zea Mays
tcctttaactcctacacgttagagattatgaatgccagccaacccaatgggcttgtcgttcctgatgcaacggtgcatcctgttaattcaacatccgatgttattgagttaatgagaataggacatgcaaacagagcagtgggttcgacaatgttgaatgaaagaagcagcagatctcacagtattgttaccatacacattcgaggtgtagatttgaaaacaggagctactctgtgtggtgcactacatcttgttgatcttgctgggagtgagagagtggaccgatcttctgttacaggcaatagacttaaagaagcacaacacataaacaaatctttgtccgctcttggagacgtcatattttctctaccgcagaagaatgctcatgtaccctaccggaacagcaaacttacacaagtcctacagagttctttggatcaacccagatgtctcatcttattcggagactttaagtactttgaagtttgctgaaagggtttctggagtggagctaggtgcctcaaaggcgaataaagaaggcaaagatattagagaatttatggaacagctctcactgctcaaacataaaatggcaaagaaagatgacgaaattaacagattacaacaactcaagacgcaaactccaagggtcaggactgcaaaacgtgcagattccccattgaaacattcgtcgtcgtccccaggcatatctaatttaggaagcaaaatccaacatagaaggacagtatcaagtggaaaggcaatgagcattgccagtagagctgggtctgataccttctctgacaccagtgacaggcactctgaatctggttctatgcagtctgttgatgatatcctaccacgtagggggattatgggtcttccgaagctctctattggtgaaatgggtcagaattctgctgaccctgagcttgtttgctttgactatgctgattcagaagagagattaagtgatatatcagatagtggtctttccatgggtacagagacggatgtttcagtaagcagtatagttgagttgacacgttttcaggagcaggaaaacatacctagcactctgaaagaacaagagagtgcacgaaaaattccaaatgatcagttgtccaaggtggccacccgagttcagaagacaacagtacccaaactagctcaaacttccttgtggcctaaactaagagatcctccagcccttagatccccagggagaatcacaacacaaacaatatctgtaccaaggacgtccatgacttcgaagagatggacataagtcaagtttgatcaacatgttctaacactagtttatggttttgtacagcacaatcgaaaagtaattcattccaattgatgaactttgtacagcacttgattctttcaggaaaaaatggcagttagttttctatatcttttttgaagatagattatatgatgttaactttctttgtgcatacacgatatccgagaagtttgctgattgttggataaaagtggtacttctcttgatattgttaatagaatcaacaattcttgcttaatcgttacaaaccaaaacaataaagaaaaattctacttgatctgttaataattaagatcgttg

SEQ ID NO: 206929 - DNA, 1908 bp, Zea Mays
tgatggaccaataatgtcaaccatttattatcaatatttatgacttttccatgtattgatgggtaagttaaagaagtataagctctaaaacaacctacatttggaatccaatggagtagttaagttgattcagtttaagtgaacatatatgtagaaactcaaaaattagttggacttccttttatcatccacgatgcactcttagttatctgtacattttataatagtatatccactcaaatcaatgacatatttcaaatggattggagtttattaagaacatcctctttttcctttaactcctacacgttagagattatgaatgccagccaacccaatgggcttgtcgttcctgatgcaacggtgcatcctgttaattcaacatccgatgttattgagttaatgagaataggacatgcaaacagagcagtgggttcgacaatgttgaatgaaagaagcagcagatctcacagtattgttaccatacacattcgaggtgtagatttgaaaacaggagctactctgtgtggtgcactacatcttgttgatcttgctgggagtgagagagtggaccgatcttctgttacaggcaatagacttaaagaagcacaacacataaacaaatctttgtccgctcttggagacgtcatattttctctaccgcagaagaatgctcatgtaccctaccggaacagcaaacttacacaagtcctacagagttctttgggtgcttaccattgctgattgttctatatactatttacatgttatcagttatctaatatttttcatctgcaggcggccatgcaaaaaccttgatgtttgtgcagatcaacccagatgtctcatcttattcggagactttaagtactttgaagtttgctgaaagggtttctggagtggagctaggtgcctcaaaggcgaataaagaaggcaaagatattagagaatttatggaacagctctcactgctcaaacataaaatggcaaagaaagatgacgaaattaacagattacaacaactcaagacgcaaactccaagggtcaggactgcaaaacgtgcagattccccattgaaacattcgtcgtcgtccccaggcatatctaatttaggaagcaaaatccaacatagaaggacagtatcaagtggaaaggcaatgagcattgccagtagagctgggtctgataccttctctgacaccagtgacaggcactctgaatctggttctatgcagtctgttgatgatatcctaccacgtagggggattatgggtcttccgaagctctctattggtgaaatgggtcagaattctgctgaccctgagcttgtttgctttgactatgctgattcagaagagagattaagtgatatatcagatagtggtctttccatgggtacagagacggatgtttcagtaagcagtatagttgagttgacacgttttcaggagcaggaaaacatacctagcactctgaaagaacaagagagtgcacgaaaaattccaaatgatcagttggagaatcacaacacaaacaatatctgtaccaaggacgtccatgacttcgaagagatggacataagtcaagtttgatcaacatgttctaacactagtttatggttttgtacagcacaatcgaaaagtaattcattccaattgatgaactttgtacagcacttgattctttcaggaaaaaatggcagttagttttctatatcttttttgaagatagattatatgatgttaactttctttgtgcatacacgatatccgagaagtttgctgattgttggataaaagtggtacttctcttgatattgttaatagaatcaacaattcttgcttaatcgttacaaaccaaaacaataaagaaaaattctacttgatctgttaataattaagatcgttg

SEQ ID NO: 206930 - DNA, 2173 bp, Zea Mays
cacaaacaatgtcgacactttctacaagtggtttatgataaattctgatgaacctagtttgttacatgtattaattacttttctgatgagcctagttggatatgaagcattccctctaattctcaatttaggttgtttaggacattgacaaggtcttcaatatgactttgacttgcaatttagtaaaatatatactattttgatggaaaagcttatattatgaaagtatttttgatgatggaccaataatgtcaaccatttattatcaatatttatgacttttccatgtattgatgggtaagttaaagaagtataagctctaaaacaacctacatttggaatccaatggagtagttaagttgattcagtttaagtgaacatatatgtagaaactcaaaaattagttggacttccttttatcatccacgatgcactcttagttatctgtacattttataatagtatatccactcaaatcaatgacatatttcaaatggattggagtttattaagaacatcctctttttcctttaactcctacacgttagagattatgaatgccagccaacccaatgggcttgtcgttcctgatgcaacggtgcatcctgttaattcaacatccgatgttattgagttaatgagaataggacatgcaaacagagcagtgggttcgacaatgttgaatgaaagaagcagcagatctcacagtattgttaccatacacattcgaggtgtagatttgaaaacaggagctactctgtgtggtgcactacatcttgttgatcttgctgggagtgagagagtggaccgatcttctgttacaggcaatagacttaaagaagcacaacacataaacaaatctttgtccgctcttggagacgtcatattttctctaccgcagaagaatgctcatgtaccctaccggaacagcaaacttacacaagtcctacagagttctttgggcggccatgcaaaaaccttgatgtttgtgcagatcaacccagatgtctcatcttattcggagactttaagtactttgaagtttgctgaaagggtttctggagtggagctaggtgcctcaaaggcgaataaagaaggcaaagatattagagaatttatggaacagctctcactgctcaaacataaaatggcaaagaaagatgacgaaattaacagattacaacaactcaagacgcaaactccaagggtcaggactgcaaaacgtgcagattccccattgaaacattcgtcgtcgtccccaggcatatctaatttaggaagcaaaatccaacatagaaggacagtatcaagtggaaaggcaatgagcattgccagtagagctgggtctgataccttctctgacaccagtgacaggcactctgaatctggttctatgcagtctgttgatgatatcctaccacgtagggggattatgggtcttccgaagctctctattggtgaaatgggtcagaattctgctgaccctgagcttgtttgctttgactatgctgattcagaagagagattaagtgatatatcagatagtggtctttccatgggtacagagacggatgtttcagtaagcagtatagttgagttgacacgttttcaggagcaggaaaacatacctagcactctgaaagaacaagagagtgcacgaaaaattccaaatgatcagttgtccaaggtggccacccgagttcagaagacaacagtacccaaactagctcaaacttccttgtggcctaaactaagagatcctccagcccttagatccccagggagaatcacaacacaaacaatatctgtaccaaggacgtccatgacttcgaagagatggacataagtcaagtttgatcaacatgttctaacactagtttatggttttgtacagcacaatcgaaaagtaattcattccaattgatgaactttgtacagcacttgattctttcaggaaaaaatggcagttagttttctatatcttttttgaagatagattatatgatgttaactttctttgtgcatacacgatatccgagaagtttgctgattgttggataaaagtggtacttctcttgatattgttaatagaatcaacaattcttgcttaatcgttacaaaccaaaacaataaagaaaaattctacttgatctgttaataattaagatcgttg

SEQ ID NO: 206931 - DNA, 566 bp, Zea Mays
cccgcgagaagatcaaaccctctgattgataggggtgaactcaccatccgcttcaacatgtcgggagacaccgcggcggcggtgcaggcaggaggagacgcgcagcaggccgtcggcaggaaccggattcaggtgtccagctccaagaaacctctattcttctacgtcaatctcgccaagaggtacatgcagcatcacgacgacgacgtcgagctctccgcgctcgggctggccatatcgacggctgtaaccgttgcagagatcctgaagaacaatggtcttgctgtcgagaagaattgagatagtgctgggaaagactaacaagttcgatgaactgatggccgccaatgatggagatggaaccgcaggggatggcgtgggaaagaatgacaagttcgatgaattgatggctgccaatgatggagatggaaccgcagggggtggcaacaaacagagatttgttatagattttcctaccatttttatctcttctcctctccttgatagatctagttaaaatatgtttaggtgtttcgtttcaattgttgagtgcggcgttcgtagaa

SEQ ID NO: 206932 - DNA, 2393 bp, Zea Mays
tccgacggctataaataaccgccccccttcctccgcagctctgctctgctcccccgcgtctttccctctttttccaagcggtcaaagccaaatcagtcgcgagcggcggcggtaacgagaacgagacgcgcgcgctagctgaatcaggagcagggcccagggaggagagtggagagccgccggcgagcagcaatgccttactgcgaggtgggcaggtacgcggacggcgacaagtgggagggcgtccgcctcttctaccgccgctacggcagcggcgccaccaaggtgctcctcgtcatcggattggcggggacgcacgactcgtggggcccgcagataaaggggctgaccgggtcgctggagccctccgacgacgaggccctgcggccggacgaggaggccggcgtcggcgcggcggaggccgcgccggcggaagcggacgacggcatcgaggtctgctgcttcgacaaccgcggtgtcggccgcagctccgtgctccccaacaaatcctactactcgacggcaatcatggccacggatgccttggccttgatcgatcatttggggtggaagaaggctcacgtcttcggccactccatgggtgccatgattgcttgcaagctagctgccatggcacctcacaggctatgttcgctggcattgcttaatgtcaccggaggtggctttcagtgcttcccaaaggtagacgcgcagatgctatctcttgcattccgtttcttaagggcaaaaactccagaggaaagagcccttgtggacctggaaacacattatacgaaggaataccttgaggagactgtcgggtcatgtactagaagaatggtcctctatcaagaatatgtgaagggcatatcgtcaacagggatgcaatccaattgtggttttgaagggcaagttaatgcatgctggactcacaaaatgactactaaggaactagatacaatacggtacgatatcattgcacaattgtgccatgcaaaacgtctagcagaaaggcttcttcctgttgcaagaatggtagtgcctcatggtgcacatctagtgagccatgaaagaccagacgaggtgaacaatgcacttatggatttgataaaggccaccaaatctgagataaaacctgaagagtggtcagcccagcccgagaacacgtcggaaaccggggcgctcatttctgcgagacccatcaccgtcatggtgcgaacagatgcaggcgtagacgctaccgcagcggtctataacttgcttgggaagctgcaactgagcttcctttatctcataggcatgatactcatggggtttgaactcatgaggaacattgtaagggtgatgaagccagtaagggttgcagcaattgagtcgtaagtcataagaaccaaatacatgtacactgttcttgagaccttgtggtagtcgagatgggagatgatgattttagagtagcatctgctaacacatgtgaaactcggcctgctcctagtagcagaataatacgaaacactgagaaaacagtgcgcgcctggacagaaatgtctatggcaaggttgcccgttggcgtatgtacctataagagtatctgtaccataccgagatttggaatcgaagctttgctgcttatttcgtgtcgcgtcgctgggcatcttctttcctacatggcgctttacaacgctgcaaggtgacaaatagtagcgtaaaactgaagagagaacgaaagtggcagccacaactgggtttgttttgggtgtgacgtgtgcggtacctaataaaagtttagccacgtcaattctcttgccgtgctttcgggggaaaaaagaactgggtttcactggtgcaaatggcacgaaatatttttcctggtctgaatttgtttgtagtcgatcgtatctgagtgtaaattcgtttatttgagtttagatcggttaggataggagcctgaatatttaacatttgataccgtacctgaacttagatatttgtatttatatattcatgtatatggatagttggatactgatacccatcttatatatttacatttatggatatctcaaattacatattttaatatcaacatcctatttagcataatagaaatcgtgtgccagcaagagatatggaattcacatgatttttacttaagacgtatgtaatagaaatcgtgtgccatggagataccaaattcattggttttacttccaattcatgaaatttactgggtttttagtctcaactcacaagtaaactcgatattgaaacaaatgtaacacttacaatccgcctgcacggctggatttataaaagaaatgtcatatcagttccaaagtacgcgtaatatttcagtaattcaggattccatctgaggacaagagcacggacac

SEQ ID NO: 206933 - DNA, 2212 bp, Zea Mays
tccgacggctataaataaccgccccccttcctccgcagctctgctctgctcccccgcgtctttccctctttttccaagcggtcaaagccaaatcagtcgcgagcggcggcggtaacgagaacgagacgcgcgcgctagctgaatcaggagcagggcccagggaggagagtggagagccgccggcgagcagcaatgccttactgcgaggtgggcaggtacgcggacggcgacaagtgggagggcgtccgcctcttctaccgccgctacggcagcggcgccaccaaggtgctcctcgtcatcggacggcaatcatggccacggatgccttggccttgatcgatcatttggggtggaagaaggctcacgtcttcggccactccatgggtgccatgattgcttgcaagctagctgccatggcacctcacaggctatgttcgctggcattgcttaatgtcaccggaggtggctttcagtgcttcccaaaggtagacgcgcagatgctatctcttgcattccgtttcttaagggcaaaaactccagaggaaagagcccttgtggacctggaaacacattatacgaaggaataccttgaggagactgtcgggtcatgtactagaagaatggtcctctatcaagaatatgtgaagggcatatcgtcaacagggatgcaatccaattgtggttttgaagggcaagttaatgcatgctggactcacaaaatgactactaaggaactagatacaatacggtctgccggttttctagtttcagttattcatggaaggtacgatatcattgcacaattgtgccatgcaaaacgtctagcagaaaggcttcttcctgttgcaagaatggtagtgcctcatggtgcacatctagtgagccatgaaagaccagacgaggtgaacaatgcacttatggatttgataaaggccaccaaatctgagataaaacctgaagagtggtcagcccagcccgagaacacgtcggaaaccggggcgctcatttctgcgagacccatcaccgtcatggtgcgaacagatgcaggcgtagacgctaccgcagcggtctataacttgcttgggaagctgcaactgagcttcctttatctcataggcatgatactcatggggtttgaactcatgaggaacattgtaagggtgatgaagccagtaagggttgcagcaattgagtcgtaagtcataagaaccaaatacatgtacactgttcttgagaccttgtggtagtcgagatgggagatgatgattttagagtagcatctgctaacacatgtgaaactcggcctgctcctagtagcagaataatacgaaacactgagaaaacagtgcgcgcctggacagaaatgtctatggcaaggttgcccgttggcgtatgtacctataagagtatctgtaccataccgagatttggaatcgaagctttgctgcttatttcgtgtcgcgtcgctgggcatcttctttcctacatggcgctttacaacgctgcaaggtgacaaatagtagcgtaaaactgaagagagaacgaaagtggcagccacaactgggtttgttttgggtgtgacgtgtgcggtacctaataaaagtttagccacgtcaattctcttgccgtgctttcgggggaaaaaagaactgggtttcactggtgcaaatggcacgaaatatttttcctggtctgaatttgtttgtagtcgatcgtatctgagtgtaaattcgtttatttgagtttagatcggttaggataggagcctgaatatttaacatttgataccgtacctgaacttagatatttgtatttatatattcatgtatatggatagttggatactgatacccatcttatatatttacatttatggatatctcaaattacatattttaatatcaacatcctatttagcataatagaaatcgtgtgccagcaagagatatggaattcacatgatttttacttaagacgtatgtaatagaaatcgtgtgccatggagataccaaattcattggttttacttccaattcatgaaatttactgggtttttagtctcaactcacaagtaaactcgatattgaaacaaatgtaacacttacaatccgcctgcacggctggatttataaaagaaatgtcatatcagttccaaagtacgcgtaatatttcagtaattcaggattccatctgaggacaagagcacggacac

SEQ ID NO: 206934 - DNA, 712 bp, Zea Mays
atggggaggaagaagcacacgcggagtggctgtcgccctggccccactggtcagacgactaggagcggcgcacgcgattgcgaagctgccacggtgggcccactcgtctgtcagcgaccagacatagatggtgctctcaaagacatcgaaggtcttcctttaccgtttcgtcatctgcaatgtgcttatacttgtagcttcatattacatcagttaccacacatgttgccatctgaaaaggcatttttagttgttgtatctgctcttggcatctacaacaaagacgagatagtagtttatgatggaaaggggttgttcagtgatgctcgtgtttggtggatcccacactcagatggacagccgcaaagaaaaggaagagagtggctcttcactcccatcggattgacaaaaaaaaaaagaagttcgaaaactgagaggaaggataaggacgcaaagaaaagaagtaaaaagaggagaaagcataaaagttcatcaaagtcaagttccagctcatcttcagaatcttcaagcagcgacgatgaggataggggttcaaggaagtccagatcacagtcgagatcaaagagaacaaggaaggaaaagaagagccagtcaaggtccaagcacagaggcagtgaaagcgaggaggaaggcccgctgttaagagggtctggtcaagttgtgtggcttccaaaaactttgtaagcaactg

SEQ ID NO: 206935 - DNA, 5082 bp, Zea Mays
ctcgggggagtgctgagctcgggggagcggcggtgcagagctcgggggagcggcgacgctgagactcgggggagcgccgagcttgggggagcaggagcaacgatgctgtgatgtggacgagcagcgatgctgtgacagacaggggcggcgacagtgagatgggagcaaccctaaccggaggatatatgggctgcctgcctggtgggctgggccatctcttctaccccttccttctttttttctttctccttttttctttttcttcctcatatatgttgttgttctgtcgtttctttaattggtaaggtgtcgccttgctcgcctaagcgcctaggcgtcgcctaggcgtccaggcggtggtccaacgccttgtctcgcgttaccgccttaagaactatggtagagacctctttgctgacaattgaattgaatgtttgcaaatgccattcaagttactaacacataccgataccgtaatgtgtttcacctttacaagcaaaataagcattcactttttcagacaattttggaggaagatgggaacttagcataattttattttggagggagaaaataactaaacaagatctcttatggcgctcatctgtgccaacaaaataaagtggatttcacatagaacattttcacgcaaatcagaaatgggtatttaaaaagtgaacataaatgacaaaagtaatcaaactgagctgaaagtgttctagcattaacgtatttgtcttcatgtacagcgagctactcaacttctttttataattaagagagctcctctctccatttccaaattgtaagtcatttctgttttgtcctaagtcaaactttgattaagtctatagaaaaatccacaaatatttacattatcaaacgaattaattacatgcaagaaatatattttgacactgaataaatttggcagtgtagttgtagatgttaattgtcaggacctgacaggcccaagggggctgcggccaggacctgtcagggcctaagggggctgcggcaaggagcaacatcaaggagcacaggtcaaaggataagaagattagttgagattatttagaagattagttgagattatctataaaggatatcagttagtagtttgttgagagttttaaggagacaaggatctctagcaagataggggcggtcagtcggcctatttatgtaatcaatggatgaaaaataaagtagacaagaattagaagggagaaaccctcctcttgctcggccgtgggcagaggcccccggacggcattcctgcacatcgacctcattctgcaatcccctcatctacgtgtgaacagtaccacaccgtctccgccagcagctccaatcccccaccgatctagcaactataacattaatacattttcctataaacttggtcaatgttagacaaatctatgtcatatcgaatgtttgaatgataattatgagtattaaatatatttcaactataaaactaattatacagatattcagacatttgatgtgacatgaactaaactttagtcaagggaaccaaacacaaagattaaagtcgaatctgcataagtgcatgagatttagaatactggatctaacgaatagcagcaagtgaaaaggccaccgaaatgtaatccccggcctacaagtccctagcaaacaagccgtaccttcccagacctaccctcacggagtcaaccagactaagccaaggcagaccgaaatcaagggacgctgcgccccaagggcgcgcgcgcacggcgcacatcttgtagggtttgcggaggggagagaaggttgcgtaccgaatccagcgatgaggcaggaggccgcgactacgggctccttaacgacaaagatcttgagcttctccatcaccgccatggctgccgcctctgcttccactactccgcttcgccttcgcgtaaccctcgcccgctgccgtcgctggagacgagagaggccagagggatacaagccagtgctctcctccgatctgtggacgtgggcccgtgtcttgagcggagagacttcgacgcccagcccgtctacgaccgtggtccagtgggccacgatccattttgtttgttgggctgaggcccgtaccgataatcccattaaatgatatggtcacggcatattcagagctgcagactggaatattcctcgcgcgcgcgcgaataatctacccggacgagcgaatctactgtcggtcgcagcgccgttttctcgctctcgcgctcgccttacctgggatgggatggcaccgcacgcacacgaccatccttctctcctctcttcacctaccgattctgcgcgcatagaagaggcactccttcatcgtcagctgcctttcgcatgtcggcatgcatcttgcccgacaccacgctggcccgtggggtagtcgccgcacgccgagcaccggcaggctgcgcagccgtcgaccatgattttgccaagcgttgtaaagcgccatgtaggaaagaagatgcccagcgacgcgacacgaaataagcagcaaagcttcgattccaaatctcggccgagtttcacatgtgttagcagatgctactctaaaatcatcatctcccatctcgactaccacaaggtctcaagaacagtgtacatgtatttggttctgcagaatcagaggaagttcagtaagttgcaaagccacaagacagataatttgatccgcaggcactgcaagggaaagaacagaacaggatggatatccttttaccttatgacttacgactcaattgctgcaacccttactggcttcatcacccttacaatgttcctcatgagttcaaaccccatgagtatcatgcctatgagataaaggaagctcagttgcagcttcccaagcaagttatagaccgctgcggtagcgtctacgcctgcatctgttcgcaccatgacggtgatgggtctcgcagaaatgagcgccccggtttctgatgaggatgcagcgtaagagatttgccccggaacaatttgccttcaagagaaataggaggtgtttagtcttcttaagcttacccgacgtgttctcgggctgggctgaccactcttcagactgtgaacaagcgaggaagggaaacatcaaaaagttcaatgaggcgaaataaaaaaagagaaccttggagaagacagccatgccaataacacagcacccaggtaagagagctgcatattatgttcaagaagtctacatattagtagttgaaaaagcagttgaacccacaattgaaaaggtctacatgttcagtatgagtaattcagttcgcaactcaacatcactgcttggaaaattcctagaagcaaatatcatggttgcttagttagtacaaagtattaagctaagtgtgtgccaagtcacatgcctcaatacttgaggcaatttgatttcaaatacgacttttggtaatctattggatcctatagttctgtttttctctgctagaccagttatcttcgaaagtatcatgttatgtcttcacaaattaaacagaaatctttccaattcgttatcctcagtcgctttggtcaaatcttgccgaagtgttcccgggtaaatatgctaacttacctggaaagtatcttggtcttcccctccactttaggaagattaaaaggatctccttgcaaccgctactggaaaaaataaacaacagactggccggttggaaaggcagactactctctaaagcaggcagagaaacattggttaaatcagtattaacagcccaaccgatttatcatcttacggtttttccagttcaaaaatggctgctaaagaaaattgataagctaagaagaggctttctttggaaaggaaacaaccctgaagcttgcagtgggggtcactgtttgatcaactggtctacaacatgtcagccaaagaacaaggggggactgggcattctgaacctagaacgcttcgcaagggctttaagaatcagatggttgtggatgcgttggaagaacagggataaggcgtggattggtttgcaatcgccatgcgacaaaatagatgaagaacttttcaatgcatccacggtggtcaacgttggtaatgggagaacagcaagtttttggaaatctagttggatccatggtcaggcgcctaagaatatagcaccaattctgttcaagaaagcaaggaagaagaacatctcagtttttcatgctcttagagccaatagctggattcagctatgtctgccatgcatacgagaagacgaaataaaagattttgtaaccctatggcaggctatcagtagcatgcacgaacttaataacttggaggattccatctcttggagatggacgactgatggtcagtacagcgcaagcagcgcatataacattcagttctcaacaaacttctgcacaatgaaaatctgttccatttggaaagcaaaaacggaacccaagtgtcgcttcttcgcttggactcttttacacaacagagtgttgacagcagagaaccttcagaaaaggggatggcctcacaatccttcttgttgtctctgtaattcgacctttgaaacgacggttcatctctgcaaggactgccccttcagcagggaggtgtgggacagaatcttgtcttgggcgaatctttcgtcctttaaggggatctatggctctgattcgttgtatgactggtggagaaatttgagaagtaggtgcaacaagccttcgagaagatcctttgatggccttatcatttatttttggtggagcatttggttagagaggaacaatagaatctttcacagtcagcttagatcagcggagcaggtcgcgctagtggtcaaagagttagttggttgtttccatggcctggctggctagtaggtccgcttagtatatttgttcaggagttcgcttctagtcttgtaagtcgtcttggtttcttgtaatttcctgttagttctactccttctaatatattggagcggcaagtcttttgcctctccctttcaaaaaaaaatgtcttcacaaatttagttggatcatcaatgatgctttcagataactacaatactagacctagtaatggag

SEQ ID NO: 206936 - DNA, 3514 bp, Zea Mays
gttaattgtcaggacctgacaggcccaagggggctgcggccaggacctgtcagggcctaagggggctgcggcaaggagcaacatcaaggagcacaggtcaaaggataagaagattagttgagattatttagaagattagttgagattatctataaaggatatcagttagtagtttgttgagagttttaaggagacaaggatctctagcaagataggggcggtcagtcggcctatttatgtaatcaatggatgaaaaataaagtagacaagaattagaagggagaaaccctcctcttgctcggccgtgggcagaggcccccggacggcattcctgcacatcgacctcattctgcaatcccctcatctacgtgtgaacagtaccacaccgtctccgccagcagctccaatcccccaccgatctagcaactataacattaatacattttcctataaacttggtcaatgttagacaaatctatgtcatatcgaatgtttgaatgataattatgagtattaaatatatttcaactataaaactaattatacagatattcagacatttgatgtgacatgaactaaactttagtcaagggaaccaaacacaaagattaaagtcgaatctgcataagtgcatgagatttagaatactggatctaacgaatagcagcaagtgaaaaggccaccgaaatgtaatccccggcctacaagtccctagcaaacaagccgtaccttcccagacctaccctcacggagtcaaccagactaagccaaggcagaccgaaatcaagggacgctgcgccccaagggcgcgcgcgcacggcgcacatcttgtagggtttgcggaggggagagaaggttgcgtaccgaatccagcgatgaggcaggaggccgcgactacgggctccttaacgacaaagatcttgagcttctccatcaccgccatggctgccgcctctgcttccactactccgcttcgccttcgcgtaaccctcgcccgctgccgtcgctggagacgagagaggccagagggatacaagccagtgctctcctccgatctgtggacgtgggcccgtgtcttgagcggagagacttcgacgcccagcccgtctacgaccgtggtccagtgggccacgatccattttgtttgttgggctgaggcccgtaccgataatcccattaaatgatatggtcacggcatattcagagctgcagactggaatattcctcgcgcgcgcgcgaataatctacccggacgagcgaatctactgtcggtcgcagcgccgttttctcgctctcgcgctcgccttacctgggatgggatggcaccgcacgcacacgaccatccttctctcctctcttcacctaccgattctgcgcgcatagaagaggcactccttcatcgtcagctgcctttcgcatgtcggcatgcatcttgcccgacaccacgctggcccgtggggtagtcgccgcacgccgagcaccggcaggctgcgcagccgtcgaccatgattttgccaagactgtgaacaagcgaggaagggaaacatcaaaaagttcaatgaggcgaaataaaaaaagagaaccttggagaagacagccatgccaataacacagcacccaggtaagagagctgcatattatgttcaagaagtctacatattagtagttgaaaaagcagttgaacccacaattgaaaaggtctacatgttcagtatgagtaattcagttcgcaactcaacatcactgcttggaaaattcctagaagcaaatatcatggttgcttagttagtacaaagtattaagctaagtgtgtgccaagtcacatgcctcaatacttgaggcaatttgatttcaaatacgacttttggtaatctattggatcctatagttctgtttttctctgctagaccagttatcttcgaaagtatcatgttatgtcttcacaaattaaacagaaatctttccaattcgttatcctcagtcgctttggtcaaatcttgccgaagtgttcccgggtaaatatgctaacttacctggaaagtatcttggtcttcccctccactttaggaagattaaaaggatctccttgcaaccgctactggaaaaaataaacaacagactggccggttggaaaggcagactactctctaaagcaggcagagaaacattggttaaatcagtattaacagcccaaccgatttatcatcttacggtttttccagttcaaaaatggctgctaaagaaaattgataagctaagaagaggctttctttggaaaggaaacaaccctgaagcttgcagtgggggtcactgtttgatcaactggtctacaacatgtcagccaaagaacaaggggggactgggcattctgaacctagaacgcttcgcaagggctttaagaatcagatggttgtggatgcgttggaagaacagggataaggcgtggattggtttgcaatcgccatgcgacaaaatagatgaagaacttttcaatgcatccacggtggtcaacgttggtaatgggagaacagcaagtttttggaaatctagttggatccatggtcaggcgcctaagaatatagcaccaattctgttcaagaaagcaaggaagaagaacatctcagtttttcatgctcttagagccaatagctggattcagctatgtctgccatgcatacgagaagacgaaataaaagattttgtaaccctatggcaggctatcagtagcatgcacgaacttaataacttggaggattccatctcttggagatggacgactgatggtcagtacagcgcaagcagcgcatataacattcagttctcaacaaacttctgcacaatgaaaatctgttccatttggaaagcaaaaacggaacccaagtgtcgcttcttcgcttggactcttttacacaacagagtgttgacagcagagaaccttcagaaaaggggatggcctcacaatccttcttgttgtctctgtaattcgacctttgaaacgacggttcatctctgcaaggactgccccttcagcagggaggtgtgggacagaatcttgtcttgggcgaatctttcgtcctttaaggggatctatggctctgattcgttgtatgactggtggagaaatttgagaagtaggtgcaacaagccttcgagaagatcctttgatggccttatcatttatttttggtggagcatttggttagagaggaacaatagaatctttcacagtcagcttagatcagcggagcaggtcgcgctagtggtcaaagagttagttggttgtttccatggcctggctggctagtaggtccgcttagtatatttgttcaggagttcgcttctagtcttgtaagtcgtcttggtttcttgtaatttcctgttagttctactccttctaatatattggagcggcaagtcttttgcctctccctttcaaaaaaaaatgtcttcacaaatttagttggatcatcaatgatgctttcagataactacaatactagacctagtaatggag

SEQ ID NO: 206937 - DNA, 4111 bp, Zea Mays
ggcctaagggggctgcggcaaggagcaacatcaaggagcacaggtcaaaggataagaagattagttgagattatttagaagattagttgagattatctataaaggatatcagttagtagtttgttgagagttttaaggagacaaggatctctagcaagataggggcggtcagtcggcctatttatgtaatcaatggatgaaaaataaagtagacaagaattagaagggagaaaccctcctcttgctcggccgtgggcagaggcccccggacggcattcctgcacatcgacctcattctgcaatcccctcatctacgtgtgaacagtaccacaccgtctccgccagcagctccaatcccccaccgatctagcaactataacattaatacattttcctataaacttggtcaatgttagacaaatctatgtcatatcgaatgtttgaatgataattatgagtattaaatatatttcaactataaaactaattatacagatattcagacatttgatgtgacatgaactaaactttagtcaagggaaccaaacacaaagattaaagtcgaatctgcataagtgcatgagatttagaatactggatctaacgaatagcagcaagtgaaaaggccaccgaaatgtaatccccggcctacaagtccctagcaaacaagccgtaccttcccagacctaccctcacggagtcaaccagactaagccaaggcagaccgaaatcaagggacgctgcgccccaagggcgcgcgcgcacggcgcacatcttgtagggtttgcggaggggagagaaggttgcgtaccgaatccagcgatgaggcaggaggccgcgactacgggctccttaacgacaaagatcttgagcttctccatcaccgccatggctgccgcctctgcttccactactccgcttcgccttcgcgtaaccctcgcccgctgccgtcgctggagacgagagaggccagagggatacaagccagtgctctcctccgatctgtggacgtgggcccgtgtcttgagcggagagacttcgacgcccagcccgtctacgaccgtggtccagtgggccacgatccattttgtttgttgggctgaggcccgtaccgataatcccattaaatgatatggtcacggcatattcagagctgcagactggaatattcctcgcgcgcgcgcgaataatctacccggacgagcgaatctactgtcggtcgcagcgccgttttctcgctctcgcgctcgccttacctgggatgggatggcaccgcacgcacacgaccatccttctctcctctcttcacctaccgattctgcgcgcatagaagaggcactccttcatcgtcagctgcctttcgcatgtcggcatgcatcttgcccgacaccacgctggcccgtggggtagtcgccgcacgccgagcaccggcaggctgcgcagccgtcgaccatgattttgccaagcgttgtaaagcgccatgtaggaaagaagatgcccagcgacgcgacacgaaataagcagcaaagcttcgattccaaatctcggtatggtacagatactcttataggagcaggccgagtttcacatgtgttagcagatgctactctaaaatcatcatctcccatctcgactaccacaaggtctcaagaacagtgtacatgtatttggttctgcagaatcagaggaagttcagtaagttgcaaagccacaagacagataatttgatccgcaggcactgcaagggaaagaacagaacaggatggatatccttttaccttatgacttacgactcaattgctgcaacccttactggcttcatcacccttacaatgttcctcatgagttcaaaccccatgagtatcatgcctatgagataaaggaagctcagttgcagcttcccaagcaagttatagaccgctgcggtagcgtctacgcctgcatctgttcgcaccatgacggtgatgggtctcgcagaaatgagcgccccggtttctgatgaggatgcagcgtaagagatttgccccggaacaatttgccttcaagagaaataggaggtgtttagtcttcttaagcttacccgacgtgttctcgggctgggctgaccactcttcagactgtgaacaagcgaggaagggaaacatcaaaaagttcaatgaggcgaaataaaaaaagagaaccttggagaagacagccatgccaataacacagcacccaggtaagagagctgcatattatgttcaagaagtctacatattagtagttgaaaaagcagttgaacccacaattgaaaaggtctacatgttcagtatgagtaattcagttcgcaactcaacatcactgcttggaaaattcctagaagcaaatatcatggttgcttagttagtacaaagtattaagctaagtgtgtgccaagtcacatgcctcaatacttgaggcaatttgatttcaaatacgacttttggtaatctattggatcctatagttctgtttttctctgctagaccagttatcttcgaaagtatcatgttatgtcttcacaaattaaacagaaatctttccaattcgttatcctcagtcgctttggtcaaatcttgccgaagtgttcccgggtaaatatgctaacttacctggaaagtatcttggtcttcccctccactttaggaagattaaaaggatctccttgcaaccgctactggaaaaaataaacaacagactggccggttggaaaggcagactactctctaaagcaggcagagaaacattggttaaatcagtattaacagcccaaccgatttatcatcttacggtttttccagttcaaaaatggctgctaaagaaaattgataagctaagaagaggctttctttggaaaggaaacaaccctgaagcttgcagtgggggtcactgtttgatcaactggtctacaacatgtcagccaaagaacaaggggggactgggcattctgaacctagaacgcttcgcaagggctttaagaatcagatggttgtggatgcgttggaagaacagggataaggcgtggattggtttgcaatcgccatgcgacaaaatagatgaagaacttttcaatgcatccacggtggtcaacgttggtaatgggagaacagcaagtttttggaaatctagttggatccatggtcaggcgcctaagaatatagcaccaattctgttcaagaaagcaaggaagaagaacatctcagtttttcatgctcttagagccaatagctggattcagctatgtctgccatgcatacgagaagacgaaataaaagattttgtaaccctatggcaggctatcagtagcatgcacgaacttaataacttggaggattccatctcttggagatggacgactgatggtcagtacagcgcaagcagcgcatataacattcagttctcaacaaacttctgcacaatgaaaatctgttccatttggaaagcaaaaacggaacccaagtgtcgcttcttcgcttggactcttttacacaacagagtgttgacagcagagaaccttcagaaaaggggatggcctcacaatccttcttgttgtctctgtaattcgacctttgaaacgacggttcatctctgcaaggactgccccttcagcagggaggtgtgggacagaatcttgtcttgggcgaatctttcgtcctttaaggggatctatggctctgattcgttgtatgactggtggagaaatttgagaagtaggtgcaacaagccttcgagaagatcctttgatggccttatcatttatttttggtggagcatttggttagagaggaacaatagaatctttcacagtcagcttagatcagcggagcaggtcgcgctagtggtcaaagagttagttggttgtttccatggcctggctggctagtaggtccgcttagtatatttgttcaggagttcgcttctagtcttgtaagtcgtcttggtttcttgtaatttcctgttagttctactccttctaatatattggagcggcaagtcttttgcctctccctttcaaaaaaaaatgtcttcacaaatttagttggatcatcaatgatgctttcagataactacaatactagacctagtaatggag

SEQ ID NO: 206938 - DNA, 1606 bp, Zea Mays
gagagttttaaggagacaaggatctctagcaagataggggcggtcagtcggcctatttatgtaatcaatggatgaaaaataaagtagacaagaattagaagggagaaaccctcctcttgctcggccgtgggcagaggcccccggacggcattcctgcacatcgacctcattctgcaatcccctcatctacgtgtgaacagtaccacaccgtctccgccagcagctccaatcccccaccgatctagcaactataacattaatacattttcctataaacttggtcaatgttagacaaatctatgtcatatcgaatgtttgaatgataattatgagtattaaatatatttcaactataaaactaattatacagatattcagacatttgatgtgacatgaactaaactttagtcaagggaaccaaacacaaagattaaagtcgaatctgcataagtgcatgagatttagaatactggatctaacgaatagcagcaagtgaaaaggccaccgaaatgtaatccccggcctacaagtccctagcaaacaagccgtaccttcccagacctaccctcacggagtcaaccagactaagccaaggcagaccgaaatcaagggacgctgcgccccaagggcgcgcgcgcacggcgcacatcttgtagggtttgcggaggggagagaaggttgcgtaccgaatccagcgatgaggcaggaggccgcgactacgggctccttaacgacaaagatcttgagcttctccatcaccgccatggctgccgcctctgcttccactactccgcttcgccttcgcgtaaccctcgcccgctgccgtcgctggagacgagagaggccagagggatacaagccagtgctctcctccgatctgtggacgtgggcccgtgtcttgagcggagagacttcgacgcccagcccgtctacgaccgtggtccagtgggccacgatccattttgtttgttgggctgaggcccgtaccgataatcccattaaatgatatggtcacggcatattcagagctgcagactggaatattcctcgcgcgcgcgcgaataatctacccggacgagcgaatctactgtcggtcgcagcgccgttttctcgctctcgcgctcgccttacctgggatgggatggcaccgcacgcacacgaccatccttctctcctctcttcacctaccgattctgcgcgcatagaagaggcactccttcatcgtcagctgcctttcgcatgtcggcatgcatcttgcccgacaccacgctggcccgtggggtagtcgccgcacgccgagcaccggcaggctgcgcagccgtcgaccatgattttgccaagatggaatcctgaattactgaaatattacgcgtactttggaactgatatgacatttcttttataaatccagccgtgcaggcggattgtaagtgttacatttgtttcaatatcgagtttacttgtgagttgagactaaaaacccagtaaatttcatgaattggaagtaaaaccaatgaatttggtatctccatggcacacgatttctattacatacgtcttaagtaaaaatcatgtgaattccatatctcttgctggcacacgattt

SEQ ID NO: 206939 - DNA, 3039 bp, Zea Mays
atgaagctgagtgctgctgttctcttcttctccatcttgttgcagtactgcaccagcagcggccagccagatagccgaggtttcataagcatcgactgcggcatcccggagaactccacgtaccaggacctcacctccaccatactctacgtctccgaccgcggcttcgtcacctccggcgagaaccgcaacatctccgccggctacatcagcccgtccctcgcgcagcgctactacaccgtccgcgccttcgcgtccggcgttcggaactgctacaccctcccctccctggtcgccgggaacaagtacctcgtccgcgccgccttctactacgcggactacgacggcctgagcacgccgcccgtcttcgacctgtacctgggcgcgagcctctggcacgaggtcaggttcagggacgcggccgcgatcaactggatggacgtcgtggccgtggctcccaccgacttcctgcaggtctgcctggtgaacaagggcaccggcaccccgttcatctccggcctggacctcaggccgctgcggagcactctttacccggaggcgaacgctagccagtcccttgtcatggtcaacgccaaccggtgcaacgtgggacccacggacaagtctgtggttcgcccaaccaaagcacatttctctggcccaacaagcaggtacccgctggacccccacgaccggatctggctggcgtacggcgccgtcccggcctggaccgaggcgtccgccacgtccgtcgtccggaactacctcgccgacccctacgacgcgccgtccgccgtcatgcagagcgccgcgacgccatccgacggctcggtgctcagtttctcgtgggacacgtccgacgaccgctccgtggacgccagcagcgccacgtacctcctcgtcctctacttcgccgagctgcagcgcgtgtcggcgagcggcgagctgcggcggcagttcgacatcgccgtcgacggcaccgcgtggaacagggaaccttactctccgccgtacctcttcgccgactccttctccggcacggtgcaggggcaggcgaggcatagcgtctcgcttactgcgacgaggaacgcgacgctcccgcctcttctcaacgccatggaggtgtacttggtgaggccggtggatgaagctgcaaccgaccctggagatgctaaagccatgatcgcaatccaagaagcttatgttgtgagcaaaaactggatgggtgatccatgtgctccaaaggcttttgcatgggaaggactggactgtactactgatcctccaactggtactccaagaataacagcattaaacttgtcttcaagtgggttgacaggtcccatcactacctattttggagatctgaaagcactccaatacctggacttgtcacacaataacttgtctggctccattccagattgtcttggacagcttccattcctagtgttcctggatctctccagcaatgacctccgtggaccagttccttacactcttcttcaaaaatcccacaatgggactctatcgctaaggcttagtaacaacccaaatttgtctgggaacggatcgggtccaaagaagttgaatggggccgcacttctctccgcgataatcatcccaacagttgccgccactgccttgtctgttaccttcattgctctgctgctccgagcactcaaggaacaagctagaagacgggctgttgatccaactccgagagatgagacggcgttgcttgagaaccgagaattctcttacagagaactgaagcacatcacgaagaactttagcctggagattggcagaggtgggtttggagctgtcttccttgggtacctggggaacggaaacccggtagctgtgaaaatccggtcggagtcgtcttcgcaagggggtaaagagtttctggctgaggctcaacatctgacgagggtacaccacaagaacctggtatccttgattggctactgtaaggacaaagaccatttcgcccttgtctacgagtacatgcctgaagggaacctgcaggatcatctgagactgagagacacttgcactcacagaccactcacttggcagcaacgccttcagatcgcccttgatgccgctcaaggtctggagtacctgcatgtggcatgcaaaccagcgctgatccacagagacgtgaagagcaggaacatcctcctgaccacgggccttggggctaagatcgccgactttggtctgaccaaggctttcagcgactcggagacacacatcaccactgaaccagctggaacaatgggctacttggatccagagtacgtctcaggccagtccccggtcgtcccggtggacgacagcgtgagcgtccacgtcggcgagtgggtgcagcagagcctcgaccggggcggcggcgtcgagagcgtcgtggatccgagcatgggacggtgcgagcgcggcgactacgacgtcaactccgtctggaaagtcgccgacctcgcgctgcgctgccggcgggaggcctccagggagcggcctacgatgacggacgtggtcgcgcagatcagggagagcgtggagctcgaggcggcccgccggagctcggcgtcgggtgctgctgctgctggtggtggtgggggtctgaggagttgtgccggcgagagggacgcgtttgaggtggtggaaggaagcgttggggagacggcgggggccgcgcctggtccggcgatgatctgagctgaagactctgaactaattaaggtacgagggtggtggtggacatgtgtttcaccgtgagaaacctgctcagcaagggaagatcggaacagtgggccttctttttcttctttttttactggtaatgcattattgttggagacatcgtcgacaggattttgctgatgaagcaaccaggcagctatcttgtctgccggtcacatatataatgtgaggaggttagctagtagtggtaggggaacaattcccttggccagggcgattgaataatacaagtctgaatatgaaatccagaaactaataattagtttgtta

SEQ ID NO: 206940 - DNA, 2687 bp, Zea Mays
ccggtagtacgtagcgtaggtatcgtccactcgtccggccgtcgcgcgcgctgctcctgccttcttcctctcgctgatatattggcgacgcacttacgatcgaggccagcagctggggttggacttggatagctagctagatggccaagccactgaacctgactcctgccttcctctcgctgatggccaccagctgccgcttcagctccggcgggcatgcgcaccgcttcgcctcgtcgctaccgtgcgggaggacgacgccgacgccacggaccacgtcgtcgtctacgcgccctgcggctcaggttagccctgacagaagcaagcaacgcgatgacgaagcagcatcggagactacgataaggcagcagctccagcaagtcgatgtgcttgagaacacggggatttctcggcattttgctggtgaaatcaagtgtatccttgacaggacatacagatgttggttagagaggcacgaggaaattatgcaggacacaacaacatgtgcgatggcatttcgtattctaaggatgaacggatatgatgtctcttgtgatctgttgtatcatgttgttgaaacatccgggatccatgatccacttaggggacatttgaatgacacaagaaccttgttagaattacacaaggcctctacagttagtatctctgaagacgagtctatcctggatagcataggcttaaggtcaagtaccttactgagggaacaaatggagtctagtggtgctctacaaaatcctccactctttagagaggtggaacatgctctgtaccatcccttctacgccacattggaccgtctaacccacaggtggaacattgaaaatttcaatactacagagcaccagatgctagacacaccatacttgtccagtcgatataccagtagagatattctagccttgggtatcagagacttcaattcctctcaacttacttaccagcaagaacttcaacatcttaaaagttgggtgaaagaatgcaggttggaccaactaccatttgtgaggcaaaatttggcatacttcttattgtccgctgctggctgcatgtactcccctgaactgtctgaagctcgcactttgtgtgcaaaaaatggtgcactcataactgttgttgatgacttctttgatgttggaggatcaaaagaagaacttgaaaaccttgtcatgttggttgagctgtgggacgagcatcgcaaaattgagttttactcagaacatgtagagattatattttcttcaatttacaactcagttaaccagtatggtgcaaaggcttctttgttacaagaccgcaatgttaccaaacacctagtacaaatatggttggatttgctaaagtctatgatgacagaggtagagtggcgtttgaacaaatatgtgccaacagaggaggaatacatgacaaatgcatctttaacatttgcattgggtcccattgtattgccagcgttgtattttgttggaccgaagatcccggagtctattgttaaagatccagaatacgatgagttgttcaagctaatgagcacatgtggtcgactcttgaatgatgttcagagttttgaggtacattactgagttgcgagtcttaagctttcatgacaatcctgttacaggctcaagaaagtattagtgcgattaattaattagcataggacacaatgggtaattgagttagttttcattcttaggtgctattatttaataggtatatgagcatggtatactaaataataccactttagccttgactagttttaggaggtgtcttctttgtaatcgagaaaaaggaaaacccttgtatattcaaattgatatattgttgcagagggagtacaaggagggcaagttgaacattgtttctctcctcgttcttcatggtggctccatgtccatatcagatgccagaaggaaattacagaagcccatagacacatgtaggagagacctcctaagactagttcttcgtgaagaaagtgttgttcctaggccatgcaaggaattattctggaaaatgtgcaaggtctgctacttcttttactcgagaactgatgggtttaggtcaccagtggagagggccaaagaagtgaatgcagtgatcaacgagccattaaaactacaagaaaaccatacacacatgtctgttttgtgagaggaaccaagtgtcgatgtgatgtcttcatttgatttagtaggtgtgctttctatataagacagttcgctaggtgactgcatcaggtggtgcataaaaactcagcacattggtaatgtatagaagttggcccatatgtatgtctgattgtggttggtgaggttagtattattttgaaatttaaaagggtgacaccactatagaactagcatttactatcgttccattactattgatttctaacgagccgtcaattataataatttagtatttatgcattacttgaaaattttaaaatgactggggtccatatttctcagcaagtaaaggtccctatctctgtcgactcaaaccataagacaatagtaatcattattggttaaagctagaagcagtattgataatgagactatcattgttggttggtgactttaacagatagggacatgtcactgtcagtttgtggcttgagtctatcactactagttgttgatattagctcacaatgatat

SEQ ID NO: 206941 - DNA, 429 bp, Zea Mays
taatgtcccgaaccctagaggacagcgctttcctgtccgactcccagccgtcgtctgctgcggactccgcctccattttgctctgtttcttgcaagttgctcttgcggtagttcccccaactgccaccatgcagaacgaggagggtaagactgtggacctctatgtccccaggaagtggtacgtttgcctcatcctcttgtagaaatatttctgctctgcatggttggttttgttgtgtgctaaggttgagtttatgttctttcagctcggccacaaacaggatcatcactgccaaggaccatgcctctgtccagatcaacattggccacttggatgcgaatggcctgtatgatggtcacttcacaacgtttgctctctctgggtttgtccgtgctcagattgttgctccatctgttttgccttttcag

SEQ ID NO: 206942 - DNA, 1742 bp, Zea Mays
actatttacattctagatgttgtatatattatatgttttttgtacggtacacttgcattcgttcctatttcactctccctctcactggttttttcgaatattttgtacgtggttgcaaattaaattaagagcaactacctactaatctatagttattttggcagaattgaatgtagtagcctcgtagggccaacatgaccgaactcaaaatgtgcagcccacctccaatcccgtagaagatagtgctgccctgccgaatgccgcccacctccaatcccgtagaagacaaagagagagggagagaactggacggcggcggcggcggagacgacgatgcagtggtacttggtggccgcgctcctcaccatcctcaccagctcccagggaatattgaccaccctttcccagagcaatggcaaatacaattatgattatgccacaattccttttttagctgagctcttcaagttatctgtctcaggcttcttcctctggaaggaatgccattcttcatctccaccaaggatgacaaaggaatggaggagcgtgcgactatatgttgttccttcagttatatacctcatccacaacaatgtccagtttgcgacattgacctatgttgacccatctacctatcagataatgggaaacttgaaaattgtcacgactgggattttgtttaggcttgtcctaaaaaggaagttgtccaatatacaatggatggcaattgttttattggctgttggtacaactacaagccaggttaaaggatgtggagattcaccatgtgattctcttttctcagcaccattggagggttacttgcttggaatactttctgcttgtctttcagctctagctggtgtgtacacagaatatttgatgaagaagaataatgatagtttgtactggcaaaatgtacaattatatacgtaggtttggagttatctttaacatgggctggctaatttatggcgattttaaagctggatttgagctaggtccatggtggcagcgcctttttaatggttattcgatcacaacatggatggtagtgttcaatttaggatctactggtcttctagtatcatggttgatgaaatattctgacaatatagtcaaggtgtactcaacttcaatggcaatgcttttaacgatggttttatctatatatcttttcagtgtgaaagctacaattcagctcttcttgggcattatcatttgtataatttccctgcagatgtattttatgcctgtgcacatgcttattgagttgccacaaactttgcctgtaacatcaaagtaggttcatggcattgttagctaacccattgatcagctgagggtagggcactgttgattgagtggttaattgactatctgcagcccagctctatttgagtcatatatttggagatttatggttgtaatctcaacagctatggatatagacagctagttttgcattaatggagtcgatatggaactgacaagtacaatgagttatggcttcattacaaaaaagtacacaattttgctcctgcggcagcagtcttgtcttttcaggaaattcaaacaggacaaagtgttcattgagcagatcctcaggtgtactgatttttttttatcatcatcagttagaaatggctgtacattctagcatatgttatttattttagttaaaagaaagcgcaacactgttactgtgattaatttcatgaaaatcatagcatcgttaaatt

SEQ ID NO: 206943 - DNA, 3254 bp, Zea Mays
caccaactagtactcagagattcagagctgagcatcgttgtgctagctgacagcgtactgtagtcttcccacccataaacctgagcgtcagaaacggtgctcacaatcacagcgcagggtgggcaccgattcgaacgctttctctcctccgccgctgatcccctctcgatttgttgtgcctccagcccccgattcctactgttgtggtccagtgatccaatcgacgtcgacgactccgcagccaccgctcctctcctctcgtcgcttctgccgtctctcggcgtcgaatctcatccggccagtgaccacactctactggccgcccggaaggagttcttccaggattcgagccgttgctgccgtcacctctgcaggcccagcgtcgagcggagatccaatcggaaattcaactgacttcgtcttttatcctccgattcgaacgctttatactccgccgttgatcccctctcgatttgttgtgcctccagcccccgattcctcctcattcgtcggcgatcgaacgcagccagccagttctcctcgacttcttccagtcccacccaccgaggttcctcttcttcttcggcgcgcccgtctcggtggacgccacaggaattggctcctgacttttttcaacgggtggtttcgctgggcccgatgcccgacgttatggccgcagccctaaccggcttctcgcctcgcggggtgattccgagcagaggcagagcatctcttcccggggtcgctagagcgtatgccgagaggcggttggttgcagaaaacacaagcctgccaaacatgcataaagaacaacttgagactataataaggaatcagctccggaagccccagttgccaccttcttcatacgacacagcgtgggtttctatggtgccagtgcggggctctcatcagactccccgcttcccacagtgtgttgagtggatactgcagaaccagcaggatgatggatcttggggtgtcagccaatctgactcatcggtcagcaaggatgttctcctatccacgttggcatgtgttcttgcgttgaagagatggaatgttggcagagagaacatttggagaggactgcatttcatcgggaggaatttctctgttgctatggacgagcagttcacttctcctataggtttcaacttcacctttcctggtttgcttagcctcggcattgatatgggtttagaatttcctgtaagacaaattgatgtctgtggcattcttcaccgccgggagatggaattgaaaaggctggctgtggatagttcttttggaagaaaagcatatatggcttttatcccagaaggattcggaaatatgctggactgggatcaagttatgaagtttcagaggaagaatggatcattgttcagcactccttccacaactgctgttgcattaatccacaaatacaacgaccaagcccttcaatacctaaatttgcttgtcaatgaatttggcagtgcagtaccagcaatgtatccttcaagggtacattgtcagctttcaatggtggacgcgcttgaaaaaatgggaatttctcagcgctttgtcagtgaaatagaaagcatcctggacatggcatacaattgctggttacagaatgatgaggaactcatgatggacatagcaacatttgcaatggcatttcgccttttgaggatgaatggttacgatgtttcctcagatgagctgtctcacgttgctggagcttccactttccatgattcactacaaggatatttaaatgatacaaaatccctactggaattgtacaagacctcaaaagtcaccttatcagaaaacgatctgatcttagatcgcataggatcctggtctggcaacttattgaaggataagatgtgctgtagtagggtgcaaaaagactcgatttttggagaggtgctgcaaacaaaatttaaattctcattttcaccttggaggttcagtttatgtctgtgttttgtgatttcagatcgagtatgctgttaattttcccttgtattccacactggagcgtctagaacacaagagaaacatcgaacattttgatgcttggggttctctgatgctaacaacaaaatcctcatcttttcgtatcaatcaagaattcctagctttggcagtcgaagatttcagtttctctcaacgtgtttaccgggatgaacttcggcatcttgatagttgggtgaaggagaacaagctggaccagctacaatttgctcggcagaaactgacatattgctatctgtctgctgctgctaccgtattttcttctgaattgtctgacgctcgcatttcatgggccaaaaatggtgtcctcacaactgtggttgatgacttcttcgatgttggtggatcaaaagaagaattagaaaacctgatagcactagttgagaatgaaccatcttggagcaatggcttctgcagcacaaggccgtgatcttacaaaccacctagtagaaatatggctggatttgttaagatctatgatggtcgaggcagaatggcagagatgccaatatgtaccaacagttgaagaatacatgacaaatgctgttgtctcatttgcactgggcccaattgtgctcccagcattgtattttgtagggcaagagctattagagcatgctgtcaaagatgaagagtacgataaattatttaggctagtgagcacttgcgggaggctcctcaatgactaccaaagtttagagagggaaggcaaccaggggaagctgaatagtgtttctctacttgtgctccacagtggtggttctatgtccatagaagccgctaaaaaggcaatgcagaagtccatagacgtgtctaggagagacttgctaagattggttctcaggaaagaaagtgctgttcctaggccatgcaaggagctcttctggaagatgtgtaagatacttcacctgttttactctcagaatgatggatttagctccccaaaggaaatggtcagtgcagtgaatgctgttatcaacgagccactcaaagtccaaaacagtactacgtttttgtctagttcatcaaggtagcgaggatatcatgtaatttatcctgttcatatggatcagaagcaacagcagcaagcttaagatatttgtaagtttgtgactgggctgctgtggatctgtgaagctacaactttgctgtatgtggatcaaggtattaggaagatctggttcacatattgataacataatggataaaccataacgttaaat

SEQ ID NO: 206944 - DNA, 320 bp, Zea Mays
cgctcgtgcaataccccctccccagcctggctccggcggaacgcctggagttctcgtttctcctcggcctggctggctgcgcacgcgagcgggcgagcgcgcgctccgaaaggcggctcccgccatgcagccgcgttcgcgcgggaagctcctagggttaccgcctcctttcgcgccaatctctgggttcgtggttatctcggttagggttcttgaccaaaaagcgcagccaggatcgacttgaccgagtaaccaaacactgggctgttggaggaactcaaccaggccagctgtaacctggctggtatggtgcgagccag

SEQ ID NO: 206945 - DNA, 250 bp, Zea Mays
atgcgctcgtgcaataccccctccccagcctggctccggcggaacgcctggagttctcgtttctcctcggcctggctggctgcgcacgcgagcgggcgagcgcgcgctccgaaaggcggctcccgccatgcagccgcgttcgcgcgggaagctcctagggttaccgcctcctttcgcgccaatctctgggttcgtggttatctcggttagggttcttgaccaaaaagcgcagctatggcttggtacgtag

SEQ ID NO: 206946 - DNA, 387 bp, Zea Mays
gcatgcgctcgtgcaataccccctccccagcctggctccggcggaacgcctggagttctcgtttctcctcggcctggctggctgcgcacgcgagcgggcgagcgcgcgctccgaaaggcggctcccgccatgcagccgcgttcgcgcgggaagctcctagggttaccgcctcctttcgcgccaatctctgggttcgtggttatctcggttagggttcttgaccaaaaagcgcaggtgtacaaccacttacgtaaatggagacagaggtggatgagggtggcaaaattaagagagttgagtggtgccaattgggatgaagacttatgcatgataagtctggaggatgagcactacaatggccacattaagctatggcttggtacgtag

SEQ ID NO: 206947 - DNA, 4035 bp, Zea Mays
gctagtggcaggtggcagcgagtgagaaggtgagctcgcctccctcgcgcctcccattcccccctcgcgcagtcctatcgtaggaatgggatgaggccggggcccctccctccttcctcctcggcgcttctcccgtgacaagcctccattctccagataggggaggatggatttgtccaggttcgcctccggcgtcgggcccagccgcgtggccccgcgggcgggcctgcagatcggcgccgccgagaatggcttccgggcctgctccctgcggcgagcacggcaccgcggcggcgggaacgggaacctcacggccgccgcgtccaccctccgcggccgcggcgggctcttctacctggctcccacgcgccggagtcatcccagtctccggctcttctacctgcttcccacgcgcgggagtcatctcagtctccgcgccagatggcggccgcgctgccagggcaacgactcattggcctacgtcgacggccccttggagaccgctaagggctccggcgaggtcgacgacaacgtgcccaccagctcggggtccgacgacgacaggggcctcgccgacgtcgacggcctcagggagatgctgcagaggtccaggaacgagctggaggtggccagggtcaacagcaccatgttcgaggagaaggcgcagcggatatccgagtcggccatcgcgttcaaggaccgcgccgacggcgcccagagggatgtgtgcgcggccgtagccaccgtgcaggagatcatcagcaaggaggcggacgccaaggaggccgtccagaaggctaccatggcgctgtccatggccgaggcgaggctgcagctggccgcggaggcgctggaggccaaccggggctcggtaggcccgacggaggttagcatcgaaggcatggagcaggaggccctcctgtctgcacaggaagagattaaggattgtcgggcagccctgtcgcggtgcgcggaggagctgagtcgtgtccaggacaagaaaatggagctgcagaaggaggttgataggctgacggatctcgctgggaaggcccagatggatgcgtccaacgccgaagaagatgttgccaatataatggtgctggctgagcaggcggtggctcttgagatggaagcctcacagcgtgtcaacgatgcggaaatggtgctgctgaaagcggagaaggccatagcctcgattgataccgtggtggagctaccgtcacctgctgaagagcagagaagcactgaagaagacagcgtttctgaagggtacgagtatagcagcgatgtcactgatgatgtttatgtaagggatgaggtgtcaagtatcgagcgcctaatggtcggtgacttgactgttcagggctttgagcagcttgaaccatcccgtgaaatatatgatgaagaaagcagtaataagatgtctgttgagcctcagaaagaagctgagtctgattcagataagtcgaaacaagggaagaagcaagaaatggaacgaaaggagcacaccaaggaaccactgagtgctccaaaagcactggtgaagagatcatcccgtttcttctcggcatctttcttctcctccaaagttgatggagagtttacacctacatctgtcttccgagggttaatgaaatcagtgcaaaaacaagctccgaagcttgttgttgggatattgcttctcggtgcaggggcattcttcttaaatagggctgagaagagtcaactatttcagcagcaaggcattgccacaagtattggaaaggtaacctccacaacaaagcccatagttcttgagatacggcgaattccacagagagtaaagaagctaatagagctcttacctcatcaagaggtaaatgaggaagaagcttcacttttcgacatactatacttgcttctggccagtgttatttttgtaccattatttcagaaaatccctggaggcagtcctgttcttggatatcttgctgctggtgtcctcattggtccatatgggctgtccatcatccgtaatgtgcatgagacaaaggcaattgcggaatttggagttgtgttcttactatttaacattggacttgagctttctgtggaaagactaagctcgatgaagaagtatgtctttggcttgggatctgctcaggtgctggctactactgctgctgttggtgtgatagctcattgttttgccgcactaccaggaccagcagcaattgttgttgggagtggcttggctctgtcatccacagctgttgtcttgcaagtattgcaagagcgtggtgaaagtacgtcacgtcatggacgtgctacattttctgtgttattgttccaggatttggctgtggtggttctgttgatattaatacctctcatatcacctaattcttcaaaaggaggggttggtttccaagcaatagcagaagccatgggaatggctgcagtcaaagcagtagctgctataactgccataattgctggaggtcgtctgttgctccggcctatttacaaacaaattgctgaaaatcagaatgctgagatattttcagcaaatacactccttgttatttttggcacaagtcttcttacagcccgggctgggttatcgatggcacttggagcttttttagctggtctgttactagcagaaacagagttctcattgcaggttgagtcagatatagctccctatcgtggtcttctgttaggacttttctttatgacggttggaatgtctattgacccaaagctgcttctgtcaaacttcccagcgatctctgtgatattgagtctcttgataattggaaagacattgttagttacatttgtcggcagggtgtttggggtttctgctatagctgccattcgtgttggcctcttgcttgcacctggtggtgagtttgcttttgttgcctttggagaagctgtcaaccagggtcttctatcacctcaattaacatcgttgctatttttagtcgttggcatttcaatggctctgacaccatggttagctgctggagggcagtttctggcatcaaaatttgagcagcatgatgtgaggagtttattgcccgtggaaagtgagactgacgatttgcaagaccatatcattatattaggctttggacgtgttgggcagtgatcgggttgcagctgggcgtgcacttgatcttccagtgtattttggtgattctggaaagcagagaggtactgcacaaaaattggagctgaaagagcttgtgctgctgcaattactttggatactcctggtgcaaactacagagctgtctgggcgttgaacaaatatttcccaaatgtgaagacatttgttagagcacatgatgttgatcatggtgttaatttggagaaagctggtgcaacggcggttgtccctgagaccttggagccaagtcttcagctagctgctgctgtccttgcacaagcaaaactcccaatgtcagagattcaggaaaccatcaacgagttccggaatcgtcatctgtcagagcttacagagttgtgtgctacgtcaggaagttctcttggctatggattttccagagctacgtccaaatcgaagtctttcacctccgacgacgaaaaccaaacagtggatggcacactagcaatctgatgctgatgagataaaatgggatccccttgctagcgctagattggttgcattgttcagtagataatcctgtttcatgtggaaggagggtggaataattattcatataagagctgtcataaaagttggcgtccatttttgtatgttagacacttagtgcttgtttgagagtaatggaagggactgagagggccaaaatcctttatgccccgtttgtttccttttattttgaggacttggaatctaactattggaataggctatttttttaaaatgtgacattccaccacttccaaagttatcatatgagcctatctctaattattcataggatgagatatgtaatttgattctatagatttacatgctatttttccgatgtacaaattaaaacacactcttct

SEQ ID NO: 206948 - DNA, 4183 bp, Zea Mays
acgagcgctagtggcaggtggcagcgagtgagaaggtgagctcgcctccctcgcgcctcccattcccccctcgcgcagtcctatcgtaggaatgggatgaggccggggcccctccctccttcctcctcggcgcttctcccgtgacaagcctccattctccagtccgtgagcactccactccctgtctccgcttttgtttctctcgtcccaacctccccttttctgcgggtttgatccgcacggtacaggataggggaggatggatttgtccaggttcgcctccggcgtcgggcccagccgcgtggccccgcgggcgggcctgcagatcggcgccgccgagaatggcttccgggcctgctccctgcggcgagcacggcaccgcggcggcgggaacgggaacctcacggccgccgcgtccaccctccgcggccgcggcgggctcttctacctggctcccacgcgccggagtcatcccagtctccggctcttctacctgcttcccacgcgcgggagtcatctcagtctccgcgccagatggcggccgcgctgccagggcaacgactcattggcctacgtcgacggccccttggagaccgctaagggctccggcgaggtcgacgacaacgtgcccaccagctcggggtccgacgacgacaggggcctcgccgacgtcgacggcctcagggagatgctgcagaggtccaggaacgagctggaggtggccagggtcaacagcaccatgttcgaggagaaggcgcagcggatatccgagtcggccatcgcgttcaaggaccgcgccgacggcgcccagagggatgtgtgcgcggccgtagccaccgtgcaggagatcatcagcaaggaggcggacgccaaggaggccgtccagaaggctaccatggcgctgtccatggccgaggcgaggctgcagctggccgcggaggcgctggaggccaaccggggctcggtaggcccgacggaggttagcatcgaaggcatggagcaggaggccctcctgtctgcacaggaagagattaaggattgtcgggcagccctgtcgcggtgcgcggaggagctgagtcgtgtccaggacaagaaaatggagctgcagaaggaggttgataggctgacggatctcgctgggaaggcccagatggatgcgtccaacgccgaagaagatgttgccaatataatggtgctggctgagcaggcggtggctcttgagatggaagcctcacagcgtgtcaacgatgcggaaatggtgctgctgaaagcggagaaggccatagcctcgattgataccgtggtggagctaccgtcacctgctgaagagcagagaagcactgaagaagacagcgtttctgaagggtacgagtatagcagcgatgtcactgatgatgtttatgtaagggatgaggtgtcaagtatcgagcgcctaatggtcggtgacttgactgttcagggctttgagcagcttgaaccatcccgtgaaatatatgatgaagaaagcagtaataagatgtctgttgagcctcagaaagaagctgagtctgattcagataagtcgaaacaagggaagaagcaagaaatggaacgaaaggagcacaccaaggaaccactgagtgctccaaaagcactggtgaagagatcatcccgtttcttctcggcatctttcttctcctccaaagttgatggagagtttacacctacatctgtcttccgagggttaatgaaatcagtgcaaaaacaagctccgaagcttgttgttgggatattgcttctcggtgcaggggcattcttcttaaatagggctgagaagagtcaactatttcagcagcaaggcattgccacaagtattggaaaggtaacctccacaacaaagcccatagttcttgagatacggcgaattccacagagagtaaagaagctaatagagctcttacctcatcaagaggtaaatgaggaagaagcttcacttttcgacatactatacttgcttctggccagtgttatttttgtaccattatttcagaaaatccctggagtcctgttcttggatatcttgctgctggtgtcctcattggtccatatgggctgtccatcatccgtaatgtgcatgagacaaaggcaattgcggaatttggagttgtgttcttactatttaacattggacttgagctttctgtggaaagactaagctcgatgaagaagtatgtctttggcttgggatctgctcaggtgctggctactactgctgctgttggtgtgatagctcattgttttgccgcactaccaggaccagcagcaattgttgttgggagtggcttggctctgtcatccacagctgttgtcttgcaagtattgcaagagcgtggtgaaagtacgtcacgtcatggacgtgctacattttctgtgttattgttccaggatttggctgtggtggttctgttgatattaatacctctcatatcacctaattcttcaaaaggaggggttggtttccaagcaatagcagaagccatgggaatggctgcagtcaaagcagtagctgctataactgccataattgctggaggtcgtctgttgctccggcctatttacaaacaaattgctgaaaatcagaatgctgagatattttcagcaaatacactccttgttatttttggcacaagtcttcttacagcccgggctgggttatcgatggcacttggagcttttttagctggtctgttactagcagaaacagagttctcattgcaggttgagtcagatatagctccctatcgtggtcttctgttaggacttttctttatgacggttggaatgtctattgacccaaagctgcttctgtcaaacttcccagcgatctctgtgatattgagtctcttgataattggaaagacattgttagttacatttgtcggcagggtgtttggggtttctgctatagctgccattcgtgttggcctcttgcttgcacctggtggtgagtttgcttttgttgcctttggagaagctgtcaaccagggtcttctatcacctcaattaacatcgttgctatttttagtcgttggcatttcaatggctctgacaccatggttagctgctggagggcagtttctggcatcaaaatttgagcagcatgatgtgaggagtttattgcccgtggaaagtgagactgacgatttgcaagaccatatcattatattaggctttggacgtgttgggcagatcattgcacaactcctgtcagagcggttaattccttttgttgcacttgatgctggaagtgatcgggttgcagctgggcgtgcacttgatcttccagtgtattttggtgattctggaaagcagagaggtactgcacaaaaattggagctgaaagagcttgtgctgctgcaattactttggatactcctggtgcaaactacagagctgtctgggcgttgaacaaatatttcccaaatgtgaagacatttgttagagcacatgatgttgatcatggtgttaatttggagaaagctggtgcaacggcggttgtccctgagaccttggagccaagtcttcagctagctgctgctgtccttgcacaagcaaaactcccaatgtcagagattcaggaaaccatcaacgagttccggaatcgtcatctgtcagagcttacagagttgtgtgctacgtcaggaagttctcttggctatggattttccagagctacgtccaaatcgaagtctttcacctccgacgacgaaaaccaaacagtggatggcacactagcaatctgatgctgatgagataaaatgggatccccttgctagcgctagattggttgcattgttcagtagataatcctgtttcatgtggaaggagggtggaataattattcatataagagctgtcataaaagttggcgtccatttttgtatgttagacacttagtgcttgtttgagagtaatggaagggactgagagggccaaaatcctttatgccccgtttgtttccttttattttgaggacttggaatctaactattggaataggctatttttttaaaatgtgacattccaccacttccaaagttatcatatgagcctatctctaattattcataggatgagatatgtaatttgattctatagatttacatgctatttttccgatgtacaaattaaaacacactcttct

SEQ ID NO: 206949 - DNA, 3994 bp, Zea Mays
acgagcgctagtggcaggtggcagcgagtgagaaggtgagctcgcctccctcgcgcctcccattcccccctcgcgcagtcctatcgtaggaatgggatgaggccggggcccctccctccttcctcctcggcgcttctcccgtgacaagcctccattctccagtccgtgagcactccactccctgtctccgcttttgtttctctcgtcccaacctccccttttctgcgggtttgatccgcacggtacaggataggggaggatggatttgtccaggttcgcctccggcgtcgggcccagccgcgtggccccgcgggcgggcctgcagatcggcgccgccgagaatggcttccgggcctgctccctgcggcgagcacggcaccgcggcggcgggaacgggaacctcacggccgccgcgtccaccctccgcggccgcggcgggctcttctacctggctcccacgcgccggagtcatcccagtctccggctcttctacctgcttcccacgcgcgggagtcatctcagtctccgcgccagatggcggccgcgctgccagggcaacgactcattggcctacgtcgacggccccttggagaccgctaagggctccggcgaggtcgacgacaacgtgcccaccagctcggggtccgacgacgacaggggcctcgccgacgtcgacggcctcagggagatgctgcagaggtccaggaacgagctggaggtggccagggtcaacagcaccatgttcgaggagaaggcgcagcggatatccgagtcggccatcgcgttcaaggaccgcgccgacggcgcccagagggatgtgtgcgcggccgtagccaccgtgcaggagatcatcagcaaggaggcggacgccaaggaggccgtccagaaggctaccatggcgctgtccatggccgaggcgaggctgcagctggccgcggaggcgctggaggccaaccggggctcggtaggcccgacggaggttagcatcgaaggcatggagcaggaggccctcctgtctgcacaggaagagattaaggattgtcgggcagccctgtcgcggtgcgcggaggagctgagtcgtgtccaggacaagaaaatggagctgcagaaggaggttgataggctgacggatctcgctgggaaggcccagatggatgcgtccaacgccgaagaagatgttgccaatataatggtgctggctgagcaggcggtggctcttgagatggaagcctcacagcgtgtcaacgatgcggaaatggtgctgctgaaagcggagaaggccatagcctcgattgataccgtggtggagctaccgtcacctgctgaagagcagagaagcactgaagaagacagcgtttctgaagggtacgagtatagcagcgatgtcactgatgatgtttatgtaagggatgaggtgtcaagtatcgagcgcctaatggtcggtgacttgactgttcagggctttgagcagcttgaaccatcccgtgaaatatatgatgaagaaagcagtaataagatgtctgttgagcctcagaaagaagctgagtctgattcagataagtcgaaacaagggaagaagcaagaaatggaacgaaaggagcacaccaaggaaccactgagtgctccaaaagcactggtgaagagatcatcccgtttcttctcggcatctttcttctcctccaaagttgatggagagtttacacctacatctgtcttccgagggttaatgaaatcagtgcaaaaacaagctccgaagcttgttgttgggatattgcttctcggtgcaggggcattcttcttaaatagggctgagaagagtcaactatttcagcagcaaggcattgccacaagtattggaaaggtaacctccacaacaaagcccatagttcttgagatacggcgaattccacagagagtaaagaagctaatagagctcttacctcatcaagaggtaaatgaggaagaagcttcacttttcgacatactatacttgcttctggccagtgttatttttgtaccattatttcagaaaatccctggagcaaatactggcttaatatcctgcacctgcagctttctgtggaaagactaagctcgatgaagaagtgctggctactactgctgctgttggtgtgatagctcattgttttgccgcactaccaggaccagcagcaattgttgttgggagtggcttggctctgtcatccacagctgttgtcttgcaagtattgcaagagcgtggtgaaagtacgtcacgtcatggacgtgctacattttctgtgttattgttccaggatttggctgtggtggttctgttgatattaatacctctcatatcacctaattcttcaaaaggaggggttggtttccaagcaatagcagaagccatgggaatggctgcagtcaaagcagtagctgctataactgccataattgctggaggtcgtctgttgctccggcctatttacaaacaaattgctgaaaatcagaatgctgagatattttcagcaaatacactccttgttatttttggcacaagtcttcttacagcccgggctgggttatcgatggcacttggagcttttttagctggtctgttactagcagaaacagagttctcattgcaggttgagtcagatatagctccctatcgtggtcttctgttaggacttttctttatgacggttggaatgtctattgacccaaagctgcttctgtcaaacttcccagcgatctctgtgatattgagtctcttgataattggaaagacattgttagttacatttgtcggcagggtgtttggggtttctgctatagctgccattcgtgttggcctcttgcttgcacctggtggtgagtttgcttttgttgcctttggagaagctgtcaaccagggtcttctatcacctcaattaacatcgttgctatttttagtcgttggcatttcaatggctctgacaccatggttagctgctggagggcagtttctggcatcaaaatttgagcagcatgatgtgaggagtttattgcccgtggaaagtgagactgacgatttgcaagaccatatcattatattaggctttggacgtgttgggcagtgatcgggttgcagctgggcgtgcacttgatcttccagtgtattttggtgattctggaaagcagagaggtactgcacaaaaattggagctgaaagagcttgtgctgctgcaattactttggatactcctggtgcaaactacagagctgtctgggcgttgaacaaatatttcccaaatgtgaagacatttgttagagcacatgatgttgatcatggtgttaatttggagaaagctggtgcaacggcggttgtccctgagaccttggagccaagtcttcagctagctgctgctgtccttgcacaagcaaaactcccaatgtcagagattcaggaaaccatcaacgagttccggaatcgtcatctgtcagagcttacagagttgtgtgctacgtcaggaagttctcttggctatggattttccagagctacgtccaaatcgaagtctttcacctccgacgacgaaaaccaaacagtggatggcacactagcaatctgatgctgatgagataaaatgggatccccttgctagcgctagattggttgcattgttcagtagataatcctgtttcatgtggaaggagggtggaataattattcatataagagctgtcataaaagttggcgtccatttttgtatgttagacacttagtgcttgtttgagagtaatggaagggactgagagggccaaaatcctttatgccccgtttgtttccttttattttgaggacttggaatctaactattggaataggctatttttttaaaatgtgacattccaccacttccaaagttatcatatgagcctatctctaattattcataggatgagatatgtaatttgattctatagatttacatgctatttttccgatgtacaaattaaaacacactcttct

SEQ ID NO: 206950 - DNA, 4020 bp, Zea Mays
acaaaaccccaagaccacaaggaaacacgagcgctagtggcaggtggcagcgagtgagaaggtgagctcgcctccctcgcgcctcccattcccccctcgcgcagtcctatcgtaggaatgggatgaggccggggcccctccctccttcctcctcggcgcttctcccgtgacaagcctccattctccagataggggaggatggatttgtccaggttcgcctccggcgtcgggcccagccgcgtggccccgcgggcgggcctgcagatcggcgccgccgagaatggcttccgggcctgctccctgcggcgagcacggcaccgcggcggcgggaacgggaacctcacggccgccgcgtccaccctccgcggccgcggcgggctcttctacctggctcccacgcgccggagtcatcccagtctccggctcttctacctgcttcccacgcgcgggagtcatctcagtctccgcgccagatggcggccgcgctgccagggcaacgactcattggcctacgtcgacggccccttggagaccgctaagggctccggcgaggtcgacgacaacgtgcccaccagctcggggtccgacgacgacaggggcctcgccgacgtcgacggcctcagggagatgctgcagaggtccaggaacgagctggaggtggccagggtcaacagcaccatgttcgaggagaaggcgcagcggatatccgagtcggccatcgcgttcaaggaccgcgccgacggcgcccagagggatgtgtgcgcggccgtagccaccgtgcaggagatcatcagcaaggaggcggacgccaaggaggccgtccagaaggctaccatggcgctgtccatggccgaggcgaggctgcagctggccgcggaggcgctggaggccaaccggggctcggtaggcccgacggaggttagcatcgaaggcatggagcaggaggccctcctgtctgcacaggaagagattaaggattgtcgggcagccctgtcgcggtgcgcggaggagctgagtcgtgtccaggacaagaaaatggagctgcagaaggaggttgataggctgacggatctcgctgggaaggcccagatggatgcgtccaacgccgaagaagatgttgccaatataatggtgctggctgagcaggcggtggctcttgagatggaagcctcacagcgtgtcaacgatgcggaaatggtgctgctgaaagcggagaaggccatagcctcgattgataccgtggtggagctaccgtcacctgctgaagagcagagaagcactgaagaagacagcgtttctgaagggtacgagtatagcagcgatgtcactgatgatgtttatgtaagggatgaggtgtcaagtatcgagcgcctaatggtcggtgacttgactgttcagggctttgagcagcttgaaccatcccgtgaaatatatgatgaagaaagcagtaataagatgtctgttgagcctcagaaagaagctgagtctgattcagataagtcgaaacaagggaagaagcaagaaatggaacgaaaggagcacaccaaggaaccactgagtgctccaaaagcactggtgaagagatcatcccgtttcttctcggcatctttcttctcctccaaagttgatggagagtttacacctacatctgtcttccgagggttaatgaaatcagtgcaaaaacaagctccgaagcttgttgttgggatattgcttctcggtgcaggggcattcttcttaaatagggctgagaagagtcaactatttcagcagcaaggcattgccacaagtattggaaaggtaacctccacaacaaagcccatagttcttgagatacggcgaattccacagagagtaaagaagctaatagagctcttacctcatcaagaggtaaatgaggaagaagcttcacttttcgacatactatacttgcttctggccagtgttatttttgtaccattatttcagaaaatccctggagcaaatactggcttaatatcctgcacctgcagctttctgtggaaagactaagctcgatgaagaagtatgtctttggcttgggatctgctcaggtgctggctactactgctgctgttggtgtgatagctcattgttttgccgcactaccaggaccagcagcaattgttgttgggagtggcttggctctgtcatccacagctgttgtcttgcaagtattgcaagagcgtggtgaaagtacgtcacgtcatggacgtgctacattttctgtgttattgttccaggatttggctgtggtggttctgttgatattaatacctctcatatcacctaattcttcaaaaggaggggttggtttccaagcaatagcagaagccatgggaatggctgcagtcaaagcagtagctgctataactgccataattgctggaggtcgtctgttgctccggcctatttacaaacaaattgctgaaaatcagaatgctgagatattttcagcaaatacactccttgttatttttggcacaagtcttcttacagcccgggctgggttatcgatggcacttggagcttttttagctggtctgttactagcagaaacagagttctcattgcaggttgagtcagatatagctccctatcgtggtcttctgttaggacttttctttatgacggttggaatgtctattgacccaaagctgcttctgtcaaacttcccagcgatctctgtgatattgagtctcttgataattggaaagacattgttagttacatttgtcggcagggtgtttggggtttctgctatagctgccattcgtgttggcctcttgcttgcacctggtggtgagtttgcttttgttgcctttggagaagctgtcaaccagggtcttctatcacctcaattaacatcgttgctatttttagtcgttggcatttcaatggctctgacaccatggttagctgctggagggcagtttctggcatcaaaatttgagcagcatgatgtgaggagtttattgcccgtggaaagtgagactgacgatttgcaagaccatatcattatattaggctttggacgtgttgggcagatcattgcacaactcctgtcagagcggttaattccttttgttgcacttgatgctggaagtgatcgggttgcagctgggcgtgcacttgatcttccagtgtattttggtgattctggaaagcagagaggtactgcacaaaaattggagctgaaagagcttgtgctgctgcaattactttggatactcctggtgcaaactacagagctgtctgggcgttgaacaaatatttcccaaatgtgaagacatttgttagagcacatgatgttgatcatggtgttaatttggagaaagctggtgcaacggcggttgtccctgagaccttggagccaagtcttcagctagctgctgctgtccttgcacaagcaaaactcccaatgtcagagattcaggaaaccatcaacgagttccggaatcgtcatctgtcagagcttacagagttgtgtgctacgtcaggaagttctcttggctatggattttccagagctacgtccaaatcgaagtctttcacctccgacgacgaaaaccaaacagtggatggcacactagcaatctgatgctgatgagataaaatgggatccccttgctagcgctagattggttgcattgttcagtagataatcctgtttcatgtggaaggagggtggaataattattcatataagagctgtcataaaagttggcgtccatttttgtatgttagacacttagtgcttgtttgagagtaatggaagggactgagagggccaaaatcctttatgccccgtttgtttccttttattttgaggacttggaatctaactattggaataggctatttttttaaaatgtgacattccaccacttccaaagttatcatatgagcctatctctaattattcataggatgagatatgtaatttgattctatagatttacatgctatttttccgatgtacaaattaaaacacactcttct

SEQ ID NO: 206951 - DNA, 4114 bp, Zea Mays
cgagaagacacgcaaaacaaaaccccaagaccacaaggaaacacgagcgctagtggcaggtggcagcgagtgagaaggtgagctcgcctccctcgcgcctcccattcccccctcgcgcagtcctatcgtaggaatgggatgaggccggggcccctccctccttcctcctcggcgcttctcccgtgacaagcctccattctccagataggggaggatggatttgtccaggttcgcctccggcgtcgggcccagccgcgtggccccgcgggcgggcctgcagatcggcgccgccgagaatggcttccgggcctgctccctgcggcgagcacggcaccgcggcggcgggaacgggaacctcacggccgccgcgtccaccctccgcggccgcggcgggctcttctacctggctcccacgcgccggagtcatcccagtctccggctcttctacctgcttcccacgcgcgggagtcatctcagtctccgcgccagatggcggccgcgctgccagggcaacgactcattggcctacgtcgacggccccttggagaccgctaagggctccggcgaggtcgacgacaacgtgcccaccagctcggggtccgacgacgacaggggcctcgccgacgtcgacggcctcagggagatgctgcagaggtccaggaacgagctggaggtggccagggtcaacagcaccatgttcgaggagaaggcgcagcggatatccgagtcggccatcgcgttcaaggaccgcgccgacggcgcccagagggatgtgtgcgcggccgtagccaccgtgcaggagatcatcagcaaggaggcggacgccaaggaggccgtccagaaggctaccatggcgctgtccatggccgaggcgaggctgcagctggccgcggaggcgctggaggccaaccggggctcggtaggcccgacggaggttagcatcgaaggcatggagcaggaggccctcctgtctgcacaggaagagattaaggattgtcgggcagccctgtcgcggtgcgcggaggagctgagtcgtgtccaggacaagaaaatggagctgcagaaggaggttgataggctgacggatctcgctgggaaggcccagatggatgcgtccaacgccgaagaagatgttgccaatataatggtgctggctgagcaggcggtggctcttgagatggaagcctcacagcgtgtcaacgatgcggaaatggtgctgctgaaagcggagaaggccatagcctcgattgataccgtggtggagctaccgtcacctgctgaagagcagagaagcactgaagaagacagcgtttctgaagggtacgagtatagcagcgatgtcactgatgatgtttatgtaagggatgaggtgtcaagtatcgagcgcctaatggtcggtgacttgactgttcagggctttgagcagcttgaaccatcccgtgaaatatatgatgaagaaagcagtaataagatgtctgttgagcctcagaaagaagctgagtctgattcagataagtcgaaacaagggaagaagcaagaaatggaacgaaaggagcacaccaaggaaccactgagtgctccaaaagcactggtgaagagatcatcccgtttcttctcggcatctttcttctcctccaaagttgatggagagtttacacctacatctgtcttccgagggttaatgaaatcagtgcaaaaacaagctccgaagcttgttgttgggatattgcttctcggtgcaggggcattcttcttaaatagggctgagaagagtcaactatttcagcagcaaggcattgccacaagtattggaaaggtaacctccacaacaaagcccatagttcttgagatacggcgaattccacagagagtaaagaagctaatagagctcttacctcatcaagaggtaaatgaggaagaagcttcacttttcgacatactatacttgcttctggccagtgttatttttgtaccattatttcagaaaatccctggaggcagtcctgttcttggatatcttgctgctggtgtcctcattggtccatatgggctgtccatcatccgtaatgtgcatgagacaaaggcaattgcggaatttggagttgtgttcttactatttaacattggacttgagctttctgtggaaagactaagctcgatgaagaagtgctggctactactgctgctgttggtgtgatagctcattgttttgccgcactaccaggaccagcagcaattgttgttgggagtggcttggctctgtcatccacagctgttgtcttgcaagtattgcaagagcgtggtgaaagtacgtcacgtcatggacgtgctacattttctgtgttattgttccaggatttggctgtggtggttctgttgatattaatacctctcatatcacctaattcttcaaaaggaggggttggtttccaagcaatagcagaagccatgggaatggctgcagtcaaagcagtagctgctataactgccataattgctggaggtcgtctgttgctccggcctatttacaaacaaattgctgaaaatcagaatgctgagatattttcagcaaatacactccttgttatttttggcacaagtcttcttacagcccgggctgggttatcgatggcacttggagcttttttagctggtctgttactagcagaaacagagttctcattgcaggttgagtcagatatagctccctatcgtggtcttctgttaggacttttctttatgacggttggaatgtctattgacccaaagctgcttctgtcaaacttcccagcgatctctgtgatattgagtctcttgataattggaaagacattgttagttacatttgtcggcagggtgtttggggtttctgctatagctgccattcgtgttggcctcttgcttgcacctggtggtgagtttgcttttgttgcctttggagaagctgtcaaccagggtcttctatcacctcaattaacatcgttgctatttttagtcgttggcatttcaatggctctgacaccatggttagctgctggagggcagtttctggcatcaaaatttgagcagcatgatgtgaggagtttattgcccgtggaaagtgagactgacgatttgcaagaccatatcattatattaggctttggacgtgttgggcagatcattgcacaactcctgtcagagcggttaattccttttgttgcacttgatgctggaagtgatcgggttgcagctgggcgtgcacttgatcttccagtgtattttggtgattctggaaagcagagaggtactgcacaaaaattggagctgaaagagcttgtgctgctgcaattactttggatactcctggtgcaaactacagagctgtctgggcgttgaacaaatatttcccaaatgtgaagacatttgttagagcacatgatgttgatcatggtgttaatttggagaaagctggtgcaacggcggttgtccctgagaccttggagccaagtcttcagctagctgctgctgtccttgcacaagcaaaactcccaatgtcagagattcaggaaaccatcaacgagttccggaatcgtcatctgtcagagcttacagagttgtgtgctacgtcaggaagttctcttggctatggattttccagagctacgtccaaatcgaagtctttcacctccgacgacgaaaaccaaacagtggatggcacactagcaatctgatgctgatgagataaaatgggatccccttgctagcgctagattggttgcattgttcagtagataatcctgtttcatgtggaaggagggtggaataattattcatataagagctgtcataaaagttggcgtccatttttgtatgttagacacttagtgcttgtttgagagtaatggaagggactgagagggccaaaatcctttatgccccgtttgtttccttttattttgaggacttggaatctaactattggaataggctatttttttaaaatgtgacattccaccacttccaaagttatcatatgagcctatctctaattattcataggatgagatatgtaatttgattctatagatttacatgctatttttccgatgtacaaattaaaacacactcttct

SEQ ID NO: 206952 - DNA, 4091 bp, Zea Mays
cacggggcagcctcaccaccgctcacatggctccgctcggcttgttttcgggcgggctttgcctgctccaccgccgcagctgccgagaagacacgcaaaacaaaaccccaagaccacaaggaaacacgagcgctagtggcaggtggcagcgagtgagaaggtgagctcgcctccctcgcgcctcccattcccccctcgcgcagtcctatcgtaggaatgggatgaggccggggcccctccctccttcctcctcggcgcttctcccgtgacaagcctccattctccagataggggaggatggatttgtccaggttcgcctccggcgtcgggcccagccgcgtggccccgcgggcgggcctgcagatcggcgccgccgagaatggcttccgggcctgctccctgcggcgagcacggcaccgcggcggcgggaacgggaacctcacggccgccgcgtccaccctccgcggccgcggcgggctcttctacctggctcccacgcgccggagtcatcccagtctccggctcttctacctgcttcccacgcgcgggagtcatctcagtctccgcgccagatggcggccgcgctgccagggcaacgactcattggcctacgtcgacggccccttggagaccgctaagggctccggcgaggtcgacgacaacgtgcccaccagctcggggtccgacgacgacaggggcctcgccgacgtcgacggcctcagggagatgctgcagaggtccaggaacgagctggaggtggccagggtcaacagcaccatgttcgaggagaaggcgcagcggatatccgagtcggccatcgcgttcaaggaccgcgccgacggcgcccagagggatgtgtgcgcggccgtagccaccgtgcaggagatcatcagcaaggaggcggacgccaaggaggccgtccagaaggctaccatggcgctgtccatggccgaggcgaggctgcagctggccgcggaggcgctggaggccaaccggggctcggtaggcccgacggaggttagcatcgaaggcatggagcaggaggccctcctgtctgcacaggaagagattaaggattgtcgggcagccctgtcgcggtgcgcggaggagctgagtcgtgtccaggacaagaaaatggagctgcagaaggaggttgataggctgacggatctcgctgggaaggcccagatggatgcgtccaacgccgaagaagatgttgccaatataatggtgctggctgagcaggcggtggctcttgagatggaagcctcacagcgtgtcaacgatgcggaaatggtgctgctgaaagcggagaaggccatagcctcgattgataccgtggtggagctaccgtcacctgctgaagagcagagaagcactgaagaagacagcgtttctgaagggtacgagtatagcagcgatgtcactgatgatgtttatgtaagggatgaggtgtcaagtatcgagcgcctaatggtcggtgacttgactgttcagggctttgagcagcttgaaccatcccgtgaaatatatgatgaagaaagcagtaataagatgtctgttgagcctcagaaagaagctgagtctgattcagataagtcgaaacaagggaagaagcaagaaatggaacgaaaggagcacaccaaggaaccactgagtgctccaaaagcactggtgaagagatcatcccgtttcttctcggcatctttcttctcctccaaagttgatggagagtttacacctacatctgtcttccgagggttaatgaaatcagtgcaaaaacaagctccgaagcttgttgttgggatattgcttctcggtgcaggggcattcttcttaaatagggctgagaagagtcaactatttcagcagcaaggcattgccacaagtattggaaaggtaacctccacaacaaagcccatagttcttgagatacggcgaattccacagagagtaaagaagctaatagagctcttacctcatcaagaggtaaatgaggaagaagcttcacttttcgacatactatacttgcttctggccagtgttatttttgtaccattatttcagaaaatccctggagcaaatactggcttaatatcctgcacctgcagctttctgtggaaagactaagctcgatgaagaagtgctggctactactgctgctgttggtgtgatagctcattgttttgccgcactaccaggaccagcagcaattgttgttgggagtggcttggctctgtcatccacagctgttgtcttgcaagtattgcaagagcgtggtgaaagtacgtcacgtcatggacgtgctacattttctgtgttattgttccaggatttggctgtggtggttctgttgatattaatacctctcatatcacctaattcttcaaaaggaggggttggtttccaagcaatagcagaagccatgggaatggctgcagtcaaagcagtagctgctataactgccataattgctggaggtcgtctgttgctccggcctatttacaaacaaattgctgaaaatcagaatgctgagatattttcagcaaatacactccttgttatttttggcacaagtcttcttacagcccgggctgggttatcgatggcacttggagcttttttagctggtctgttactagcagaaacagagttctcattgcaggttgagtcagatatagctccctatcgtggtcttctgttaggacttttctttatgacggttggaatgtctattgacccaaagctgcttctgtcaaacttcccagcgatctctgtgatattgagtctcttgataattggaaagacattgttagttacatttgtcggcagggtgtttggggtttctgctatagctgccattcgtgttggcctcttgcttgcacctggtggtgagtttgcttttgttgcctttggagaagctgtcaaccagggtcttctatcacctcaattaacatcgttgctatttttagtcgttggcatttcaatggctctgacaccatggttagctgctggagggcagtttctggcatcaaaatttgagcagcatgatgtgaggagtttattgcccgtggaaagtgagactgacgatttgcaagaccatatcattatattaggctttggacgtgttgggcagatcattgcacaactcctgtcagagcggttaattccttttgttgcacttgatgctggaagtgatcgggttgcagctgggcgtgcacttgatcttccagtgtattttggtgattctggaaagcagagaggtactgcacaaaaattggagctgaaagagcttgtgctgctgcaattactttggatactcctggtgcaaactacagagctgtctgggcgttgaacaaatatttcccaaatgtgaagacatttgttagagcacatgatgttgatcatggtgttaatttggagaaagctggtgcaacggcggttgtccctgagaccttggagccaagtcttcagctagctgctgctgtccttgcacaagcaaaactcccaatgtcagagattcaggaaaccatcaacgagttccggaatcgtcatctgtcagagcttacagagttgtgtgctacgtcaggaagttctcttggctatggattttccagagctacgtccaaatcgaagtctttcacctccgacgacgaaaaccaaacagtggatggcacactagcaatctgatgctgatgagataaaatgggatccccttgctagcgctagattggttgcattgttcagtagataatcctgtttcatgtggaaggagggtggaataattattcatataagagctgtcataaaagttggcgtccatttttgtatgttagacacttagtgcttgtttgagagtaatggaagggactgagagggccaaaatcctttatgccccgtttgtttccttttattttgaggacttggaatctaactattggaataggctatttttttaaaatgtgacattccaccacttccaaagttatcatatgagcctatctctaattattcataggatgagatatgtaatttgattctatagatttacatgctatttttccgatgtacaaattaaaacacactcttct

SEQ ID NO: 206953 - DNA, 4225 bp, Zea Mays
cacggggcagcctcaccaccgctcacatggctccgctcggcttgttttcgggcgggctttgcctgctccaccgccgcagctgccgagaagacacgcaaaacaaaaccccaagaccacaaggaaacacgagcgctagtggcaggtggcagcgagtgagaaggtgagctcgcctccctcgcgcctcccattcccccctcgcgcagtcctatcgtaggaatgggatgaggccggggcccctccctccttcctcctcggcgcttctcccgtgacaagcctccattctccagataggggaggatggatttgtccaggttcgcctccggcgtcgggcccagccgcgtggccccgcgggcgggcctgcagatcggcgccgccgagaatggcttccgggcctgctccctgcggcgagcacggcaccgcggcggcgggaacgggaacctcacggccgccgcgtccaccctccgcggccgcggcgggctcttctacctggctcccacgcgccggagtcatcccagtctccggctcttctacctgcttcccacgcgcgggagtcatctcagtctccgcgccagatggcggccgcgctgccagggcaacgactcattggcctacgtcgacggccccttggagaccgctaagggctccggcgaggtcgacgacaacgtgcccaccagctcggggtccgacgacgacaggggcctcgccgacgtcgacggcctcagggagatgctgcagaggtccaggaacgagctggaggtggccagggtcaacagcaccatgttcgaggagaaggcgcagcggatatccgagtcggccatcgcgttcaaggaccgcgccgacggcgcccagagggatgtgtgcgcggccgtagccaccgtgcaggagatcatcagcaaggaggcggacgccaaggaggccgtccagaaggctaccatggcgctgtccatggccgaggcgaggctgcagctggccgcggaggcgctggaggccaaccggggctcggtaggcccgacggaggttagcatcgaaggcatggagcaggaggccctcctgtctgcacaggaagagattaaggattgtcgggcagccctgtcgcggtgcgcggaggagctgagtcgtgtccaggacaagaaaatggagctgcagaaggaggttgataggctgacggatctcgctgggaaggcccagatggatgcgtccaacgccgaagaagatgttgccaatataatggtgctggctgagcaggcggtggctcttgagatggaagcctcacagcgtgtcaacgatgcggaaatggtgctgctgaaagcggagaaggccatagcctcgattgataccgtggtggagctaccgtcacctgctgaagagcagagaagcactgaagaagacagcgtttctgaagggtacgagtatagcagcgatgtcactgatgatgtttatgtaagggatgaggtgtcaagtatcgagcgcctaatggtcggtgacttgactgttcagggctttgagcagcttgaaccatcccgtgaaatatatgatgaagaaagcagtaataagatgtctgttgagcctcagaaagaagctgagtctgattcagataagtcgaaacaagggaagaagcaagaaatggaacgaaaggagcacaccaaggaaccactgagtgctccaaaagcactggtgaagagatcatcccgtttcttctcggcatctttcttctcctccaaagttgatggagagtttacacctacatctgtcttccgagggttaatgaaatcagtgcaaaaacaagctccgaagcttgttgttgggatattgcttctcggtgcaggggcattcttcttaaatagggctgagaagagtcaactatttcagcagcaaggcattgccacaagtattggaaaggtaacctccacaacaaagcccatagttcttgagatacggcgaattccacagagagtaaagaagctaatagagctcttacctcatcaagaggtaaatgaggaagaagcttcacttttcgacatactatacttgcttctggccagtgttatttttgtaccattatttcagaaaatccctggaggcagtcctgttcttggatatcttgctgctggtgtcctcattggtccatatgggctgtccatcatccgtaatgtgcatgagacaaaggcaattgcggaatttggagttgtgttcttactatttaacattggacttgagctttctgtggaaagactaagctcgatgaagaagtatgtctttggcttgggatctgctcaggtgctggctactactgctgctgttggtgtgatagctcattgttttgccgcactaccaggaccagcagcaattgttgttgggagtggcttggctctgtcatccacagctgttgtcttgcaagtattgcaagagcgtggtgaaagtacgtcacgtcatggacgtgctacattttctgtgttattgttccaggatttggctgtggtggttctgttgatattaatacctctcatatcacctaattcttcaaaaggaggggttggtttccaagcaatagcagaagccatgggaatggctgcagtcaaagcagtagctgctataactgccataattgctggaggtcgtctgttgctccggcctatttacaaacaaattgctgaaaatcagaatgctgagatattttcagcaaatacactccttgttatttttggcacaagtcttcttacagcccgggctgggttatcgatggcacttggagcttttttagctggtctgttactagcagaaacagagttctcattgcaggttgagtcagatatagctccctatcgtggtcttctgttaggacttttctttatgacggttggaatgtctattgacccaaagctgcttctgtcaaacttcccagcgatctctgtgatattgagtctcttgataattggaaagacattgttagttacatttgtcggcagggtgtttggggtttctgctatagctgccattcgtgttggcctcttgcttgcacctggtggtgagtttgcttttgttgcctttggagaagctgtcaaccagggtcttctatcacctcaattaacatcgttgctatttttagtcgttggcatttcaatggctctgacaccatggttagctgctggagggcagtttctggcatcaaaatttgagcagcatgatgtgaggagtttattgcccgtggaaagtgagactgacgatttgcaagaccatatcattatattaggctttggacgtgttgggcagatcattgcacaactcctgtcagagcggttaattccttttgttgcacttgatgctggaagtgatcgggttgcagctgggcgtgcacttgatcttccagtgtattttggtgattctggaaagcagagaggtactgcacaaaaattggagctgaaagagcttgtgctgctgcaattactttggatactcctggtgcaaactacagagctgtctgggcgttgaacaaatatttcccaaatgtgaagacatttgttagagcacatgatgttgatcatggtgttaatttggagaaagctggtgcaacggcggttgtccctgagaccttggagccaagtcttcagctagctgctgctgtccttgcacaagcaaaactcccaatgtcagagattcaggaaaccatcaacgagttccggaatcgtcatctgtcagagcttacagagttgtgtgctacgtcaggaagttctcttggctatggattttccagagctacgtccaaatcgaagtctttcacctccgacgacgaaaaccaaacagtggatggcacactagcaatctgatgctgatgagataaaatgggatccccttgctagcgctagattggttgcattgttcagtagataatcctgtttcatgtggaaggagggtggaataattattcatataagagctgtcataaaagttggcgtccatttttgtatgttagacacttagtgcttgtttgagagtaatggaagggactgagagggccaaaatcctttatgccccgtttgtttccttttattttgaggacttggaatctaactattggaataggctatttttttaaaatgtgacattccaccacttccaaagttatcatatgagcctatctctaattattcataggatgagatatgtaatttgattctatagatttacatgctatttttccgatgtacaaattaaaacacactcttct

SEQ ID NO: 206954 - DNA, 3706 bp, Zea Mays
gcaaaacaaaaccccaagaccacaaggaaacacgagcgctagtggcaggtggcagcgagtgagaaggtgagctcgcctccctcgcgcctcccattcccccctcgcgcagtcctatcgtaggaatgggatgaggccggggcccctccctccttcctcctcggcgcttctcccgtgacaagcctccattctccagtccgtgagcactccactccctgtctccgcttttgtttctctcgtcccaacctccccttttctgcgggtttgatccgcacggtacaggataggggaggatggatttgtccaggttcgcctccggcgtcgggcccagccgcgtggccccgcgggcgggcctgcagatcggcgccgccgagaatggcttccgggcctgctccctgcggcgagcacggcaccgcggcggcgggaacgggaacctcacggccgccgcgtccaccctccgcggccgcggcgggctcttctacctggctcccacgcgccggagtcatcccagtctccggctcttctacctgcttcccacgcgcgggagtcatctcagtctccgcgccagatggcggccgcgctgccagggcaacgactcattggcctacgtcgacggccccttggagaccgctaagggctccggcgaggtcgacgacaacgtgcccaccagctcggggtccgacgacgacaggggcctcgccgacgtcgacggcctcagggagatgctgcagaggtccaggaacgagctggaggtggccagggtcaacagcaccatgttcgaggagaaggcgcagcggatatccgagtcggccatcgcgttcaaggaccgcgccgacggcgcccagagggatgtgtgcgcggccgtagccaccgtgcaggagatcatcagcaaggaggcggacgccaaggaggccgtccagaaggctaccatggcgctgtccatggccgaggcgaggctgcagctggccgcggaggcgctggaggccaaccggggctcggtaggcccgacggaggttagcatcgaaggcatggagcaggaggccctcctgtctgcacaggaagagattaaggattgtcgggcagccctgtcgcggtgcgcggaggagctgagtcgtgtccaggacaagaaaatggagctgcagaaggaggttgataggctgacggatctcgctgggaaggcccagatggatgcgtccaacgccgaagaagatgttgccaatataatggtgctggctgagcaggcggtggctcttgagatggaagcctcacagcgtgtcaacgatgcggaaatggtgctgctgaaagcggagaaggccatagcctcgattgataccgtggtggagctaccgtcacctgctgaagagcagagaagcactgaagaagacagcgtttctgaagggtacgagtatagcagcgatgtcactgatgatgtttatgtaagggatgaggtgtcaagtatcgagcgcctaatggtcggtgacttgactgttcagggctttgagcagcttgaaccatcccgtgaaatatatgatgaagaaagcagtaataagatgtctgttgagcctcagaaagaagctgagtctgattcagataagtcgaaacaagggaagaagcaagaaatggaacgaaaggagcacaccaaggaaccactgagtgctccaaaagcactggtgaagagatcatcccgtttcttctcggcatctttcttctcctccaaagttgatggagagtttacacctacatctgtcttccgagggttaatgaaatcagtgcaaaaacaagctccgaagcttgttgttgggatattgcttctcggtgcaggggcattcttcttaaatagggctgagaagagtcaactatttcagcagcaaggcattgccacaagtattggaaaggtaacctccacaacaaagcccatagttcttgagatacggcgaattccacagagagtaaagaagctaatagagctcttacctcatcaagaggtaaatgaggaagaagcttcacttttcgacatactatacttgcttctggccagtgttatttttgtaccattatttcagaaaatccctggaggcagtcctgttcttggatatcttgctgctggtgtcctcattggtccatatgggctgtccatcatccgtaatgtgcatgagacaaaggcaattgcggaatttggagttgtgttcttactatttaacattggacttgagctttctgtggaaagactaagctcgatgaagaagtgctggctactactgctgctgttggtgtgatagctcattgttttgccgcactaccaggaccagcagcaattgttgttgggagtggcttggctctgtcatccacagctgttgtcttgcaagtattgcaagagcgtggtgaaagtacgtcacgtcatggacgtgctacattttctgtgttattgttccaggatttggctgtggtggttctgttgatattaatacctctcatatcacctaattcttcaaaaggaggggttggtttccaagcaatagcagaagccatgggaatggctgcagtcaaagcagtagctgctataactgccataattgctggaggtcgtctgttgctccggcctatttacaaacaaattgctgaaaatcagaatgctgagatattttcagcaaatacactccttgttatttttggcacaagtcttcttacagcccgggctgggttatcgatggcacttggagcttttttagctggtctgttactagcagaaacagagttctcattgcaggttgagtcagatatagctccctatcgtggtcttctgttaggacttttctttatgacggttggaatgtctattgacccaaagctgcttctgtcaaacttcccagcgatctctgtgatattgagtctcttgataattggaaagacattgttagttacatttgtcggcagggtgtttggggtttctgctatagctgccattcgtgttggcctcttgcttgcacctggtggtgagtttgcttttgttgcctttggagaagctgtcaaccagggtcttctatcacctcaattaacatcgttgctatttttagtcgttggcatttcaatggctctgacaccatggttagctgctggagggcagtttctggcatcaaaatttgagcagcatgatgtgaggagtttattgcccgtggaaagtgagactgacgatttgcaagaccatatcattatattaggctttggacgtgttgggcagatcattgcacaactcctgtcagagcggttaattccttttgttgcacttgatgctggaagtgatcgggttgcagctgggcgtgcacttgatcttccagtgtattttggtgattctggaaagcagagaggtactgcacaaaaattggagctgaaagagcttgtgctgctgcaattactttggatactcctggtgcaaactacagagctgtctgggcgttgaacaaatatttcccaaatgtgaagacatttgttagagcacatgatgttgatcatggtgttaatttggagaaagctggtgcaacggcggttgtccctgagaccttggagccaagtcttcagctagctgctgctgtccttgcacaagcaaaactcccaatgtcagagattcaggaaaccatcaacgagttccggaatcgtcatctgtcagagcttacagagaaagcttctggcaaacaaaaggatatgcagcgaa

SEQ ID NO: 206955 - DNA, 3658 bp, Zea Mays
cgagaagacacgcaaaacaaaaccccaagaccacaaggaaacacgagcgctagtggcaggtggcagcgagtgagaaggtgagctcgcctccctcgcgcctcccattcccccctcgcgcagtcctatcgtaggaatgggatgaggccggggcccctccctccttcctcctcggcgcttctcccgtgacaagcctccattctccagataggggaggatggatttgtccaggttcgcctccggcgtcgggcccagccgcgtggccccgcgggcgggcctgcagatcggcgccgccgagaatggcttccgggcctgctccctgcggcgagcacggcaccgcggcggcgggaacgggaacctcacggccgccgcgtccaccctccgcggccgcggcgggctcttctacctggctcccacgcgccggagtcatcccagtctccggctcttctacctgcttcccacgcgcgggagtcatctcagtctccgcgccagatggcggccgcgctgccagggcaacgactcattggcctacgtcgacggccccttggagaccgctaagggctccggcgaggtcgacgacaacgtgcccaccagctcggggtccgacgacgacaggggcctcgccgacgtcgacggcctcagggagatgctgcagaggtccaggaacgagctggaggtggccagggtcaacagcaccatgttcgaggagaaggcgcagcggatatccgagtcggccatcgcgttcaaggaccgcgccgacggcgcccagagggatgtgtgcgcggccgtagccaccgtgcaggagatcatcagcaaggaggcggacgccaaggaggccgtccagaaggctaccatggcgctgtccatggccgaggcgaggctgcagctggccgcggaggcgctggaggccaaccggggctcggtaggcccgacggaggttagcatcgaaggcatggagcaggaggccctcctgtctgcacaggaagagattaaggattgtcgggcagccctgtcgcggtgcgcggaggagctgagtcgtgtccaggacaagaaaatggagctgcagaaggaggttgataggctgacggatctcgctgggaaggcccagatggatgcgtccaacgccgaagaagatgttgccaatataatggtgctggctgagcaggcggtggctcttgagatggaagcctcacagcgtgtcaacgatgcggaaatggtgctgctgaaagcggagaaggccatagcctcgattgataccgtggtggagctaccgtcacctgctgaagagcagagaagcactgaagaagacagcgtttctgaagggtacgagtatagcagcgatgtcactgatgatgtttatgtaagggatgaggtgtcaagtatcgagcgcctaatggtcggtgacttgactgttcagggctttgagcagcttgaaccatcccgtgaaatatatgatgaagaaagcagtaataagatgtctgttgagcctcagaaagaagctgagtctgattcagataagtcgaaacaagggaagaagcaagaaatggaacgaaaggagcacaccaaggaaccactgagtgctccaaaagcactggtgaagagatcatcccgtttcttctcggcatctttcttctcctccaaagttgatggagagtttacacctacatctgtcttccgagggttaatgaaatcagtgcaaaaacaagctccgaagcttgttgttgggatattgcttctcggtgcaggggcattcttcttaaatagggctgagaagagtcaactatttcagcagcaaggcattgccacaagtattggaaaggtaacctccacaacaaagcccatagttcttgagatacggcgaattccacagagagtaaagaagctaatagagctcttacctcatcaagaggtaaatgaggaagaagcttcacttttcgacatactatacttgcttctggccagtgttatttttgtaccattatttcagaaaatccctggaggcagtcctgttcttggatatcttgctgctggtgtcctcattggtccatatgggctgtccatcatccgtaatgtgcatgagacaaaggcaattgcggaatttggagttgtgttcttactatttaacattggacttgagctttctgtggaaagactaagctcgatgaagaagtatgtctttggcttgggatctgctcaggtgctggctactactgctgctgttggtgtgatagctcattgttttgccgcactaccaggaccagcagcaattgttgttgggagtggcttggctctgtcatccacagctgttgtcttgcaagtattgcaagagcgtggtgaaagtacgtcacgtcatggacgtgctacattttctgtgttattgttccaggatttggctgtggtggttctgttgatattaatacctctcatatcacctaattcttcaaaaggaggggttggtttccaagcaatagcagaagccatgggaatggctgcagtcaaagcagtagctgctataactgccataattgctggaggtcgtctgttgctccggcctatttacaaacaaattgctgaaaatcagaatgctgagatattttcagcaaatacactccttgttatttttggcacaagtcttcttacagcccgggctgggttatcgatggcacttggagcttttttagctggtctgttactagcagaaacagagttctcattgcaggttgagtcagatatagctccctatcgtggtcttctgttaggacttttctttatgacggttggaatgtctattgacccaaagctgcttctgtcaaacttcccagcgatctctgtgatattgagtctcttgataattggaaagacattgttagttacatttgtcggcagggtgtttggggtttctgctatagctgccattcgtgttggcctcttgcttgcacctggtggtgagtttgcttttgttgcctttggagaagctgtcaaccagggtcttctatcacctcaattaacatcgttgctatttttagtcgttggcatttcaatggctctgacaccatggttagctgctggagggcagtttctggcatcaaaatttgagcagcatgatgtgaggagtttattgcccgtggaaagtgagactgacgatttgcaagaccatatcattatattaggctttggacgtgttgggcagatcattgcacaactcctgtcagagcggttaattccttttgttgcacttgatgctggaagtgatcgggttgcagctgggcgtgcacttgatcttccagtgtattttggtgattctggaaagcagagaggtactgcacaaaaattggagctgaaagagcttgtgctgctgcaattactttggatactcctggtgcaaactacagagctgtctgggcgttgaacaaatatttcccaaatgtgaagacatttgttagagcacatgatgttgatcatggtgttaatttggagaaagctggtgcaacggcggttgtccctgagaccttggagccaagtcttcagctagctgctgctgtccttgcacaagcaaaactcccaatgtcagagattcaggaaaccatcaacgagttccggaatcgtcatctgtcagagcttacagagaaagcttctggcaaacaaaaggatatgcagcgaa

SEQ ID NO: 206956 - DNA, 3225 bp, Zea Mays
acaaggaaacacgagcgctagtggcaggtggcagcgagtgagaaggtgagctcgcctccctcgcgcctcccattcccccctcgcgcagtcctatcgtaggaatgggatgaggccggggcccctccctccttcctcctcggcgcttctcccgtgacaagcctccattctccagtccgtgagcactccactccctgtctccgcttttgtttctctcgtcccaacctccccttttctgcgggtttgatccgcacggtacaggataggggaggatggatttgtccaggttcgcctccggcgtcgggcccagccgcgtggccccgcgggcgggcctgcagatcggcgccgccgagaatggcttccgggcctgctccctgcggcgagcacggcaccgcggcggcgggaacgggaacctcacggccgccgcgtccaccctccgcggccgcggcgggctcttctacctggctcccacgcgccggagtcatcccagtctccggctcttctacctgcttcccacgcgcgggagtcatctcagtctccgcgccagatggcggccgcgctgccagggcaacgactcattggcctacgtcgacggccccttggagaccgctaagggctccggcgaggtcgacgacaacgtgcccaccagctcggggtccgacgacgacaggggcctcgccgacgtcgacggcctcagggagatgctgcagaggtccaggaacgagctggaggtggccagggtcaacagcaccatgttcgaggagaaggcgcagcggatatccgagtcggccatcgcgttcaaggaccgcgccgacggcgcccagagggatgtcactgaagaagacagcgtttctgaagggtacgagtatagcagcgatgtcactgatgatgtttatgtaagggatgaggtgtcaagtatcgagcgcctaatggtcggtgacttgactgttcagggctttgagcagcttgaaccatcccgtgaaatatatgatgaagaaagcagtaataagatgtctgttgagcctcagaaagaagctgagtctgattcagataagtcgaaacaagggaagaagcaagaaatggaacgaaaggagcacaccaaggaaccactgagtgctccaaaagcactggtgaagagatcatcccgtttcttctcggcatctttcttctcctccaaagttgatggagagtttacacctacatctgtcttccgagggttaatgaaatcagtgcaaaaacaagctccgaagcttgttgttgggatattgcttctcggtgcaggggcattcttcttaaatagggctgagaagagtcaactatttcagcagcaaggcattgccacaagtattggaaaggtaacctccacaacaaagcccatagttcttgagatacggcgaattccacagagagtaaagaagctaatagagctcttacctcatcaagaggtaaatgaggaagaagcttcacttttcgacatactatacttgcttctggccagtgttatttttgtaccattatttcagaaaatccctggaggcagtcctgttcttggatatcttgctgctggtgtcctcattggtccatatgggctgtccatcatccgtaatgtgcatgagacaaaggcaattgcggaatttggagttgtgttcttactatttaacattggacttgagctttctgtggaaagactaagctcgatgaagaagtatgtctttggcttgggatctgctcaggtgctggctactactgctgctgttggtgtgatagctcattgttttgccgcactaccaggaccagcagcaattgttgttgggagtggcttggctctgtcatccacagctgttgtcttgcaagtattgcaagagcgtggtgaaagtacgtcacgtcatggacgtgctacattttctgtgttattgttccaggatttggctgtggtggttctgttgatattaatacctctcatatcacctaattcttcaaaaggaggggttggtttccaagcaatagcagaagccatgggaatggctgcagtcaaagcagtagctgctataactgccataattgctggaggtcgtctgttgctccggcctatttacaaacaaattgctgaaaatcagaatgctgagatattttcagcaaatacactccttgttatttttggcacaagtcttcttacagcccgggctgggttatcgatggcacttggagcttttttagctggtctgttactagcagaaacagagttctcattgcaggttgagtcagatatagctccctatcgtggtcttctgttaggacttttctttatgacggttggaatgtctattgacccaaagctgcttctgtcaaacttcccagcgatctctgtgatattgagtctcttgataattggaaagacattgttagttacatttgtcggcagggtgtttggggtttctgctatagctgccattcgtgttggcctcttgcttgcacctggtggtgagtttgcttttgttgcctttggagaagctgtcaaccagggtcttctatcacctcaattaacatcgttgctatttttagtcgttggcatttcaatggctctgacaccatggttagctgctggagggcagtttctggcatcaaaatttgagcagcatgatgtgaggagtttattgcccgtggaaagtgagactgacgatttgcaagaccatatcattatattaggctttggacgtgttgggcagatcattgcacaactcctgtcagagcggttaattccttttgttgcacttgatgctggaaggtatggtgcatcttataataaattgaattctaaagaaactacagatagcagcagttcagaaccttagcatctgttctgaattaatatttaaccatgagtatggctgcatgaacctatgcagacttaattctgtaaattactgtgtacagttaagatggttgattttaagctaattagggactgcagttggaatgtattaaatccacaaaataaaacaaactttcgggcagactcttccaggaattcaggaaaatgctggcatgaccagcaatatgaggctctctccagcagatcccctatcgcatccctattttatcttctatttaaaacttcactttacaaacagtgttatctacagttccgcgtcccctattttacattacccactggagacagtccgagaagctcctatcttcattggaaccaaatcatccatgtcaata

SEQ ID NO: 206957 - DNA, 2298 bp, Zea Mays
caggtggtctaccaagtaggcgactgggtcctcctccgcctgcgtcagcgtgcagcctcctcgcttcctcaggcctcgacgggaaagctaaagccccgctattttgggccctactgcatcaccgagatgatcaacgacgtcgccgtccgtctcgacttgccaaccggagtccgcctgcatgacgtgttccatgtcggacttctcaagaaattccatgggacaccgccagcagcacctccacctctaccgacaattcaccatggcgcggttgttccggagccggaacgagcggtgcgctaccgtcttgcacgtggtgtgcgcctagtgctgattcagtggaaaggtcaatcggctgcatcggccacctgggaggacatcgacacattccgtgccaagcatctagcgttccagctcggggacgagctgggtctcgacggagggggagatgtcatgtggggacaagtctacactaggaggcgccgggccaaggacgtacgccgagcagaggaacgcgcggccagggggactcgcgcacagctggctcgagctgatcgagtagataaggcagaaggatattattagtttccctttaagaattatcagttccataatttcaggagtttgttactccagttagttgggctatggccctatatattcttgtaactaggacaattaaggcaagcagattgttagcctcatctctcttatactctaagcctacggtagaggggaataacctcaccggagaagacggccgacggctacgagctccgtagccgcggtccagccagccaagggtttaacgcccttgacagaaattgccaaggacagcaggcctctgtgctcggctgaagagtggttgagaaaacaactaaaattattatgtcttcattttcttccttggaaagaaccattgctagactgaggtctagagtgaactttgtcaaaacagaggatgccagtactgctttctttcatgcgcaagccaggttcaggacaaagaagaacttcattcataaactgatggtcgacgagcatctaatcacttcccaagaggctaagcagcaggctatgtttctgttttataaggatctgattggtaaagaggttgagcaaaattttagtctaaaccttgctgattttcacaaaggcaatttggagctctcgcattttgataatcccatatccttggcggaaatcaaatctgctgttttaagtcttcctaaggataaagcccctggacctgacggtttcacaaggcgtttttataaatgttgttgggatataatcaaatgggacctcctggctgtgtcttagtcttacagcaaggctcccctgaaggcttgaattgctgaattcagcctatattactctcattcccaaacatgttgaggctgttcttccgggggactttacaccaatcagcctagttcacagttttgctaaacttaccactaaaatcctggccaacagattagctcctgaactggataaaatggttagcacaaatcagagtgccttcatccggggcagatgtattcatgataactttattatggtcagtcaaaccgtcaagatgctacataataatagaatccctgctcttttcttgaagctggacattaaaaaggcctttgactctgtgcattgggcatttcttctagaaattcttcaacacttgggttttggacaggtttggtgcaacctgattctgaacctgctattgacatcctctactcaagttcttgtgaatggagtgcctggccagcctataagtctcaagagagggttgaggcaaggagattagtattggtgagggctgacatatctagactcccttttgtgagtggttcaattgacgctctgcatgcaggtgctgcaattcattgttggccatccccagcttgtgctgttgcagatatcagtagagtccttcgcccagggggaatttttgttgcttcgacattcgtggcagatgttattccaccagctattccagtattgaagatcgtacgcccgtacattagccaaataactggcaacaataccttcttatctgaagtggagcttgaagatctttgcaaagcatgtgggctggttgatttcaaatttgtcagaagtggattctatataatgttttctgccactaaagcatgctaactaagtagcagcaatcgtccagtcgtttatgtcaagactcctcggttttatactgcaaatggtttccttctgtgcattgtgcggttgtgccatttgctctaaagacccatggcatctcctaggcgtaggcatgca

SEQ ID NO: 206958 - DNA, 2549 bp, Zea Mays
acaaattgtgtgtgccttggcgtgtcgtggaggccccgggcacgcacgccgcacagtggcatcagctctcagtgcgcgcacgtcaccacaaattgtgtgccttgtcgtggaggccccgggcacgtacgccgcacagggcacacctgctccctccggcctgctctgctcactgctttgattccgcttcggcgcttcgccgcctccggttttctctccgcgcctccagtctccagggacgcaccacctctcccaagtcccaatctcccatggcggcgctgggcacggcgatcacccccgcagcagctaccacggcgccgtgctgctataatcggcatccgcggagccacatcacggcgcgccgtaaccgggttgcctccgcgaggaggcttgacctgtgcgccagctcctcacctgccgtcaccgctcccgacataccagacgaggcgctggtggaacccttggtggcgccggcgccggagacgaagctcaggaagctggcgtgtccaatctgctactaccccctggcgagctcgagcgatcagttggatgatgctaccagtctcgaatgtccaacgtgcaagaaatgctaccccaacaagcaagattactgggatcttacagtgtcagttggttcgacagagtactccgagtccatgccagtggcaacagagttgtttaggactccactggtatcttttctttacgaaagaggatggcgccaaaatttcatatggggtggtttcccaggcctagaaagagaggtcatgctgcttaactatgttgtattcatgaggatgttcagtttgaaatggcaaaaacttatttgaagccaacaattggagggactattgttgatgcaagttgtggaagtggcctgttctcaagattatttattaagagtgggctatattctcttgttgtggcactggatttctcagagaatatgttgaagcagtgcaaccaatacatcaagcaggaaaacatttcagatgagtatgcctttggtcattatgtttagttttgtaccttattcattaggtttagttttgtaccctacttgtcatgtttgacttattaagggctcggagtttggggattttgtttacttaccatccattggtactagaggtggtattctggatcattctgtgtcagtctgttttatgaaggaaaacagcaccaccttgtggttctcgggggtctacggcccccatagagatgaggagaaattggcttttctagaagaactttctcaggtcagaaccagttgccctggtcctgggtgattgcaggggacttcaatatgatccgttgtgctgaggacaagaataattcgaatcttaatagagctctcatgggtagcttaaatatttggattaataatcactctctcaaggagttgcctctaactggaagaagattcacctggtccaaagagatgtccctaccttagtcaagcttgacagggtgttctgcacttctgattgggaggccttattcctagattgttctctgcagagtaatgcctctagtatgtttgatcactgtcccctggttctgaggcttaatgtgggctttaagggaaagaagcgtttccactttgagagtttttggccaaagatgcaaggttttcaggaggtggtgtctgattcctggaactctagtatttcggttttttttgtcccatggagagattatctattaaattcaaaagacttgcgaaggccctgcagtcctggagtcaaaaatatgtgggtaattagtattggtgagggctgacatatctagactcccttttgtgagtggttcaattgacgctctgcatgcaggtgctgcaattcattgttggccatccccagcttgtgctgttgcagatatcagtagagtccttcgcccagggggaatttttgttgcttcgacattcgtggcagatgttattccaccagctattccagtattgaagatcgtacgcccgtacattagccaaataactggcaacaataccttcttatctgaagtggagcttgaagatctttgcaaagcatgtgggctggttgatttcaaatttgtcagaagtggattctatataatgttttctgccactaaagcatgctaactaagtagcagcaatcgtccagtcgtttatgtcaagactcctcggttttatactgcaaatggtttccttctgtgcattgtgcggttgtgccatttgctctaaaggttgccaactttcctcaagggggtgtggtgtaaatagtgaacacatatattttacttctacttgaccgacctcattatagcatgaaaatatcatattttttgtgtacagcttcatagatctttgcaattatgtaatttaaggcttgtttggaacagctctaccaacctaaaaactgaatctggatatagaatttagttagatccatggtgaagcagctccaatagttaatggagctgatgatggtgtttgttacagctccatctgaccatctcacatctctatcttatttccatctagacccatggcatctcctaggcgtaggcatgca

SEQ ID NO: 206959 - DNA, 1448 bp, Zea Mays
acaaattgtgtgtgccttggcgtgtcgtggaggccccgggcacgcacgccgcacagtggcatcagctctcagtgcgcgcacgtcaccacaaattgtgtgccttgtcgtggaggccccgggcacgtacgccgcacagggcacacctgctccctccggcctgctctgctcactgctttgattccgcttcggcgcttcgccgcctccggttttctctccgcgcctccagtctccagggacgcaccacctctcccaagtcccaatctcccatggcggcgctgggcacggcgatcacccccgcagcagctaccacggcgccgtgctgctataatcggcatccgcggagccacatcacggcgcgccgtaaccgggttgcctccgcgaggaggcttgacctgtgcgccagctcctcacctgccgtcaccgctcccgacataccagacgaggcgctggtggaacccttggtggcgccggcgccggagacgaagctcaggaagctggcgtgtccaatctgctactaccccctggcgagctcgagcgatcagttggatgatgctaccagtctcgaatgtccaacgtgcaagaaatgctaccccaacaagcaagattactgggatcttacagtgtcagttggttcgacagagtactccgagtccatgccagtggcaacagagttgtttaggactccactggtatcttttctttacgaaagaggatggcgccaaaatttcatatggggtggtttcccaggcctagaaagagagtttgaaatggcaaaaacttatttgaagccaacaattggagggactattgttgatgcaagttgtggaagtggcctgttctcaagattatttattaagagtgggctatattctcttgttgtggcactggatttctcagagaatatgttgaagcagtgcaaccaatacatcaagcaggaaaacatttcagatgagagattagtattggtgagggctgacatatctagactcccttttgtgagtggttcaattgacgctctgcatgcaggtgctgcaattcattgttggccatccccagcttgtgctgttgcagatatcagtagagtccttcgcccagggggaatttttgttgcttcgacattcgtggcagatgttattccaccagctattccagtattgaagatcgtacgcccgtacattagccaaataactggcaacaataccttcttatctgaagtggagcttgaagatctttgcaaagcatgtgggctggttgatttcaaatttgtcagaagtggattctatataatgttttctgccactaaagcatgctaactaagtagcagcaatcgtccagtcgtttatgtcaagactcctcggttttatactgcaaatggtttccttctgtgcattgtgcggttgtgccatttgctctaaagacccatggcatctcctaggcgtaggcatgca

SEQ ID NO: 206960 - DNA, 2549 bp, Zea Mays
acaaattgtgtgtgccttggcgtgtcgtggaggccccgggcacgcacgccgcacagtggcatcagctctcagtgcgcgcacgtcaccacaaattgtgtgccttgtcgtggaggccccgggcacgtacgccgcacagggcacacctgctccctccggcctgctctgctcactgctttgattccgcttcggcgcttcgccgcctccggttttctctccgcgcctccagtctccagggacgcaccacctctcccaagtcccaatctcccatggcggcgctgggcacggcgatcacccccgcagcagctaccacggcgccgtgctgctataatcggcatccgcggagccacatcacggcgcgccgtaaccgggttgcctccgcgaggaggcttgacctgtgcgccagctcctcacctgccgtcaccgctcccgacataccagacgaggcgctggtggaacccttggtggcgccggcgccggagacgaagctcaggaagctggcgtgtccaatctgctactaccccctggcgagctcgagcgatcagttggatgatgctaccagtctcgaatgtccaacgtgcaagaaatgctaccccaacaagcaagattactgggatcttacagtgtcagttggttcgacagagtactccgagtccatgccagtggcaacagagttgtttaggactccactggtatcttttctttacgaaagaggatggcgccaaaatttcatatggggtggtttcccaggcctagaaagagaggtcatgctgcttaactatgttgtattcatgaggatgttcagtttgaaatggcaaaaacttatttgaagccaacaattggagggactattgttgatgcaagttgtggaagtggcctgttctcaagattatttattaagagtgggctatattctcttgttgtggcactggatttctcagagaatatgttgaagcagtgcaaccaatacatcaagcaggaaaacatttcagatgagtatgcctttggtcattatgtttagttttgtaccttattcattaggtttagttttgtaccctacttgtcatgtttgacttattaagggctcggagtttggggattttgtttacttaccatccattggtactagaggtggtattctggatcattctgtgtcagtctgttttatgaaggaaaacagcaccaccttgtggttctcgggggtctacggcccccatagagatgaggagaaattggcttttctagaagaactttctcaggtcagaaccagttgccctggtcctgggtgattgcaggggacttcaatatgatccgttgtgctgaggacaagaataattcgaatcttaatagagctctcatgggtagcttaaatatttggattaataatcactctctcaaggagttgcctctaactggaagaagattcacctggtccaaagagatgtccctaccttagtcaagcttgacagggtgttctgcacttctgattgggaggccttattcctagattgttctctgcagagtaatgcctctagtatgtttgatcactgtcccctggttctgaggcttaatgtgggctttaagggaaagaagcgtttccactttgagagtttttggccaaagatgcaaggttttcaggaggtggtgtctgattcctggaactctagtatttcggttttttttgtcccatggagagattatctattaaattcaaaagacttgcgaaggccctgcagtcctggagtcaaaaatatgtgggagattagtattggtgagggctgacatatctagactcccttttgtgagtggttcaattgacgctctgcatgcaggtgctgcaattcattgttggccatccccagcttgtgctgttgcagatatcagtagagtccttcgcccagggggaatttttgttgcttcgacattcgtggcagatgttattccaccagctattccagtattgaagatcgtacgcccgtacattagccaaataactggcaacaataccttcttatctgaagtggagcttgaagatctttgcaaagcatgtgggctggttgatttcaaatttgtcagaagtggattctatataatgttttctgccactaaagcatgctaactaagtagcagcaatcgtccagtcgtttatgtcaagactcctcggttttatactgcaaatggtttccttctgtgcattgtgcggttgtgccatttgctctaaaggttgccaactttcctcaagggggtgtggtgtaaatagtgaacacatatattttacttctacttgaccgacctcattatagcatgaaaatatcatattttttgtgtacagcttcatagatctttgcaattatgtaatttaaggcttgtttggaacagctctaccaacctaaaaactgaatctggatatagaatttagttagatccatggtgaagcagctccaatagttaatggagctgatgatggtgtttgttacagctccatctgaccatctcacatctctatcttatttccatctagacccatggcatctcctaggcgtaggcatgca

SEQ ID NO: 206961 - DNA, 2332 bp, Zea Mays
acaaattgtgtgtgccttggcgtgtcgtggaggccccgggcacgcacgccgcacagtggcatcagctctcagtgcgcgcacgtcaccacaaattgtgtgccttgtcgtggaggccccgggcacgtacgccgcacagggcacacctgctccctccggcctgctctgctcactgctttgattccgcttcggcgcttcgccgcctccggttttctctccgcgcctccagtctccagggacgcaccacctctcccaagtcccaatctcccatggcggcgctgggcacggcgatcacccccgcagcagctaccacggcgccgtgctgctataatcggcatccgcggagccacatcacggcgcgccgtaaccgggttgcctccgcgaggaggcttgacctgtgcgccagctcctcacctgccgtcaccgctcccgacataccagacgaggcgctggtggaacccttggtggcgccggcgccggagacgaagctcaggaagctggcgtgtccaatctgctactaccccctggcgagctcgagcgatcagttggatgatgctaccagtctcgaatgtccaacgtgcaagaaatgctaccccaacaagcaagattactgggatcttacagtgtcagttggttcgacagagtactccgagtccatgccagtggcaacagagttgtttaggactccactggtatcttttctttacgaaagaggatggcgccaaaatttcatatggggtggtttcccaggcctagaaagagagtttgaaatggcaaaaacttatttgaagccaacaattggagggactattgttgatgcaagttgtggaagtggcctgttctcaagattatttattaagagtgggctatattctcttgttgtggcactggatttctcagagaatatgttgaagcagtgcaaccaatacatcaagcaggaaaacatttcagatgagaaaacagcaccaccttgtggttctcgggggtctacggcccccatagagatgaggagaaattggcttttctagaagaactttctcaggtcagaaccagttgccctggtcctgggtgattgcaggggacttcaatatgatccgttgtgctgaggacaagaataattcgaatcttaatagagctctcatgggtagcttaaatatttggattaataatcactctctcaaggagttgcctctaactggaagaagattcacctggtccaaagagatgtccctaccttagtcaagcttgacagggtgttctgcacttctgattgggaggccttattcctagattgttctctgcagagtaatgcctctagtatgtttgatcactgtcccctggttctgaggcttaatgtgggctttaagggaaagaagcgtttccactttgagagtttttggccaaagatgcaaggttttcaggaggtggtgtctgattcctggaactctagtatttcggttttttttgtcccatggagagattatctattaaattcaaaagacttgcgaaggccctgcagtcctggagtcaaaaatatgtgggagattagtattggtgagggctgacatatctagactcccttttgtgagtggttcaattgacgctctgcatgcaggtgctgcaattcattgttggccatccccagcttgtgctgttgcagatatcagtagagtccttcgcccagggggaatttttgttgcttcgacattcgtggcagatgttattccaccagctattccagtattgaagatcgtacgcccgtacattagccaaataactggcaacaataccttcttatctgaagtggagcttgaagatctttgcaaagcatgtgggctggttgatttcaaatttgtcagaagtggattctatataatgttttctgccactaaagcatgctaactaagtagcagcaatcgtccagtcgtttatgtcaagactcctcggttttatactgcaaatggtttccttctgtgcattgtgcggttgtgccatttgctctaaaggttgccaactttcctcaagggggtgtggtgtaaatagtgaacacatatattttacttctacttgaccgacctcattatagcatgaaaatatcatattttttgtgtacagcttcatagatctttgcaattatgtaatttaaggcttgtttggaacagctctaccaacctaaaaactgaatctggatatagaatttagttagatccatggtgaagcagctccaatagttaatggagctgatgatggtgtttgttacagctccatctgaccatctcacatctctatcttatttccatctagacccatggcatctcctaggcgtaggcatgca

SEQ ID NO: 206962 - DNA, 2426 bp, Zea Mays
acaaattgtgtgtgccttggcgtgtcgtggaggccccgggcacgcacgccgcacagtggcatcagctctcagtgcgcgcacgtcaccacaaattgtgtgccttgtcgtggaggccccgggcacgtacgccgcacagggcacacctgctccctccggcctgctctgctcactgctttgattccgcttcggcgcttcgccgcctccggttttctctccgcgcctccagtctccagggacgcaccacctctcccaagtcccaatctcccatggcggcgctgggcacggcgatcacccccgcagcagctaccacggcgccgtgctgctataatcggcatccgcggagccacatcacggcgcgccgtaaccgggttgcctccgcgaggaggcttgacctgtgcgccagctcctcacctgccgtcaccgctcccgacataccagacgaggcgctggtggaacccttggtggcgccggcgccggagacgaagctcaggaagctggcgtgtccaatctgctactaccccctggcgagctcgagcgatcagttggatgatgctaccagtctcgaatgtccaacgtgcaagaaatgctaccccaacaagcaagattactgggatcttacagtgtcagttggttcgacagagtactccgagtccatgccagtggcaacagagttgtttagtttgaaatggcaaaaacttatttgaagccaacaattggagggactattgttgatgcaagttgtggaagtggcctgttctcaagattatttattaagagtgggctatattctcttgttgtggcactggatttctcagagaatatgttgaagcagtgcaaccaatacatcaagcaggaaaacatttcagatgagtatgcctttggtcattatgtttagttttgtaccttattcattaggtttagttttgtaccctacttgtcatgtttgacttattaagggctcggagtttggggattttgtttacttaccatccattggtactagaggtggtattctggatcattctgtgtcagtctgttttatgaaggaaaacagcaccaccttgtggttctcgggggtctacggcccccatagagatgaggagaaattggcttttctagaagaactttctcaggtcagaaccagttgccctggtcctgggtgattgcaggggacttcaatatgatccgttgtgctgaggacaagaataattcgaatcttaatagagctctcatgggtagcttaaatatttggattaataatcactctctcaaggagttgcctctaactggaagaagattcacctggtccaaagagatgtccctaccttagtcaagcttgacagggtgttctgcacttctgattgggaggccttattcctagattgttctctgcagagtaatgcctctagtatgtttgatcactgtcccctggttctgaggcttaatgtgggctttaagggaaagaagcgtttccactttgagagtttttggccaaagatgcaaggttttcaggaggtggtgtctgattcctggaactctagtatttcggttttttttgtcccatggagagattatctattaaattcaaaagacttgcgaaggccctgcagtcctggagtcaaaaatatgtgggagattagtattggtgagggctgacatatctagactcccttttgtgagtggttcaattgacgctctgcatgcaggtgctgcaattcattgttggccatccccagcttgtgctgttgcagatatcagtagagtccttcgcccagggggaatttttgttgcttcgacattcgtggcagatgttattccaccagctattccagtattgaagatcgtacgcccgtacattagccaaataactggcaacaataccttcttatctgaagtggagcttgaagatctttgcaaagcatgtgggctggttgatttcaaatttgtcagaagtggattctatataatgttttctgccactaaagcatgctaactaagtagcagcaatcgtccagtcgtttatgtcaagactcctcggttttatactgcaaatggtttccttctgtgcattgtgcggttgtgccatttgctctaaaggttgccaactttcctcaagggggtgtggtgtaaatagtgaacacatatattttacttctacttgaccgacctcattatagcatgaaaatatcatattttttgtgtacagcttcatagatctttgcaattatgtaatttaaggcttgtttggaacagctctaccaacctaaaaactgaatctggatatagaatttagttagatccatggtgaagcagctccaatagttaatggagctgatgatggtgtttgttacagctccatctgaccatctcacatctctatcttatttccatctagacccatggcatctcctaggcgtaggcatgca

SEQ ID NO: 206963 - DNA, 2504 bp, Zea Mays
acaaattgtgtgtgccttggcgtgtcgtggaggccccgggcacgcacgccgcacagtggcatcagctctcagtgcgcgcacgtcaccacaaattgtgtgccttgtcgtggaggccccgggcacgtacgccgcacagggcacacctgctccctccggcctgctctgctcactgctttgattccgcttcggcgcttcgccgcctccggttttctctccgcgcctccagtctccagggacgcaccacctctcccaagtcccaatctcccatggcggcgctgggcacggcgatcacccccgcagcagctaccacggcgccgtgctgctataatcggcatccgcggagccacatcacggcgcgccgtaaccgggttgcctccgcgaggaggcttgacctgtgcgccagctcctcacctgccgtcaccgctcccgacataccagacgaggcgctggtggaacccttggtggcgccggcgccggagacgaagctcaggaagctggcgtgtccaatctgctactaccccctggcgagctcgagcgatcagttggatgatgctaccagtctcgaatgtccaacgtgcaagaaatgctaccccaacaagcaagattactgggatcttacagtgtcagttggttcgacagagtactccgagtccatgccagtggcaacagagttgtttaggactccactggtatcttttctttacgaaagaggatggcgccaaaatttcatatggggtggtttcccaggcctagaaagagagtttgaaatggcaaaaacttatttgaagccaacaattggagggactattgttgatgcaagttgtggaagtggcctgttctcaagattatttattaagagtgggctatattctcttgttgtggcactggatttctcagagaatatgttgaagcagtgcaaccaatacatcaagcaggaaaacatttcagatgagtatgcctttggtcattatgtttagttttgtaccttattcattaggtttagttttgtaccctacttgtcatgtttgacttattaagggctcggagtttggggattttgtttacttaccatccattggtactagaggtggtattctggatcattctgtgtcagtctgttttatgaaggaaaacagcaccaccttgtggttctcgggggtctacggcccccatagagatgaggagaaattggcttttctagaagaactttctcaggtcagaaccagttgccctggtcctgggtgattgcaggggacttcaatatgatccgttgtgctgaggacaagaataattcgaatcttaatagagctctcatgggtagcttaaatatttggattaataatcactctctcaaggagttgcctctaactggaagaagattcacctggtccaaagagatgtccctaccttagtcaagcttgacagggtgttctgcacttctgattgggaggccttattcctagattgttctctgcagagtaatgcctctagtatgtttgatcactgtcccctggttctgaggcttaatgtgggctttaagggaaagaagcgtttccactttgagagtttttggccaaagatgcaaggttttcaggaggtggtgtctgattcctggaactctagtatttcggttttttttgtcccatggagagattatctattaaattcaaaagacttgcgaaggccctgcagtcctggagtcaaaaatatgagattagtattggtgagggctgacatatctagactcccttttgtgagtggttcaattgacgctctgcatgcaggtgctgcaattcattgttggccatccccagcttgtgctgttgcagatatcagtagagtccttcgcccagggggaatttttgttgcttcgacattcgtggcagatgttattccaccagctattccagtattgaagatcgtacgcccgtacattagccaaataactggcaacaataccttcttatctgaagtggagcttgaagatctttgcaaagcatgtgggctggttgatttcaaatttgtcagaagtggattctatataatgttttctgccactaaagcatgctaactaagtagcagcaatcgtccagtcgtttatgtcaagactcctcggttttatactgcaaatggtttccttctgtgcattgtgcggttgtgccatttgctctaaaggttgccaactttcctcaagggggtgtggtgtaaatagtgaacacatatattttacttctacttgaccgacctcattatagcatgaaaatatcatattttttgtgtacagcttcatagatctttgcaattatgtaatttaaggcttgtttggaacagctctaccaacctaaaaactgaatctggatatagaatttagttagatccatggtgaagcagctccaatagttaatggagctgatgatggtgtttgttacagctccatctgaccatctcacatctctatcttatttccatctagacccatggcatctcctaggcgtaggcatgca

SEQ ID NO: 206964 - DNA, 2516 bp, Zea Mays
acaaattgtgtgtgccttggcgtgtcgtggaggccccgggcacgcacgccgcacagtggcatcagctctcagtgcgcgcacgtcaccacaaattgtgtgccttgtcgtggaggccccgggcacgtacgccgcacagggcacacctgctccctccggcctgctctgctcactgctttgattccgcttcggcgcttcgccgcctccggttttctctccgcgcctccagtctccagggacgcaccacctctcccaagtcccaatctcccatggcggcgctgggcacggcgatcacccccgcagcagctaccacggcgccgtgctgctataatcggcatccgcggagccacatcacggcgcgccgtaaccgggttgcctccgcgaggaggcttgacctgtgcgccagctcctcacctgccgtcaccgctcccgacataccagacgaggcgctggtggaacccttggtggcgccggcgccggagacgaagctcaggaagctggcgtgtccaatctgctactaccccctggcgagctcgagcgatcagttggatgatgctaccagtctcgaatgtccaacgtgcaagaaatgctaccccaacaagcaagattactgggatcttacagtgtcagttggttcgacagagtactccgagtccatgccagtggcaacagagttgtttaggtaaagaggactccactggtatcttttctttacgaaagaggatggcgccaaaatttcatatggggtggtttcccaggcctagaaagagagtttgaaatggcaaaaacttatttgaagccaacaattggagggactattgttgatgcaagttgtggaagtggcctgttctcaagattatttattaagagtgggctatattctcttgttgtggcactggatttctcagagaatatgttgaagcagtgcaaccaatacatcaagcaggaaaacatttcagatgagtatgcctttggtcattatgtttagttttgtaccttattcattaggtttagttttgtaccctacttgtcatgtttgacttattaagggctcggagtttggggattttgtttacttaccatccattggtactagaggtggtattctggatcattctgtgtcagtctgttttatgaaggaaaacagcaccaccttgtggttctcgggggtctacggcccccatagagatgaggagaaattggcttttctagaagaactttctcaggtcagaaccagttgccctggtcctgggtgattgcaggggacttcaatatgatccgttgtgctgaggacaagaataattcgaatcttaatagagctctcatgggtagcttaaatatttggattaataatcactctctcaaggagttgcctctaactggaagaagattcacctggtccaaagagatgtccctaccttagtcaagcttgacagggtgttctgcacttctgattgggaggccttattcctagattgttctctgcagagtaatgcctctagtatgtttgatcactgtcccctggttctgaggcttaatgtgggctttaagggaaagaagcgtttccactttgagagtttttggccaaagatgcaaggttttcaggaggtggtgtctgattcctggaactctagtatttcggttttttttgtcccatggagagattatctattaaattcaaaagacttgcgaaggccctgcagtcctggagtcaaaaatatgtgggagattagtattggtgagggctgacatatctagactcccttttgtgagtggttcaattgacgctctgcatgcaggtgctgcaattcattgttggccatccccagcttgtgctgttgcagatatcagtagagtccttcgcccagggggaatttttgttgcttcgacattcgtggcagatgttattccaccagctattccagtattgaagatcgtacgcccgtacattagccaaataactggcaacaataccttcttatctgaagtggagcttgaagatctttgcaaagcatgtgggctggttgatttcaaatttgtcagaagtggattctatataatgttttctgccactaaagcatgctaactaagtagcagcaatcgtccagtcgtttatgtcaagactcctcggttttatactgcaaatggtttccttctgtgcattgtgcggttgtgccatttgctctaaaggttgccaactttcctcaagggggtgtggtgtaaatagtgaacacatatattttacttctacttgaccgacctcattatagcatgaaaatatcatattttttgtgtacagcttcatagatctttgcaattatgtaatttaaggcttgtttggaacagctctaccaacctaaaaactgaatctggatatagaatttagttagatccatggtgaagcagctccaatagttaatggagctgatgatggtgtttgttacagctccatctgaccatctcacatctctatcttatttccatctagacccatggcatctcctaggcgtaggcatgca

SEQ ID NO: 206965 - DNA, 2557 bp, Zea Mays
acaaattgtgtgtgccttggcgtgtcgtggaggccccgggcacgcacgccgcacagtggcatcagctctcagtgcgcgcacgtcaccacaaattgtgtgccttgtcgtggaggccccgggcacgtacgccgcacagggcacacctgctccctccggcctgctctgctcactgctttgattccgcttcggcgcttcgccgcctccggttttctctccgcgcctccagtctccagggacgcaccacctctcccaagtcccaatctcccatggcggcgctgggcacggcgatcacccccgcagcagctaccacggcgccgtgctgctataatcggcatccgcggagccacatcacggcgcgccgtaaccgggttgcctccgcgaggaggcttgacctgtgcgccagctcctcacctgccgtcaccgctcccgacataccagacgaggcgctggtggaacccttggtggcgccggcgccggagacgaagctcaggaagctggcgtgtccaatctgctactaccccctggcgagctcgagcgatcagttggatgatgctaccagtctcgaatgtccaacgtgcaagaaatgctaccccaacaagcaagattactgggatcttacagtgtcagttggttcgacagagtactccgagtccatgccagtggcaacagagttgtttaggtaaagaggactccactggtatcttttctttacgaaagaggatggcgccaaaatttcatatggggtggtttcccaggcctagaaagagaggtcatgctgcttaactatgttgtattcatgaggatgttcagtttgaaatggcaaaaacttatttgaagccaacaattggagggactattgttgatgcaagttgtggaagtggcctgttctcaagattatttattaagagtgggctatattctcttgttgtggcactggatttctcagagaatatgttgaagcagtgcaaccaatacatcaagcaggaaaacatttcagatgagtatgcctttggtcattatgtttagttttgtaccttattcattaggtttagttttgtaccctacttgtcatgtttgacttattaagggctcggagtttggggattttgtttacttaccatccattggtactagaggtggtattctggatcattctgtgtcagtctgttttatgaaggaaaacagcaccaccttgtggttctcgggggtctacggcccccatagagatgaggagaaattggcttttctagaagaactttctcaggtcagaaccagttgccctggtcctgggtgattgcaggggacttcaatatgatccgttgtgctgaggacaagaataattcgaatcttaatagagctctcatgggtagcttaaatatttggattaataatcactctctcaaggagttgcctctaactggaagaagattcacctggtccaaagagatgtccctaccttagtcaagcttgacagggtgttctgcacttctgattgggaggccttattcctagattgttctctgcagagtaatgcctctagtatgtttgatcactgtcccctggttctgaggcttaatgtgggctttaagggaaagaagcgtttccactttgagagtttttggccaaagatgcaaggttttcaggaggtggtgtctgattcctggaactctagtatttcggttttttttgtcccatggagagattatctattaaattcaaaagacttgcgaaggccctgcagtcctggagtcaaaaatatgtgggagattagtattggtgagggctgacatatctagactcccttttgtgagtggttcaattgacgctctgcatgcaggtgctgcaattcattgttggccatccccagcttgtgctgttgcagatatcagtagagtccttcgcccagggggaatttttgttgcttcgacattcgtggcagatgttattccaccagctattccagtattgaagatcgtacgcccgtacattagccaaataactggcaacaataccttcttatctgaagtggagcttgaagatctttgcaaagcatgtgggctggttgatttcaaatttgtcagaagtggattctatataatgttttctgccactaaagcatgctaactaagtagcagcaatcgtccagtcgtttatgtcaagactcctcggttttatactgcaaatggtttccttctgtgcattgtgcggttgtgccatttgctctaaaggttgccaactttcctcaagggggtgtggtgtaaatagtgaacacatatattttacttctacttgaccgacctcattatagcatgaaaatatcatattttttgtgtacagcttcatagatctttgcaattatgtaatttaaggcttgtttggaacagctctaccaacctaaaaactgaatctggatatagaatttagttagatccatggtgaagcagctccaatagttaatggagctgatgatggtgtttgttacagctccatctgaccatctcacatctctatcttatttccatctagacccatggcatctcctaggcgtaggcatgca

SEQ ID NO: 206966 - DNA, 2501 bp, Zea Mays
acaaattgtgtgtgccttggcgtgtcgtggaggccccgggcacgcacgccgcacagtggcatcagctctcagtgcgcgcacgtcaccacaaattgtgtgccttgtcgtggaggccccgggcacgtacgccgcacagggcacacctgctccctccggcctgctctgctcactgctttgattccgcttcggcgcttcgccgcctccggttttctctccgcgcctccagtctccagggacgcaccacctctcccaagtcccaatctcccatggcggcgctgggcacggcgatcacccccgcagcagctaccacggcgccgtgctgctataatcggcatccgcggagccacatcacggcgcgccgtaaccgggttgcctccgcgaggaggcttgacctgtgcgccagctcctcacctgccgtcaccgctcccgacataccagacgaggcgctggtggaacccttggtggcgccggcgccggagacgaagctcaggaagctggcgtgtccaatctgctactaccccctggcgagctcgagcgatcagttggatgatgctaccagtctcgaatgtccaacgtgcaagaaatgctaccccaacaagcaagattactgggatcttacagtgtcagttggttcgacagagtactccgagtccatgccagtggcaacagagttgtttaggactccactggtatcttttctttacgaaagaggatggcgccaaaatttcatatggggtggtttcccaggcctagaaagagagtttgaaatggcaaaaacttatttgaagccaacaattggagggactattgttgatgcaagttgtggaagtggcctgttctcaagattatttattaagagtgggctatattctcttgttgtggcactggatttctcagagaatatgttgaagcagtgcaaccaatacatcaagcaggaaaacatttcagatgagtatgcctttggtcattatgtttagttttgtaccttattcattaggtttagttttgtaccctacttgtcatgtttgacttattaagggctcggagtttggggattttgtttacttaccatccattggtactagaggtggtattctggatcattctgtgtcagtctgttttatgaaggaaaacagcaccaccttgtggttctcgggggtctacggcccccatagagatgaggagaaattggcttttctagaagaactttctcaggtcagaaccagttgccctggtcctgggtgattgcaggggacttcaatatgatccgttgtgctgaggacaagaataattcgaatcttaatagagctctcatgggtagcttaaatatttggattaataatcactctctcaaggagttgcctctaactggaagaagattcacctggtccaaagagatgtccctaccttagtcaagcttgacagggtgttctgcacttctgattgggaggccttattcctagattgttctctgcagagtaatgcctctagtatgtttgatcactgtcccctggttctgaggcttaatgtgggctttaagggaaagaagcgtttccactttgagagtttttggccaaagatgcaaggttttcaggaggtggtgtctgattcctggaactctagtatttcggttttttttgtcccatggagagattatctattaaattcaaaagacttgcgaaggccctgcagtcctggagtcaaaaatatgtgggagattagtattggtgagggctgacatatctagactcccttttgtgagtggttcaattgacgctctgcatgcaggtgctgcaattcattgttggccatccccagcttgtgctatatcagtagagtccttcgcccagggggaatttttgttgcttcgacattcgtggcagatgttattccaccagctattccagtattgaagatcgtacgcccgtacattagccaaataactggcaacaataccttcttatctgaagtggagcttgaagatctttgcaaagcatgtgggctggttgatttcaaatttgtcagaagtggattctatataatgttttctgccactaaagcatgctaactaagtagcagcaatcgtccagtcgtttatgtcaagactcctcggttttatactgcaaatggtttccttctgtgcattgtgcggttgtgccatttgctctaaaggttgccaactttcctcaagggggtgtggtgtaaatagtgaacacatatattttacttctacttgaccgacctcattatagcatgaaaatatcatattttttgtgtacagcttcatagatctttgcaattatgtaatttaaggcttgtttggaacagctctaccaacctaaaaactgaatctggatatagaatttagttagatccatggtgaagcagctccaatagttaatggagctgatgatggtgtttgttacagctccatctgaccatctcacatctctatcttatttccatctagacccatggcatctcctaggcgtaggcatgca

SEQ ID NO: 206967 - DNA, 485 bp, Zea Mays
gccgtcctcaaaccctacacgtcctcagccctgccagccgcctagccatcctcagtcggcagccgctacaatgtcacccagactccagactccggccagagtccagagccgccaggacgccagaccttgaaggaagcaattgaaatcaataactctgttcctcaaggattgagcagttctatatttacaaagaggccagatattatttttaagtggctcgggccccatggtagtgattgtggtatagtgaatgtgaacatacctactaatggtgctgaaattggtggagcatttggtggagaaaaagcagctggtggtggacgagaagcagggagtgattcctggaagcagtacatgaggagggcgacttggagggaggtcctagagtagtaagtcacttgtttactccatgatggcaatagcaagcagatcgcggtggtgcctatggatgctacaacaagaaagatcaaaagttcttttggatg

SEQ ID NO: 206968 - DNA, 1528 bp, Zea Mays
ctcagccctgccagccgcctagccatcctcagtcggcagccgctacaatgtcacccagactccagactccggccagagtccagagccgccaggacgccaggtacgccgccgggcgccggccccctcctccctcttctcgccggaggaaatggagccactcgctctcccctcgggctcctcgcacccgacccgcccgcagccgcagccgtagccgcacccgctcctccaccatctcccgtccaacaggttccgggatcagcttttgtggcaggcgtccggatgggtttactgttcttgctcaaatccgtgtggattttgcatggccccgtcccgaaaatgccacaggccagccggttcggaaaccgtaccgcacgacgccgtcgccacgctcctcctggggatgcatttgctgcgcgtcctgaacctaccgtgacgagggcattctcagagccttgcaattttgcaaggctgctgcctgtccgttcagttcttctgtagtagtagtagttctgtatctttgtgtgtgtgcatcccgagttttctctgctgtcgtattacctttcagttttcctaataaattattaggcttgcttgtcctattcccactcttcttctggtcgcgctcaagcatggaaccagaactctgggagcaatgggtatttccttttttttcaaattgctggttgcatttggtagtagagtacaacaacgtacacgtgggtttctctggatagaaacactgggatccaagtccttgagattcggttcaaaatttgaactatcaacacacataggagtgcgaaatattcccagagcatcctccttgtcaaatcgggccctttaagtgtctgccagaattccgaactcaaagttttgcctgcattgtgggctcctgcaactatgcttttgttttaatctacatgtctcatgtccaactgagaaatattcgtctaccagctgttggcagcatttgctattatccttttacaagcacaagaaatcgggttcatatattttgtggctagcggttttaggtaccctgcatgagcgccttattgtgcatactaaatgcatttaagcgtggtgggtgcagttgatcacatgttatatcgacagaaattctagttaattagagttgactgcttgagccaatagtttattacttcaggtagcatatagttcaatattatgttttttttgtattttgtatctgttctaatttctacaattgagaactactgtgtctaatatccatgaggtttgtgtttcctacagaccttgaaggaagcaattgaaatcaataactctgttcctcaaggattgagcagttctatatttacaaagaggccagatattatttttaagtggctcggatgcctgtgtggacactttggtggactggtggtactgcatcggtagcattctagtttttgcttaattgaatggtagttattttggtttacaaggtatagcttaagaaagtctggttcactatttttcattttggttggtatattcacacagcaca

SEQ ID NO: 206969 - DNA, 1289 bp, Zea Mays
actgctggcggccgttgcaattgcagccacattcaactcaggctccaggccgctgcaacccaagccgccagcagcctgcccctcctctccgactccaaaccaatccaatggccctccgccccccgctgtctcacctcacgcgctctctgccctggcctgcccccagcatgacgcgatgctccgcactgcgtcggatacatggacgatattgctggggagcgggggaggaaaggagacgactcttcccgtgccgtgctgacgccaccacgcggccccggtctcctctcgccctcctctccgtctagatctgatcctatcccctccccaccctccgccgccgtcctcgccctcccggccgcagccacgagcccgagcgccgggctcctggcctcgtctcgcctcaccggcgagatggacggcggcggggagacgctgctggtgcggaggagcaagggcaagaagaggcggcagccggcggcgcccgcggagaggggctccggcagcggggacaggttccgcgcgctctggcgggactaccacgacctgctgcaggtgagtcagagaccgaggcaaagaagaggaggctggcgagcaagaagcgaagaagcctcgccctgcttgctgaagtcaagttcttgcgaaggaagtatcagtcctttccgaagggtggctcgcagcagacacattacaggttgaagaagcaggctcggtacatgccatccccattgggccatggtgcagggaccgaagtgccttctaccagcagaaacccaaaccttgacttaaatcaagattctgtcctgaacgatgtggggaatgattgccaggggcaacatggccatccagaagttgaaaagttagatcaggtcgaggtgaatgaagatacgatgacacctgatgtcaaattatcagtttgtagggatacaggagagtactctcctgtaagtgaaggtaagagggcggttccatggcaagaccggttcgcgttgaagacctaggccctcagttgatgtggctaagaaataagctgcttctctgacagctagttttgctactgtatccctcaaatgctcagtagtgctctgtacagaaacaatgggacatgatacttatatgcatgttacattgcctgattgacaaactcagatgtttgtagcatgcttctaagcaagttagacaagtgagttgtgattctatgaatggttctgtccagaatttggattggcccatttgattttgcctttgtgcatcgaatgtttcttcaatcagcaagatcatgaattctgtga

SEQ ID NO: 206970 - DNA, 849 bp, Zea Mays
tggaggtcttcgcggcgtttggcgatggcttttacataaatcagtttcagattcatatttgcaggagcccggaagagctgaagccgcattcgctcaatacgatgttgcaactgtactaaagaagttctactccattgaaatagatgaactcactgctcctcctggagtggagatcatagactttctcgaggcatctccatcaccacttccttggctcagcgaggaagaactgggccagtacgccgaaaagtttcggaagtctgggttcactggacccctcaactactaccgcatgtgggagacgaattggagacttcttgcaccctggaacgaggccaagattacagtgcccgtcaagttcatagctggtgataaggacatcggtgtccagtcctttggggttgagaagtacatcaagagtggggaattcaagtccactgtcccagatcttgaagtcgcggtcattgaaggccaccattttctccagcaagaacaggccgagagggtgaattcggagataatttcctacctcgtcaggtttactagccaggaggcatcatcttgatgctttgctcccagttgaacctgaccagaaaaaaaatgatgtgcgatgggactccatttctttctgaactgaaaaggtcttgaattgccgaataaagtgtgagtagagttgaaaagggatggaagtcccgtccgtactgttttccacatttgacccgtccgttttcgtatttgtggaaaaatctagaaataggacagaaacgagagaggatctatcccgaccatttttgcggaatcccgtttttttctagatttaacccatatttattccgtattcaagaaacc

SEQ ID NO: 206971 - DNA, 196 bp, Zea Mays
gagcactgggaacggagtcaatggcttcactctcgatccttcccttggagagttcattttgactcatccaaatatcaagatagcaaagaaagggaagatctattcagtcaacgaagggaacgccaaaaactgggatgggcctacagccaattcgtggagaaatgcaagtatcctgaggatggttcaccgcctagat

SEQ ID NO: 206972 - DNA, 2916 bp, Zea Mays
cagctcctggcgtgctgagctaagggctccgattcaccaccacccgtcctcttcaactgccgccgttatcccctacccggcacgcgctgggcggggagcagctgaaccccaccccagccgcccgcaacggcgccaacaaggcgctgaagcggactctccggctcctgccaatggcgcggatccagcttgtggtggatgaaagaacggacccctttcttggtagattgactagaccagccaccattgaccaatcccacaatttcttctctgatgtcacaaacaacttcaaagatttttcaactgtagtttcagagttgcatcaacaccttctggatgcaaatgtagaagttacttacacagaatacttagatctgatgaaagtggaagttgatcaacatcttaataagctctcggaggacataagggacctcaaaagctgtaacttggcccacaaatatgacacagatggttcatgctgtacagcatgccatgttgggaagctagctgagatagatgacaggttcaacagcttgaagtttctgctggctgtggtgttccgacaaattagagagatcctcacagtggtcaattcttcaattcatgatcttcagtgggagcatgagttacagtcagaagttaccggcatcattattggagactgtattagaggtcttcaggatgaactcgagaggaaactgtatgagcaaagttccatggtgaacagtctaagaaaaaactgccaggaaactgtggcgcagtttgcttccatacgtgaagagctgattgctatttctaatattctgttaccttctgaagaggaaccacaaatttccctctgtaggcatgaaagtttgggtaactggagtgacagatggaagttcagctttttcagaaagcgagcacaccaggatcactctttatcttccacgcaaaaccagaattctgcaacacagaaatctataagtcctagtgaagttatatcagaaagatccgacttccgacatctgaagggtatgactagacatgaaatgcttaactatttcagatctgagatcagtaaattaagaaggctgcatgagttggatttgcaagagaaaacagaagagctgtttaaattcaaacgagagaaatggtcattggctcttaagtatgatgtagaatttgagcctttaagaaggaaattccctgaggtcatttcaagatttgaccaaatcatgtccaatggaatggcagcagcagtacctacaatctgcagtaatagtgatgcattcgatgaaacgagcagattgagcagtataattgattcactataccgtgaaaaccagcatcttcattgtttgcttgcagagaagatgaagaatattcaggaattatcaagccaaatatctgattccaccaggaaaatgtcacttcaatattcattagaaaaacaaattttgagacaactcaacagcactcaagtagaatatgaggatctttttgttgaaagtactatcagagatgaaatttaccaaactgttgtgagaacattggttgatagtcataggaatgttttggaggataccacccaaactttccgtgcaaaagtgtcttcacttgaagccgcactctctgaaaaggacaaggcgttgtgtttatctgatgaggaaaatcaaatgctaaaggaaaagttgtcaacactagaaaaagagcattttatccaaaataatcagcaagatctcgagctaatcaagcaagaaagtgaggaaatggttctccgtgatattgagatggagccacaaagatcatgtgagatttctgatcgagatatacagtacgaagggctcatcaagctgaatcaggttttagaaattgcctcaaccacggcaaaagaaatagaaacaaaaaggttgaatctcagtgatatccaaggtaaaagagagcaagaaaaacagctagattgcatcctggtatctatcatggatttgtcaaaagaatttatggagactgaacatagagtgccaaaagatataaaaggaaatgaaaaaaagactgataatctgcatgatcaatgcaattatatgatacaacaggccatcgtattgacaaagaagggtctatggtataagcaaatgcttgacacaaaacgttctgagcttcgaaaagctgaatctgaggttgacattatgggagacaaggttaatgcactcttgagtcttgttcaaaagatatatgtaactcttgagcactactctcctgtttttcagcatcatcctgtgctattggatgctttcttgaagacatgcaagcttgttgcaggtatcagaagcagacaaaaaaaggacttgcaagatacaatctaagttggagcagcaagtttagagtggcctaaaagacactagagagagattaatttcgtcggtggaggaacactacacagtcgcaactcacaaggctgtgaaattgatctatggccaaattgacaccgcaaatctgcagccagaaggaagttgaggtagtccattcgacagaattttgaaatctagggtatgcatttcaagggcattaagctgtaatatatttacaaattgtagcaatgcatttttctaaacatagtttgataatggatgcagttatactgtctctgctcactccgcagatgattggattcatgtcctgtatggtgtatgtataagtctatgcactttataatgtacaaattatgatagttcaaattctgtgagggtgatctcatttttgtcagcagcatatatagaaataacttagctgttatacaagccatagtcatattgtaagcatagtaactccaaggctgtcttttacttgattttagtattttcatcgttcttacaaattttggagtcctgtttgtactaatggttttataacctgcatagacgtccttttacttgattt

SEQ ID NO: 206973 - DNA, 2666 bp, Zea Mays
cagctcctggcgtgctgagctaaggtggtggatgaaagaacggacccctttcttggtagattgactagaccagccaccattgaccaatcccacaatttcttctctgatgtcacaaacaacttcaaagatttttcaactgtagtttcagagttgcatcaacaccttctggatgcaaatgtagaagttacttacacagaatacttagatctgatgaaagtggaagttgatcaacatcttaataagctctcggaggacataagggacctcaaaagctgtaacttggcccacaaatatgacacagatggttcatgctgtacagcatgccatgttgggaagctagctgagatagatgacaggttcaacagcttgaagtttctgctggctgtggtgttccgacaaattagagagatcctcacagtggtcaattcttcaattcatgatcttcagtgggagcatgagttacagtcagaagttaccggcatcattattggagactgtattagaggtcttcaggatgaactcgagaggaaactgtatgagcaaagttccatggtgaacagtctaagaaaaaactgccaggaaactgtggcgcagtttgcttccatacgtgaagagctgattgctatttctaatattctgttaccttctgaagaggaaccacaaatttccctctgtaggcatgaaagtttgggtaactggagtgacagatggaagttcagctttttcagaaagcgagcacaccaggatcactctttatcttccacgcaaaaccagaattctgcaacacagaaatctataagtcctagtgaagttatatcagaaagatccgacttccgacatctgaagggtatgactagacatgaaatgcttaactatttcagatctgagatcagtaaattaagaaggctgcatgagttggatttgcaagagaaaacagaagagctgtttaaattcaaacgagagaaatggtcattggctcttaagtatgatgtagaatttgagcctttaagaaggaaattccctgaggtcatttcaagatttgaccaaatcatgtccaatggaatggcagcagcagtacctacaatctgcagtaatagtgatgcattcgatgaaacgagcagattgagcagtataattgattcactataccgtgaaaaccagcatcttcattgtttgcttgcagagaagatgaagaatattcaggaattatcaagccaaatatctgattccaccaggaaaatgtcacttcaatattcattagaaaaacaaattttgagacaactcaacagcactcaagtagaatatgaggatctttttgttgaaagtactatcagagatgaaatttaccaaactgttgtgagaacattggttgatagtcataggaatgttttggaggataccacccaaactttccgtgcaaaagtgtcttcacttgaagccgcactctctgaaaaggacaaggcgttgtgtttatctgatgaggaaaatcaaatgctaaaggaaaagttgtcaacactagaaaaagagcattttatccaaaataatcagcaagatctcgagctaatcaagcaagaaagtgaggaaatggttctccgtgatattgagatggagccacaaagatcatgtgagatttctgatcgagatatacagtacgaagggctcatcaagctgaatcaggttttagaaattgcctcaaccacggcaaaagaaatagaaacaaaaaggttgaatctcagtgatatccaaggtaaaagagagcaagaaaaacagctagattgcatcctggtatctatcatggatttgtcaaaagaatttatggagactgaacatagagtgccaaaagatataaaaggaaatgaaaaaaagactgataatctgcatgatcaatgcaattatatgatacaacaggccatcgtattgacaaagaagggtctatggtataagcaaatgcttgacacaaaacgttctgagcttcgaaaagctgaatctgaggttgacattatgggagacaaggttaatgcactcttgagtcttgttcaaaagatatatgtaactcttgagcactactctcctgtttttcagcatcatcctgtgctattggatgctttcttgaagacatgcaagcttgttgcaggtatcagaagcagacaaaaaaaggacttgcaagatacaatctaagttggagcagcaagtttagagtggcctaaaagacactagagagagattaatttcgtcggtggaggaacactacacagtcgcaactcacaaggctgtgaaattgatctatggccaaattgacaccgcaaatctgcagccagaaggaagttgaggtagtccattcgacagaattttgaaatctaggttatactgtctctgctcactccgcagatgattggattcatgtcctgtatggtgtatgtataagtctatgcactttataatgtacaaattatgatagttcaaattctgtgagggtgatctcatttttgtcagcagcatatatagaaataacttagctgttatacaagccatagtcatattgtaagcatagtaactccaaggctgtcttttacttgattttagtattttcatcgttcttacaaattttggagtcctgtttgtactaatggttttataacctgcatagacgtccttttacttgattt

SEQ ID NO: 206974 - DNA, 2580 bp, Zea Mays
cccgaccacccaattacccttcatttccccgtcgtctacctccaccacatttctcgctcgatagcttggatgggcagagcacccttcgcggcagactcgaggcggcagaaatggcggaaatctccgggttcctcctcaagcaacagaccacgtgaactacgacgaggagccaggcaacgggcgccatgtccaacgtcttcgacatgaaagggagggacatgaatggtgcagatgcgcagagctgcaatgcagcacgggcgcggttgaagagcgcgagcctgcaccatgtggatttgcccagcaacaggcaaaaggatgacacacgccagtaccagatgtttgttgccacatggaatgttggaggaaagactccgagcaacaggctcaacttgcaagattttctccaggttgaagaatcgcctgacatttacgtcttggggtttcaggagatagttcccctgaccgccggaaacgtgctggtcgtggaggacaacgagccggcgtccaggtggctggggctcatccaccaggcgctgaacgagacccaggagcagcccgacgacgacgacgacccgccgccgccggagccgcccgcagactcccggcgccaccaccgccgccgcgactcctcgctcttcttccagacgccgtcgctcaaggtgctcagcaacagctaccgcgtcgacagcgcgctcgtcaagacctgcaactgctccaccgagccgtcgtccatgcgccgccgggcagcggagatacgcgcgtccgtgtaccgcgccgatgcagaggccgaagcggccgccggcgacggcgagacatccaccagcgggtgcaacaacgacacggaagcagcaagccacggcggtggcgctggcacgccgacggcgcagtgcgagcctggctgcggcggcggcggcagcataagctactgcctgatcgggagcaagcagatggtggggctgttcctgtcggtgtgggtgaagagggagctggtggagcacgtcggccacctccgcgtcgactgcgtcggcaggggcatcatgggctggctcggcaacaagggctgcattgccatcagcatgacgctgcaccgcaccagcctctgcttcgtctgcagccacctggcctccggcgagaaggagggcgacgagctgcgccgcaacgccgacgtcgccgagatcctccggagcgcgcacttcccccgcgcctgcaagctgccggccagccatagagtccccgaaaagattcttgagcacgaccggatgatatggcttggggacctgaactaccgagtgtcgctaagctacgaagagacgagaacgttgctcgaggagaatgactgggacgagcttctgaagaaagatcagctgataatcgagagagaagcaggaagggtgttcagtggctggaacgagggcaagatctgcttcgcgcccacgtacaagtacacgcacaactccgacgcgtacgccggcgagacggccaagtccaagaagaagcggaggacgccggcatggtgcgaccggatactgtggcgcggcgacggcatcgagcagctgcagtacctgcgcggcgagtccaggttctccgaccaccggccggtctgtggcgtgttcgccgtcgagctggacgccgacgatggcagcaagatcaggagagcgtactactccgtgaacgcgcggatcggctatgacaagacggcggcgtagagcttctgcgagccaccgtagtggaatgttgtgtgtaggcaagatgactagaccagtacagattgtacagaccattgatgcatggcagtggcagctcaagtctgaggagcacgctttcgttgtgtatttgtgtgccgtctgtgcctggcggaaaagatccaacggtgtccggtgtcccctacaacacatgcagatagcaattcttttctcttgtcctcttttttttttaaaaaaaaagcaggacttaccaaaccatagtatcacatgttcttcctcatcatggtgttatgggcagagtctgcaaggaggtggttacattttgtgtgttttgaaaaaaaagtgttgaaattctcattgccaagttagataattctgcagccatacaatatcaatgttcaagtgcgtcgacctccaataatcatgtaaattctattgaacaaattgaaggccttttctcaagaccgctcagcaaggattagatggacgcaattatggagatggcaaatcaagggaaggggaagaaaggaagcaagttcaggggacgcagagtgtcgccacttaaggcctccatcatcaaagctgcttcgggaaaatgaaccgctcgtcctgattgagttatcagtggttctagtttttatattatgtgttcaaagttaattctcccttgctcttgtctgggggtagagcatggtgtgctgcaggttcttttgctagactattggccgttgcatggtatttggtagtcctggtggtggtgttcgaatcattggatcctcatccctctgtatcttactaatttatggttggaactattatgtgtgttgtgggtcatgtgtatctgttctagaatgttattggtgatcatggctgccag

SEQ ID NO: 206975 - DNA, 2253 bp, Zea Mays
atgggcaactccctcgcctgcttctgctgcgcgggcggcgccgcggggcacgtggcgcccgccgcgctcccctcggaccccgcctacgacgagggcctcggccactccttctgctacgtccggccggataaggtgcccgtgcccttctccgcggacgacgacctggtcgccgacgccaaggcggccgaggacgccaccacgttccgggccatctcgggggccgcgctcagcgccaacgtctccacgccgctctccacgtccctcctcctgctgctgccggacgagtcggcggcctcctcctccggcttcgagagctccgagtcgttcgccgccgtgccgctgcagccggtcccgaggttcccgtcggggcccatctgcgcgcccgccggggccggggccgggttcctctccgggcccatagagagggggttcctctcgggccccctcgacgccgcgctcatgtcgtccggcccgctccctggcgccgccacgtccggccgcatgggaggcgccgtgccctcgctccgccggagcctgtcgcacggcggccgccgcctgcgggatctcacccgcgcgatcctcgcgcggacggagaagcttcagggttcgatggatctcggcctcggcctcggcctcggctcgcccgatggcgccgggctgcagctgcagtgggcgcaggggaaggccggcgaggaccgcgtccacgtcgtggtgtcggaggagcggggctgggtgttcgtcggcatctacgacggcttcaacggccccgacgccacggacttcctcgtctcccatctctacgccgccgtgcaccgcgagctccgcggcctgctctgggaccagcgcgacgcgcaccccgaccagccgaccacgaccagcaccacggcctcagatcaccaggaccgccgccgccgccgcgcccgccgctcgagaccgccgcgcggcgccgacgatgaccagcggcggtggaagtgcgagtgggagcgcgactgctccagcgccctgaagccgccgacccagcgccctcctcggggcagcagccagaacgaccacctcgccgtgcttaaggcgcttgcgcgcgcgcttcgcaagaccgaggaggcctacctggacgtggccgataagatggtcggcgagttcccggagcttgcgcttatgggctcttgcgttctagccatgcttatgaaaggggaggacatgtacctcatgaatgtaggtgacagccgggctgtcctgggaacaatggacagtgtagacgtcgagcaggtcaccagtgatggattggttggggatggcacgccgctcttgtcagctgtgcagcttacatcagaacacagcacgtcggtgcggcaggaagtctgcagaatacggaacgagcaccctgatgacccgtccgcgatctccaaggaccgtgtgaagggctcgctcaaggtgacgagagcgtttggagctggtttcctgaaacagccgaaatggaacgaggcgctgctggagatgttcagaatagactacgtcgggtcatccccgtacgtcacgtgcagcccttcgctctgtcaccgcaggctcagcacgagggacaggttcctgatactgtcctcggacgggctgtaccagtacttcaccagcgaggaggcggttgcccaggtcgagatgttcatcgcgacaacccccgacggcgaccctgcccagcacctggtggaggaggttcttttcaaagccgcgaacaaagcagggatggacttccacgaactgatcgagatcccacacggcgaccggcggcggtaccacgacgacgtatctgtcattgtaatatccttggagggcaggatctggaggtcttgcgtgtaaataggtcggccatactagattagagaaagaaacgtatatatctgtagagatagagagaggttcttgcaggcctattccattactcccagctgctcctgtacaaaatctcaacgaagcaccactgggtgggcttgggatctcggcgcatccaagttgaatcacgatgagaagatgcgtcccctggagcgcagtgccgtataagatgttcatgtaaaagaagatctgttcaactactgataactaaaatagcgaccaattggtcaagtttttttttgacctttttttgggggcatcctctgtgttcataccacaggtaaaactgtacatgtgcgcagtgcgcggcagactgattcaaagtcggacttgtatggttctgaagtactccgtactaaactttatgcaaat

SEQ ID NO: 206976 - DNA, 1922 bp, Zea Mays
caagtgccaacagagcaacgcccaggaacacacgacacgaatcaggcaaccagctgccgagggaggaaccctagcggaacaggtgacggcggcgcgctaccggtgacgggggatacggcggcatcgtcctcctcggcccctcctccatccccggcgtggcggcgccagcagccggcctgcagaagattaaaggagccccaggagccccaactttcggaggacgacccagctgccttcaaagttcaaaatcaaaatgacggtggtgagggtggacgagaaccctgcgccggatggagagaactctcccctagacgatgagtacgtctcggccgacgatgaacacgttgatgatgaagacaaggagaccgatagcatcgacgactatgaaaaccccagcgggacgccccagatgaagaagggtccctggtcgcccgaagaggataagcgtctcaaagactacgtcgaggtacacggcgcggggaactggaataaggtgcagcagaatgccaggctcaaccgctgtggcaagagctgtcgtctccgctggacgaaccacctcaggcccgatcttaagaaggagcctttcaacgctgaggaagaggaaaagataatcaagcttcacattagacggggccccaagtggtccatgatggcctcatatttgcctggccgcacagataatgaaataaagaacttttggaataccagaaaaagaagaaaacagagatgtggttcgcctctctatccagaatatatgctttctcaggttagtcataaagacatggactttgaaactcttggagagtcacatggcaagaaacggtcaaatgagtgctcaaaagaaaaggttgttgatgtgcaagaacttgtggatgagttaattgtatttgagcaccttgactatggtaaggatatagtgtttccaatcagacctttgaaatgccatgcatctactggcagtgtgcaaatttctggtgacattcggaaaaccttttgtcccactgatttgaactatgtaatgacaaagaatcagtcggtgcctgttggtagtgccattggcagtggctatccactttctgtgcccctgaacatgatgcctgttctgaaactcaagctccagacttatgttcaggttcagatgttgttttcgaccccagccaatgttatccagttgctagtttttctgatcttgggatctcggatacaccactaacatcaggtttcttgaatgatataacactagcaagtttgttgaatgtcaatttgaaggacctgtcacatctcaaccgacaggaacctaccaatgatacatcacttggaggagcaagtttattgaatgctaatttgaaggaccagtcacatctctctcagtgagctggaatgcatgtgcctgacttgtgggggcatggttttgaaattctcaggccaactttccttcactcgagagcttgatagagagaattcacgaggatggaagagtagcagagaagacactggacctgccaatgtatgccaagtacaaagactcgccttatctgagaaacccttcgaagcacgggagtactatcggtgggacccaggctgagatggattccaagtgagaagccccctggagggccactagataatctgttacttatttgccctatggtaaatgcgtcggtgttgatgcagaaacaattggactcattgtgagcttactcgcttcttttcgaaagtagttagtattcctcgaagtggtgtttttaccttgtaataaaggaaaaaaaataaagtggggttattgaaacttgagagtcaaatactgagatgttatgcgcgttttgatttctgaattaatcgatcggtatcacttgtactgtttttatacgacgatgctcgaaaccattcatttgtcattttaatttgatacacttgaagtc

SEQ ID NO: 206977 - DNA, 800 bp, Zea Mays
ctagaagcggggcccacccgaaacgctagacctatcctcttcttcccgtggcacggccaattttgcttccggctgccgctcttctccgccgccgccccgatccccttcctccccaagcccttcaactatccactcccgcgtccccggagaagcggcgagatgtacggcatcctgacctccccctgccctcgagccccgcttctccgcgctctcccgagcccatccgcccgcgcattccccagaacactagccttccccgcgaggcccctcccccgcggtctccgcctgacccctccgcacgccgccgcggaggcatcggcggcagccacggcgttgggcgggcttctggcgtcgccgctctcgactctggaggccgccctgcggggcctcaacctcgcgccccttcgcgcccccgtggcggcggcgatgtcggcggccgtgcggtggctgggagtgtaccgggaggtgctgctcgtcggcgtgctgctctcctggttccccaacatcccctgggaccgccagcccttctcggccctgcgcgacctctgcgaccccttcctcgccctgtgccgtgaggtcatgccccccgtgttcgggcgcaagctcgacctcagcccgcttgttgcattcatggctattgacatcatcatcatgatcctgcgcccgcagccacgcatgtgatgactccctgcagcagtggtcttgtggtaaaatttgtttcttgatcctgcatgtggataacctcactttcatgctgtacacaatagcttgtagatttagggaaatacaaccgagtggaa

SEQ ID NO: 206978 - DNA, 578 bp, Zea Mays
ggatttggatccactttgccatcaggcgcgcctcgttctttcttctccgccggctgcatccacaccagacaccacaccacgttgctctcaccggtggaaggaagtggaagtagaaggctggaagcggaagcattcgatttccatcgtggggcatggcggcggaggggaagaggaagggcgtcccggcgctagggtggtggctgatgctagtcggctccctccgcctcgcctccgtttggttcggcttcttcgacatctgggcgctccgcgttgccgtcttctcgcagacggagatgactgatgttcatggccgtacttttggtgtctggactcttttgacctgcaccctgtgcttcctttgcgcactgaacctggaaaataggcctctgtacctggccaccttcctatcattcatctacgctctcggtcatttcctcacggaatacttgatataccacaccatggctgcagcaaatctgagcacagttggcttctttgcaggcttgtcatttaaaccttttcaggatcttatcagtaccttacttttgcaccttctgcgatgcaatgcagcatttatc

SEQ ID NO: 206979 - DNA, 608 bp, Zea Mays
ctaagctttcctagaacgtcgataatatggatgcttctgcagtggaattctcatgggaacccccggggttcctatgctgggaagcagtcatgactgatgctcgggttgttcgcttgatgtggtctgggcccgctaggggaagaaggatggttgaagaaagctcgctggaaagccgcctgatgatggctctgcgtcatttgtacttcagttttcaacttttcatcatgttatttcgttgcatgagacgttcgtccgactgagcagggagatttccgaacagttatgccactggctgggaatgagaatttttgaacactgaactccggctgaatcatgtagtcaggagctgtaatagcattcagatagtcaccggttgggagctgagatgccaataaggcggcgggtatagaaaagaggtgggcgtatcatgtgctttcgttgcagccaaagggtgtatgtactctgaaacttttgttgtactgatgctgcatcttttgttcttgaaataaaccgtacattagtacagtagagtcgataaagtttttatgtattgcgatgattgttcaatcactttatttttttttacctcatgttcagttacttttttt

SEQ ID NO: 206980 - DNA, 2171 bp, Zea Mays
ttttttttgttctagagagaaattaataaaaaaattatataaatttttattactatacttcataatattttcaataacatgataataaattagcttcaaattctatatatatttatattaaaatatagatttgtcgatattttagaaacatcctctcagagccacccgcaaaagtccgataatccttttccggcacgacagatccaccgtgtttggccctctcgaactcaaccgacagctgccgattcttcacccttacttttcacgtcatgaatgctcgtcagctcgtgagacgtgacgccgtgtcctgaaaaaaaaaagacccgtcccggcgacccccacacccttcaatccggggaaaaaaagcaacagctcgattgcccgggtcttccaaaaccctcgagatctcggttggtggtgtggtggggtggggtgctcttccctctcgcctccgctccgaagcatcgatccgaactcctcggttactcgcggcagcggcgtgtcgagatgcgccccaacattatcacagaggctgggattccaactaggttgaatcagtggtggagcagcattccgtttgttacttctggtgttatcttgatatgtggagtaatttatctgctctgcttgttgattggctatgattcctatgtggagatatgcttcttgccttctgctgtagcatcacattttcaagtatacaggttctacacatctgttctctttcatggttctttgcttcatgtgctattcaacatgcttgccttggtacccttgggcactgagttggagagaatcatgggatcagtccgtctcttattcttgatgctccttcttgcaacaacaaatgcaattctccatctcacaattgctttcttggtggcttacaatcctctgtatcacgttccaaatcttgtgaatgaatgctccattggcttttctggagttatattctcaatgattgtcattgagacaagtctgagtggtgtgcaatcacgaagtgtcttcggcctcttcaatgttcctgcaaaatggtacgcatggattttgctagtgctatttcagtttctcgcaagcaatgtttcattgctgggacacctttgtggcatcttgtcaggatttgcatacacttatgggctgttcaactacttgcttcctgggccatcattttattctaaaatcgaaggcttgtcagcactatctgtttgtgtgaggcgtcctggctttattatgtgtactggaggcactacttatggtcagcttcctacatactctaacacgtctgctgcaccaagtgctctcataaatggaaatttcttgagaaatatatcttcatggatgcctagcagacacacatcaactgctcaggaaggagaagacccaaggtttcctgggagagcacgaacacttggttctgtaggaactgaacccactgcaagggaggcaagtgcgcatttgcatgctaggttgttggataacacaactccaagtgacccactaacgaatacacagcatacagctgtgaacacagtcagagctgatgcaacagtgacagctgagcaggttgatacatttgatgaagaacttaagaagctggttggaatgggctttgaaaaggtatttcaaactcaggctgaagttgctcttgctgcagctgatggggatccaaatgttgccattgagattctgatgagtcagcagggttgaagtttgaccataaagtacaaattgaaaggaagcacggtatcgagccattttttgttcttacaaaggttcaaaaagtaggctgtggtttggggagtctgaaaaaggatggctgcaatcttgtttataccgggggtgcagaaacaacgtgcagcctaattgcaattctcaaggctttatgtaaggtagaaagtaacgttggatgttctgttaaatacgaacaatcagaaaatgctgaatttagtctgaaaatagccagtgtgtttgttttagcttgcagattattacaatctacaagccaggggaaactagattattgggctgtaacaataagactttgacgttgggactggttcccttttgagattgtggatccgtcctgcgttgagacctttttagcggcctatgaattttcacatgggaaaaatctgcaaaaataatgcataatctttaacctcaaatcaaca

SEQ ID NO: 206981 - DNA, 1975 bp, Zea Mays
gtcgtcgtctttccctcgcctctctctctctctctctctctctctctctctctctctctctcgaaacccacgtgaagcctgagcgccgaggcctcccctccgtccaccgatcccgccgctcccctccatccgcattcctggccacgagccgtgaaatcgggatccgctgcggccgctgatcccgacgacgagcccggattcgcccgccggccccatgggtcccgtcttctccggccgcatttgggacatatagccgtcgcgcgctcttcttcctgggtggagcgtccatgaggtggaagcagcagcgtccctagtgccagggtctgtcggctgagtgcgggggagaatgaaaggagtgtccgaaggcctgatcatcgggaccacggtcggggtggtcataggcgtgctgctggctctcgggacgctgctgtgcctgaggcggcgtcggcgttcccagacgcagataaggagcagcagctcgaggagggcgtcgactgtccccatccgcaccaatggcgttaacgcctgcgccatgctctcgaactcgaccacggggcaggagtctccgactccgcgggagctcgaagagcgtgggagttctctgtggatccaagggccaggtagaaagagcgtgatctctgcttctggggtacccagatatgcgtacaaggagctacagaaagctacaagcaatttcacaacattgttaggccaaggagccttcggccctgtctacaaagcagacatgtcttctggcgaggtactggctgtcaaagtgctgtcgaacaattccaggcaaggtgaaaaggagttccaaaacgaggtcttactccttgggcgactgcaccacaggaacctggtgaatttggtcggctactgcgccgacaaagggcagcatatgctactgtacgcgtacatgccgaacgggagccttgcgtcacacttatacggcgaagacagtgcgccactaaagtgggacttgagagtaagcatcgctctggatgtcgctcggggtctggagtacctgcacgacggggctgttcctccggtagtccaccgcgacatcaaatcccccaacattctgctggaccaggcgatgcatgctagggtcgccgacttcgggttgtcgagagaggagatggtcactcgcggcgacggcgccgccaacaacatacggggaacctacgggtacctcgacccggagtacgtgtccacgcggtcgttcaccaagaagagcgacgtgtacagctacggcgtcctgctgttcgagctgatcgccggcaggaacccacagcagggcctcatggagtacgccgagctcgccgccatcaacgccgacgacgggaggaggaccgggtgggaggagatcgcggacgcgcggctaggaggcgcgttcgacgcggacgagctcaacgacgtcgccgccgtggcctaccgctgcgtcagccgcgcgtcccgcaagcgccccgcgatgcgggacgtcgtgcaggccctggcccgcgtggcgaggcgcggccgcggccgcggcaggaagcagcagcaccacccgccgcaggccagcagtgccgccgcgggcgacgagtccgccgtcgacctggaggcggaggaggggtccgaggcaggccggtcgtcgttctctggccttcttcagagagaggagtcggtcggcagcgtctctgatctaccagatgtctgagcctgacggattcttttgtttttgttgcctagagatgcagttttgagcagtgagggtgggtgtaacttgtggtggtgcctagtcaattgtaagtgtgttgtatagagtgcattgtgagttgtgactacttttgttgatatacacaagctgattgttaccatgtcatttgtcattgcctttttcagcttatgcatgcatggcgcatatacatcacagtgtaaaaagttgttttgcactatagactcctttgaaataaagaaaaaatatgaagaatttttt

SEQ ID NO: 206982 - DNA, 1033 bp, Zea Mays
acccaaatgcttaaactgttagaagtgaaattggaagaggagcatgggactcttggttaatgccacttcaagagcaggcaaatacggtttgtaagaaggtcaagaaaatgaaagagctcagtgaaggttacaatatagttggcctgtctcaggggaacttaattggcagggctgtaatcgagtactgtgattgtggacctccgtctgggtttctttgtattcttattgatgatctgattaaatcagagatatattcagactatgtgcaggcgcatcttgcccctagtggttacctaaagatacccactgatatggaagattatttgaagggttgcaaatttcttccaaaacttaacaatgagatcccaagtgcaagaaatactacctataaagaaagattcagcagcttggaaaacttggtactgatcatgtttgaggacgatgcagtattaatacctcgggaaacagcgtggtttggttattaccctgatggagcctttagcccagtgctgccccctcaagagacgaagctgtatacagaagattggattggcttgaagaccctggacgaggctgggcgtgttaaattcgtgtctgtgccaggaggtcacctgcgtatcaccagaagcgacatgaagaagtacattgtgccttacttgacgccggaggcgtcatccaagaagaacatacacatacaccggatgctgtcgctttgagcgagtatctaacaaggtttgtatcggtggccattgtgccctgacacgtgggccatgtgttgacgccttgtaaatacgctgaacacgaagggaggaaatgatagctccttggaagagtggatccgaacttgtgaagtgaagcgtgtttggtcctttccgtttcctatctgacaaacaaatatgtccatgccgtggccacaacacgcataaatcattatgcacatttcctattgagtaaaatacaattccggtctgtaaacttgtcgaaccatgtcatgccggttcataaacctttaaaatatgtttcttaaatgctt

SEQ ID NO: 206983 - DNA, 1129 bp, Zea Mays
taccatgttcgagtagacacactaaccagttgaacccaaatgcttaaactgttagaagtgaaattggaagaggagcatgggactcttggttaatgccacttcaagagcaggcaaatacggtttgtaagaaggtcaagaaaatgaaagagctcagtgaaggttacaatatagttggcctgtctcaggggaacttaattggcagggctgtaatcgagtactgtgattgtggacctccggtcaagaatttcatatcaattgggggtcctcatgctggtacagcttcagtgccactttgtggttctgggtttctttgtattcttattgatgatctgattaaatcagagatatattcagactatgtgcaggcgcatcttgcccctagtggttacctaaagatacccactgatatggaagattatttgaagggttgcaaatttcttccaaaacttaacaatgagatcccaagtgcaagaaatactacctataaagaaagattcagcagcttggaaaacttggtactgatcatgtttgaggacgatgcagtattaatacctcgggaaacagcgtggtttggttattaccctgatggagcctttagcccagtgctgccccctcaagagacgaagctgtatacagaagattggattggcttgaagaccctggacgaggctgggcgtgttaaattcgtgtctgtgccaggaggtcacctgcgtatcaccagaagcgacatgaagaagtacattgtgccttacttgacgccggaggcgtcatccaagaagaacatacacatacaccggatgctgtcgctttgagcgagtatctaacaaggtttgtatcggtggccattgtgccctgacacgtgggccatgtgttgacgccttgtaaatacgctgaacacgaagggaggaaatgatagctccttggaagagtggatccgaacttgtgaagtgaagcgtgtttggtcctttccgtttcctatctgacaaacaaatatgtccatgccgtggccacaacacgcataaatcattatgcacatttcctattgagtaaaatacaattccggtctgtaaacttgtcgaaccatgtcatgccggttcataaacctttaaaatatgtttcttaaatgctt

SEQ ID NO: 206984 - DNA, 941 bp, Zea Mays
tagtcacagatgatataatagcaaggagacaacaatcttgaaattggaagaggagcatgggactcttggttaatgccacttcaagagcaggcaaatacggtttgtaagaaggtcaagaaaatgaaagagctcagtgaaggttacaatatagttggcctgtctcaggggaacttaattggcagggctgtaatcgagtactgtgattgtggacctccggatatggaagattatttgaagggttgcaaatttcttccaaaacttaacaatgagatcccaagtgcaagaaatactacctataaagaaagattcagcagcttggaaaacttggtactgatcatgtttgaggacgatgcagtattaatacctcgggaaacagcgtggtttggttattaccctgatggagcctttagcccagtgctgccccctcaagagacgaagctgtatacagaagattggattggcttgaagaccctggacgaggctgggcgtgttaaattcgtgtctgtgccaggaggtcacctgcgtatcaccagaagcgacatgaagaagtacattgtgccttacttgacgccggaggcgtcatccaagaagaacatacacatacaccggatgctgtcgctttgagcgagtatctaacaaggtttgtatcggtggccattgtgccctgacacgtgggccatgtgttgacgccttgtaaatacgctgaacacgaagggaggaaatgatagctccttggaagagtggatccgaacttgtgaagtgaagcgtgtttggtcctttccgtttcctatctgacaaacaaatatgtccatgccgtggccacaacacgcataaatcattatgcacatttcctattgagtaaaatacaattccggtctgtaaacttgtcgaaccatgtcatgccggttcataaacctttaaaatatgtttcttaaatgctt

SEQ ID NO: 206985 - DNA, 1371 bp, Zea Mays
cgcgaaacgcgccaacaaccagatcaatggagtgaggcagtgactcagctcagggcctcgggcccagcacaccaaccctccagtagtatctctgacgtgcgggctccgccagacaacgagctcacgagtcacgatccaaatcccttttccactccgccggacgtcgagagaggcggtgggtgcgggacgcgaaggcgaagccctagccccctccctgccgcggacgccgatggacccacctcgcgccgtcgcctttcttctcatactcctgcccgtgctcgccccggtggcctccggtgtacctttcgtcgtcctacacgggattggcgacgagtgcgggaacgatgggctgtcatccttcaccaagatgcttggggagtggtcaggctccaagggttactgcattgaaattggaagaggagcatgggactcttggttaatgccacttcaagagcaggcaaatacggtttgtaagaaggtcaagaaaatgaaagagctcagtgaaggttacaatatagttggcctgtctcaggggaacttaattggcagggctgtaatcgagtactgtgattgtggacctccggtcaagaatttcatatcaattgggggtcctcatgctggtacagcttcagtgccactttgtggtgatatggaagattatttgaagggttgcaaatttcttccaaaacttaacaatgagatcccaagtgcaagaaatactacctataaagaaagattcagcagcttggaaaacttggtactgatcatgtttgaggacgatgcagtattaatacctcgggaaacagcgtggtttggttattaccctgatggagcctttagcccagtgctgccccctcaagagacgaagctgtatacagaagattggattggcttgaagaccctggacgaggctgggcgtgttaaattcgtgtctgtgccaggaggtcacctgcgtatcaccagaagcgacatgaagaagtacattgtgccttacttgacgccggaggcgtcatccaagaagaacatacacatacaccggatgctgtcgctttgagcgagtatctaacaaggtttgtatcggtggccattgtgccctgacacgtgggccatgtgttgacgccttgtaaatacgctgaacacgaagggaggaaatgatagctccttggaagagtggatccgaacttgtgaagtgaagcgtgtttggtcctttccgtttcctatctgacaaacaaatatgtccatgccgtggccacaacacgcataaatcattatgcacatttcctattgagtaaaatacaattccggtctgtaaacttgtcgaaccatgtcatgccggttcataaacctttaaaatatgtttcttaaatgctt

SEQ ID NO: 206986 - DNA, 1308 bp, Zea Mays
cgcgaaacgcgccaacaaccagatcaatggagtgaggcagtgactcagctcagggcctcgggcccagcacaccaaccctccagtagtatctctgacgtgcgggctccgccagacaacgagctcacgagtcacgatccaaatcccttttccactccgccggacgtcgagagaggcggtgggtgcgggacgcgaaggcgaagccctagccccctccctgccgcggacgccgatggacccacctcgcgccgtcgcctttcttctcatactcctgcccgtgctcgccccggtggcctccggtgtacctttcgtcgtcctacacgggattggcgacgagtgcgggaacgatgggctgtcatccttcaccaagatgcttggggagtggtcaggctccaagggttactgcattgaaattggaagaggagcatgggactcttggttaatgccacttcaagagcaggcaaatacggtttgtaagaaggtcaagaaaatgaaagagctcagtgaaggttacaatatagttggcctgtctcaggggaacttaattggcagggctgtaatcgagtactgtgattgtggacctccggatatggaagattatttgaagggttgcaaatttcttccaaaacttaacaatgagatcccaagtgcaagaaatactacctataaagaaagattcagcagcttggaaaacttggtactgatcatgtttgaggacgatgcagtattaatacctcgggaaacagcgtggtttggttattaccctgatggagcctttagcccagtgctgccccctcaagagacgaagctgtatacagaagattggattggcttgaagaccctggacgaggctgggcgtgttaaattcgtgtctgtgccaggaggtcacctgcgtatcaccagaagcgacatgaagaagtacattgtgccttacttgacgccggaggcgtcatccaagaagaacatacacatacaccggatgctgtcgctttgagcgagtatctaacaaggtttgtatcggtggccattgtgccctgacacgtgggccatgtgttgacgccttgtaaatacgctgaacacgaagggaggaaatgatagctccttggaagagtggatccgaacttgtgaagtgaagcgtgtttggtcctttccgtttcctatctgacaaacaaatatgtccatgccgtggccacaacacgcataaatcattatgcacatttcctattgagtaaaatacaattccggtctgtaaacttgtcgaaccatgtcatgccggttcataaacctttaaaatatgtttcttaaatgctt

SEQ ID NO: 206987 - DNA, 671 bp, Zea Mays
cgcgaaacgcgccaacaaccagatcaatggagtgaggcagtgactcagctcagggcctcgggcccagcacaccaaccctccagtagtatctctgacgtgcgggctccgccagacaacgagctcacgagtcacgatccaaatcccttttccactccgccggacgtcgagagaggcggtgggtgcgggacgcgaaggcgaagccctagccccctccctgccgcggacgccgatggacccacctcgcgccgtcgcctttcttctcatactcctgcccgtgctcgccccggtggcctccggtgtacctttcgtcgtcctacacgggattggcgacgagtgcgggaacgatgggctgtcatccttcaccaagatgcttggggagtggtcaggctccaagggttactgcattgaaattggaagaggagcatgggactcttggttaatgccacttcaagagcaggcaaatacggtttgtaagaaggtcaagaaaatgaaagagctcagtgaaggttacaatatagttggcctgtctcaggggaacttaattggcagggctgtaatcgagtactgtgattgtggacctccggtcaagaatttcatatcaattgggggtcctcatgctggtacagcttcagtgccactttgtggtttacggacaagcactcgctcgcttg

SEQ ID NO: 206988 - DNA, 2017 bp, Zea Mays
atggccgaacacacaagctcgatttcagggcagattcgttgtatatgcacgtacgcgtgtgcgattccaggatggacgtttgtccattgggcccgcaatttcggcggcgacagaaatggacgggataaagattccgtcacgtccccgtcgtccggcaccacccagagcttgtccctctcgcgtgttgcttcctcggttcctccccagctcaaacttccaagaacccgtgaagtgaagtgaggaggtcggcggaaccggaacccaggcgatacgagatgatcgcaaacggcctccgcaaatccagtgctgcctcctcccaggttagcaagctggtgaaatacattgctagtgctggaagcttgcaaggggggcacagtttatcagagccgtctgccagacattacagctctgaaccttcacttcaggcgacagaagaaaatgggtttaaggggcacagcatgctggctccattcacagcgggatggcagagcactgatgtacacccattggttatagagagatcagagggttcttatgtctatgacagcaatgggaagaagtatattgatgctcttgcaggactgtggtgcacagctttaggatctcgcaaatgatattctcagcatgttcaccgcaagggagatgggaaaggtgttcttcacaaatagtggttcagaagcaaatgactcccaggttaaactagtgtggtattataataatgcactgggaaggccagacaagaagaaatttattgctcgctcaaaatcgtaccatggatcaaccttgattgcagctagtctatcaggtctgccagcgcttcatcagaagtttgatctaccagcaccttttgtcctgcacacagactgccctcactactggcgattccgtcttcctgatgagacagaagaagagttttcaactagacttgccaataatttggagaatcttgtcctcaaagaaggacctgaaacaattgctgctttcattgctgaacctgtgatgggcgctggtggtgttatccttcctccaaagacctattttgagaagattcaggcagttctgaagaagtatgacatcttgttaattgcggatgaggtcattactgcatttggaagactagggacaatgtttggatgtgatatgtataatattaaaccagatcttgtttccatagccaaggctctttcttctgcatatatgccaattggagcaattctcgttagcccagaaataacggatgtaatctattctcagagcaataaacttggttcttttgctcatggctttacatactcgggacatcctgtttcttgtgccgttgctgtagaaaccttgaagatatataaggaaaggaatattgtagaacacgtcaacaaaattgctccaaggttccaggagggaatcaaggccttctcaggcagcccaattgttggggagatacgcggtctgggactgatacttggaactgaatttgtcgacaacaaatctccaaatgatccatttccagctgaatggggtgttggttcgatatttggcgcggagtgcgagaagcgtgggatgctcatcagggtggctggggacagcatcatgctgtcacccccgctgatcatgactcccaatgaagtcgaagaaaagcctgattgccctcttagatcataagcaaattcggcgatgctctgaaggctacagaggaacggattgtagaactgaaatccaggaagaattagccgatgctgctggttgtaacgacagtgaggatggtgatggcagtgtccaatatacagtgtattttcaaactttatttcagtaaagtgctgggctggaatcttgtagtcggttgcatagcgacagttgttccttgttatggagcaataagtaatgcatctgcttaatcagagtagcatacccttgggtttgtgctggtacaggtttttcaaatgaacatagcttggtataatgtagggccatagtacccccccacccccccccccccccccccacacacacacacaaaacg

SEQ ID NO: 206989 - DNA, 674 bp, Zea Mays
gaaaagtctaattttgggttaagggaaaggaatattgtagaacacgtcaacaaaattgctccaaggttccaggagggaatcaaggccttctcaggcagcccaattgttggggagatacgcggtctgggactgatacttggaactgaatttgtcgacaacaaatctccaaatgatccatttccagctgaatggggtgttggttcgatatttggcgcggagtgcgagaagcgtgggatgctcatcagggtggctggggacagcatcatgctgtcacccccgctgatcatgactcccaatgaagtcgaagaaatcataagcaaattcggcgatgctctgaaggctacagaggaacggattgtagaactgaaatccaggaagaattagccgatgctgctggttgtaacgacagtgaggatggtgatggcagtgtccaatatacagtgtattttcaaactttatttcagtaaagtgctgggctggaatcttgtagtcggttgcatagcgacagttgttccttgttatggagcaataagtaatgcatctgcttaatcagagtagcatacccttgggtttgtgctggtacaggtttttcaaatgaacatagcttggtataatgtagggccatagtacccccccacccccccccccccccccccacacacacacacaaaacg

SEQ ID NO: 206990 - DNA, 3623 bp, Zea Mays
acgtactctgtcaaacgatacgccgcgatgcttccagacgagcgccatccccttcctcgcctcacacgccgtcctgttggtcgtgcctctcttcaacctttttttcttgagcattagcgagagccccttacatggtgcagtgctagcatcgttgctggcgacctcggtgaggtcggatctgcaaaggttgcagctagcgcgcctacactacatcaacatggtgtggcatctcctttcgcagatccccaacatgctacgccgccggctgcctcattggaactcctgtgcaccgcttgcctttcttctcccattcaacccgcaggcgttccctggctcaatagcgcaactaggggatgtccgccgctacctccatataggaaacgacagatttagattttcaggtgatgcgtggtcgggatcccggatcaatcaaaataagtgtgaaataagtgtgaaatttgagaggctgttgaacttccagatcaggtaccaaccaaaaaaagtgacccttttgacggcgtattgcgtgggcaaggcatgccagtgcgacaatagagaaactaacggggagctctgttcgttctgctgattgcttatgattaggctcgcagtggtggtagctgggagagcttgggactggccagacgcgaccaactcacccatgtaataagacaacttttatacatagccgacagtacgcaacctcatgcgcaagatccttaatgaaaccaaagagctgcagcagataaccaacgacaagcagaaaaatcaggcccagacaatggagatgatgtatacgataattgcagatgagttcaagtcaatggacaataaggacatgcgccctgaagattacttgaacttcttttgtcttggaaaccgggaagaaccaccatctaatggcagcccagaatcagagaaatctacatataaaagtgcagagatagtctgtttttgcattttccttattcttaagggtatggcttagctcaacccttctgattacaccaaaactgaatatggttttggcgcacggaccttatgggaagctagaggtctgagctattgggaagctagaatttatgtttttatcaatgtttagtcattaactaattaattgcatatcgttttgttgtatatttattaactaatcgagtgttgcatacggttttcagaagcatttgaagacgcagaaattactcatgttgacgatacagtagatcctgttagagacatggaaactattagtgaagagctcagactaaagttttcgttggattttgttgatttacaagatcagctgtacaacacttaaaccttttttcgacactattctgtttctattttctgcaggatatagagttcatgaaaaagaaacttgaggaccttgataagccaatgaagaggaggaatgataagctgctcaaaattgagcatgaattatattgatccagcacaatgccgaggagactggagactaaacttggaggtgctactgaaggatgtgactttgagtcaaagggtagcacatggagagcttgaattgaattcaagcttggatatgattggaaaatatttgtattagatcacctagaagggtgattgatgcttgttattggccaagcagacaataggtagtcagatgaagattgtaaaaaacaagcatgcttaacccttcaagaatgcacagtttgagcttgaatttggaaaggggatatgccacagttcagagttttttgaacagaatttctggagcagttgttcctataaaataatattttaggtcttgaagccaccaccgtttggattgacatgatctgtggtattctggtgatctcattatagcagacttcatttcttattgtgcttatacagtagtgtagcgggaagagaattcacattgcatgaaatcatgttgatagctaagaggtggaagttgaagtaagccgggaagggtgaggtattgggaactgtggcatttaaagttcagtaggcagcagtaaactgtagtggtgtggtcgtgtacataagatgtgcacattttgaactcaggcattctttattgagtgctgctagaattacattgagctccctccacttctgatacttgcctggttttgcgtcaattggatctgtttgtccgtcctcaacactgttgtctgtttttgctaatttgggcattatctatgacagaagaagaacgattatgaattatagattaaattgaacataatgttgttctaagaacaaaaacagattatttcactgaatattttctcatcgcaagatgtactaaatagtaggttcactacagtcttacagaagccaataacccacttgatcttgctataatgatgttcttagaatacttatagatgtgttggctggaacattagctctgacaagatagaagcttgtttgttctgttatttagtcatgtctgcccctcaaactactgaaacctaaaatctgaaactgaaaatctgaaaatataaaactaaaaatatgaaactgaatattgtatgtcatgtttgtgtcatgttttcttagactgcattgaactccaacagagactgagaaacatggaattatagctagaacttggatctatggctgtgatattcttgcttgcggaaactgggaattatagagagacggaaatactttttaaattagaatctaactacaattcgatttagttcaagtcaatattcagagttctactttctggaattattcagagttcagttattcaaagttattaatagctatacttagccacccatgatgtagtcaagaaaaaaataactgaactcttctgcttataatttcaactatattaatagatattgttatcaggtgtttaaaaagaatgtggtcatcttgtgtgacatttgtgttcttaaattgttgctctgcttataaccttttttacaatgtactcatcagttctatactcgcagccaaaatctatagtgggaactcctgcatacattgctcatgaggttcttctgaagaaggaatacaatggaaaggttgctgatgtgtggtcatgcggagtgatgccatacgtgatgctgaaaccatccatggttcttgaaaaacctcctagctgaccaaatggatgacaatacgatgagtaagcagtacgaggagcctgaacaaccgatgcagagcatgaatgagttcatgcagatcctggttgaggcgaccattccagcagttggttcacgtggactcaatcagtttctgaatgatgacattgacctcgacgatgacatggaggacctagactcagatgccggtcttgacctggaaagcagtggggagatcgtgtatgctatttgacaacattgaatactttgttgtgtcgtaggttaccaagataattagagacaaggggcaggttgttgtgcttgcaagtatctgttgcagctgttgttcatgcctgatgttgatgcctcttttcatactgttgtgtttggatggtgtaccaccagtgttttacaacagtttggcccttggaattgctattgctaaaacttggttcctctgagaagaccttttgtttttgtattcccagtcgagggacggtgaagtacttatattattacaaaattgtt

SEQ ID NO: 206991 - DNA, 2801 bp, Zea Mays
acgtactctgtcaaacgatacgccgcgatgcttccagacgagcgccatccccttcctcgcctcacacgccgtcctgttggtcgtgcctctcttcaacctttttttcttgagcattagcgagagccccttacatggtgcagtgctagcatcgttgctggcgacctcggtgaggtcggatctgcaaaggttgcagctagcgcgcctacactacatcaacatggtgtggcatctcctttcgcagatccccaacatgctacgccgccggctgcctcattggaactcctgtgcaccgcttgcctttcttctcccattcaacccgcaggcgttccctggctcaatagcgcaactaggggatgtccgccgctacctccatataggaaacgacagatttagattttcaggtgatgcgtggtcgggatcccggatcaatcaaaataagtgtgaaataagtgtgaaatttgagaggctgttgaacttccagatcaggtaccaaccaaaaaaagtgacccttttgacggcgtattgcgtgggcaaggcatgccagtgcgacaatagagaaactaacggggagctctgttcgttctgctgattgcttatgattaggctcgcagtggtggtagctgggagagcttgggactggccagacgcgaccaactcacccatgtaataagacaacttttatacatagccgacagtacgcaacctcatgcgcaagatccttaatgaaaccaaagagctgcagcagataaccaacgacaagcagaaaaatcaggttgtacgcatccaacattttactttcatatttgctgaagatgtcaacaaacaaaatagacaagcagcccagacaatggagatgatgtatacgataattgcagatgagttcaagtcaatggacaataaggacatgcgccctgaagattacttgaacttcttttgtcttggaaaccgggaagaaccaccatctaatggcagcccagaatcagagaaatctacatataaaagtgcagagatagtctgtttttgcattttccttattcttaagggtatggcttagctcaacccttctgattacaccaaaactgaatatggttttggcgcacggaccttatgggaagctagaggtctgagctattgggaagctagaatttatgtttttatcaatgtttagtcattaactaattaattgcatatcgttttgttgtatatttattaactaatcgagtgttgcatacggttttcagaagcatttgaagacgcagaaattactcatgttgacgatacagtagatcctgttagagacatggaaactattagtgaagagctcagactaaagttttcgttggattttgttgatttacaagatcagctgtacaacacttaaaccttttttcgacactattctgtttctattttctgcaggatatagagttcatgaaaaagaaacttgaggaccttgataagccaatgaagaggaggaatgataagctgctcaaaattgagcatgaattatattgatccagcacaatgccgaggagactggagactaaacttggaggtgctactgaaggatgtgactttgagtcaaaggacaataggtagtcagatgaagattgtaaaaaacaagcatgcttaacccttcaagaatgcacagtttgagcttgaatttggaaaggggatatgccacagttcagagttttttgaacagaatttctggagcagttgttcctataaaataatattttaggtcttgaagccaccaccgtttggattgacatgatctgtggtattctggtgatctcattatagcagacttcatttcttattgtgcttatacagtagtgtagcgggaagagaattcacattgcatgaaatcatgttgatagctaagaggtggaagttgaagtaagccgggaaggccaaaatctatagtgggaactcctgcatacattgctcatgaggttcttctgaagaaggaatacaatggaaaggttttatgcgtagtgtcgttaattattctacacttgacatactgtttttgtttagtgtgcatgttattattctccacttgaacaacatgtttgtttgtcaaaacattttatacacgcacgatttgtagtcatgcataacagggaactatgttggaaggttcgaatgctaaattagtcactaactctttgttactgaactaaggttgctgatgtgtggtcatgcggagtgatgccatacgtgatgctgacgatcaccatccctgagataagaaaccatccatggttcttgaaaaacctcctagctgaccaaatggatgacaatacgatgagtaagcagtacgaggagcctgaacaaccgatgcagagcatgaatgagttcatgcagatcctggttgaggcgaccattccagcagttggttcacgtggactcaatcagtttctgaatgatgacattgacctcgacgatgacatggaggacctagactcagatgccggtcttgacctggaaagcagtggggagatcgtgtatgctatttgacaacattgaatactttgttgtgtcgtaggttaccaagataattagagacaaggggcaggttgttgtgcttgcaagtatctgttgcagctgttgttcatgcctgatgttgatgcctcttttcatactgttgtgtttggatggtgtaccaccagtgttttacaacagtttggcccttggaattgctattgctaaaacttggttcctctgagaagaccttttgtttttgtattcccagtcgagggacggtgaagtacttatattattacaaaattgtt

SEQ ID NO: 206992 - DNA, 2512 bp, Zea Mays
acgtactctgtcaaacgatacgccgcgatgcttccagacgagcgccatccccttcctcgcctcacacgccgtcctgttggtcgtgcctctcttcaacctttttttcttgagcattagcgagagccccttacatggtgcagtgctagcatcgttgctggcgacctcggtgaggtcggatctgcaaaggttgcagctagcgcgcctacactacatcaacatggtgtggcatctcctttcgcagatccccaacatgctacgccgccggctgcctcattggaactcctgtgcaccgcttgcctttcttctcccattcaacccgcaggcgttccctggctcaatagcgcaactaggggatgtccgccgctacctccatataggaaacgacagatttagattttcaggtgatgcgtggtcgggatcccggatcaatcaaaataagtgtgaaataagtgtgaaatttgagaggctgttgaacttccagatcaggtaccaaccaaaaaaagtgacccttttgacggcgtattgcgtgggcaaggcatgccagtgcgacaatagagaaactaacggggagctctgttcgttctgctgattgcttatgattaggctcgcagtggtggtagctgggagagcttgggactggccagacgcgaccaactcacccatgtaataagacaacttttatacatagccgacagtacgcaacctcatgcgcaagatccttaatgaaaccaaagagctgcagcagataaccaacgacaagcagaaaaatcaggcccagacaatggagatgatgtatacgataattgcagatgagttcaagtcaatggacaataaggacatgcgccctgaagattacttgaacttcttttgtcttggaaaccgggaagaaccaccatctaatggcagcccagaatcagagaaatctacatataaaagtgcagagatagtctgtttttgcattttccttattcttaagggtatggcttagctcaacccttctgattacaccaaaactgaatatggttttggcgcacggaccttatgggaagctagaggtctgagctattgggaagctagaatttatgtttttatcaatgtttagtcattaactaattaattgcatatcgttttgttgtatatttattaactaatcgagtgttgcatacggttttcagaagcatttgaagacgcagaaattactcatgttgacgatacagtagatcctgttagagacatggaaactattagtgaagagctcagactaaagttttcgttggattttgttgatttacaagatcagctgtacaacacttaaaccttttttcgacactattctgtttctattttctgcaggatatagagttcatgaaaaagaaacttgaggaccttgataagccaatgaagaggaggaatgataagctgctcaaaattgagcatgaattatattgatccagcacaatgccgaggagactggagactaaacttggaggtgctactgaaggatgtgactttgagtcaaagggtagcacatggagagcttgaattgaattcaagcttggatatgattggaaaatatttgtattagatcacctagaagggtgattgatgcttgttattggccaagcagccaaaatctatagtgggaactcctgcatacattgctcatgaggttcttctgaagaaggaatacaatggaaaggttttatgcgtagtgtcgttaattattctacacttgacatactgtttttgtttagtgtgcatgttattattctccacttgaacaacatgtttgtttgtcaaaacattttatacacgcacgatttgtagtcatgcataacagggaactatgttggaaggttcgaatgctaaattagtcactaactctttgttactgaactaaggttgctgatgtgtggtcatgcggagtgatgccatacgtgatgctgacgatcaccatccctgagataagaaaccatccatggttcttgaaaaacctcctagctgaccaaatggatgacaatacgatgagtaagcagtacgaggagcctgaacaaccgatgcagagcatgaatgagttcatgcagatcctggttgaggcgaccattccagcagttggttcacgtggactcaatcagtttctgaatgatgacattgacctcgacgatgacatggaggacctagactcagatgccggtcttgacctggaaagcagtggggagatcgtgtatgctatttgacaacattgaatactttgttgtgtcgtaggttaccaagataattagagacaaggggcaggttgttgtgcttgcaagtatctgttgcagctgttgttcatgcctgatgttgatgcctcttttcatactgttgtgtttggatggtgtaccaccagtgttttacaacagtttggcccttggaattgctattgctaaaacttggttcctctgagaagaccttttgtttttgtattcccagtcgagggacggtgaagtacttatattattacaaaattgtt

SEQ ID NO: 206993 - DNA, 3526 bp, Zea Mays
acgtactctgtcaaacgatacgccgcgatgcttccagacgagcgccatccccttcctcgcctcacacgccgtcctgttggtcgtgcctctcttcaacctttttttcttgagcattagcgagagccccttacatggtgcagtgctagcatcgttgctggcgacctcggtgaggtcggatctgcaaaggttgcagctagcgcgcctacactacatcaacatggtgtggcatctcctttcgcagatccccaacatgctacgccgccggctgcctcattggaactcctgtgcaccgcttgcctttcttctcccattcaacccgcaggcgttccctggctcaatagcgcaactaggggatgtccgccgctacctccatataggaaacgacagatttagattttcaggtgatgcgtggtcgggatcccggatcaatcaaaataagtgtgaaataagtgtgaaatttgagaggctgttgaacttccagatcaggtaccaaccaaaaaaagtgacccttttgacggcgtattgcgtgggcaaggcatgccagtgcgacaatagagaaactaacggggagctctgttcgttctgctgattgcttatgattaggctcgcagtggtggtagctgggagagcttgggactggccagacgcgaccaactcacccatgtaataagacaacttttatacatagccgacagtacgcaacctcatgcgcaagatccttaatgaaaccaaagagctgcagcagataaccaacgacaagcagaaaaatcaggcccagacaatggagatgatgtatacgataattgcagatgagttcaagtcaatggacaataaggacatgcgccctgaagattacttgaacttcttttgtcttggaaaccgggaagaaccaccatctaatggcagcccagaatcagagaaatctacatataaaagtgcagagatagtctgtttttgcattttccttattcttaagggtatggcttagctcaacccttctgattacaccaaaactgaatatggttttggcgcacggaccttatgggaagctagagaagcatttgaagacgcagaaattactcatgttgacgatacagtagatcctgttagagacatggaaactattagtgaagagctcagactaaagttttcgttggattttgttgatttacaagatcagctgtacaacacttaaaccttttttcgacactattctgtttctattttctgcaggatatagagttcatgaaaaagaaacttgaggaccttgataagccaatgaagaggaggaatgataagctgctcaaaattgagcatgaattatattgatccagcacaatgccgaggagactggagactaaacttggaggtgctactgaaggatgtgactttgagtcaaagggtagcacatggagagcttgaattgaattcaagcttggatatgattggaaaatatttgtattagatcacctagaagggtgattgatgcttgttattggccaagcagacaataggtagtcagatgaagattgtaaaaaacaagcatgcttaacccttcaagaatgcacagtttgagcttgaatttggaaaggggatatgccacagttcagagttttttgaacagaatttctggagcagttgttcctataaaataatattttaggtcttgaagccaccaccgtttggattgacatgatctgtggtattctggtgatctcattatagcagacttcatttcttattgtgcttatacagtagtgtagcgggaagagaattcacattgcatgaaatcatgttgatagctaagaggtggaagttgaagtaagccgggaagggtgaggtattgggaactgtggcatttaaagttcagtaggcagcagtaaactgtagtggtgtggtcgtgtacataagatgtgcacattttgaactcaggcattctttattgagtgctgctagaattacattgagctccctccacttctgatacttgcctggttttgcgtcaattggatctgtttgtccgtcctcaacactgttgtctgtttttgctaatttgggcattatctatgacagaagaagaacgattatgaattatagattaaattgaacataatgttgttctaagaacaaaaacagattatttcactgaatattttctcatcgcaagatgtactaaatagtaggttcactacagtcttacagaagccaataacccacttgatcttgctataatgatgttcttagaatacttatagatgtgttggctggaacattagctctgacaagatagaagcttgtttgttctgttatttagtcatgtctgcccctcaaactactgaaacctaaaatctgaaactgaaaatctgaaaatataaaactaaaaatatgaaactgaatattgtatgtcatgtttgtgtcatgttttcttagactgcattgaactccaacagagactgagaaacatggaattatagctagaacttggatctatggctgtgatattcttgcttgcggaaactgggaattatagagagacggaaatactttttaaattagaatctaactacaattcgatttagttcaagtcaatattcagagttctactttctggaattattcagagttcagttattcaaagttattaatagctatacttagccacccatgatgtagtcaagaaaaaaataactgaactcttctgcttataatttcaactatattaatagatattgttatcaggtgtttaaaaagaatgtggtcatcttgtgtgacatttgtgttcttaaattgttgctctgcttataaccttttttacaatgtactcatcagttctatactcgcagccaaaatctatagtgggaactcctgcatacattgctcatgaggttcttctgaagaaggaatacaatggaaaggttgctgatgtgtggtcatgcggagtgatgccatacgtgatgctgacgatcaccatccctgagataagaaaccatccatggttcttgaaaaacctcctagctgaccaaatggatgacaatacgatgagtaagcagtacgaggagcctgaacaaccgatgcagagcatgaatgagttcatgcagatcctggttgaggcgaccattccagcagttggttcacgtggactcaatcagtttctgaatgatgacattgacctcgacgatgacatggaggacctagactcagatgccggtcttgacctggaaagcagtggggagatcgtgtatgctatttgacaacattgaatactttgttgtgtcgtaggttaccaagataattagagacaaggggcaggttgttgtgcttgcaagtatctgttgcagctgttgttcatgcctgatgttgatgcctcttttcatactgttgtgtttggatggtgtaccaccagtgttttacaacagtttggcccttggaattgctattgctaaaacttggttcctctgagaagaccttttgtttttgtattcccagtcgagggacggtgaagtacttatattattacaaaattgtt

SEQ ID NO: 206994 - DNA, 2176 bp, Zea Mays
cggttagggcagtgacaaaaggggaagcgagaccgccgccacatgcctcctggcctcctacctcgcggctgcctcctcctcgtcgttccccatcttcgccgccacttgccggcgctttgttctactcttcgaagcagccactcgcataagcgccccgcggttatcttctcccccgtacgtgccgtctccggctactccgccatggcggctggttcgccggagcagcagcagcggagcgttgtggtcaaggagactgtggagctcacggagacggaggagcgcatctttcgccgccttctcgaggttgttcgccacttcagtctcggcacgcagctccgcgtcgccggcggatgggtccgtgataagctattagggaaagactccgctgacattgacattgcccttgacaatatgacgggtcagaatttctgtgagaaagtaaatgagtactcaaagttgataggggagcagcagaaaggaatcggtgttatccaatgtaaccccgatcaatccaagcacttggaaactgctaggatgcttattcttgacatctggattgattttgttaacttgcggtctgaaacatatactgaaaacagccgtatccctacaatggagattggtactgccaaggaggacgcataccgcagggacttgacaattaatagcttgttctttaatatcaacaataactcggttgaagatttaactggaagaggtgagtttgatggtacaagttcaagtaatgttttacaatgttcatgctgctatgtcatcatgaaggtattgaggatctcaagaagggccttattgttactcctttacccgccaaagctaccttccttgatgacccacttagagttcttcgagcaataagattcgattcaactttacattagatgaagatttgaaggaagctgcatctgatgaaaaggtgaagtcagagcttggcacgaagattagtagagaacgtatcggtcacgagattgatctcatgatgtcagacaaacaccctgttaaagcaatgtgtgacatccgcgatttggggctattttatgttgtattttcttttcctgaaaaatccaaccctcctgtttttgacaagtgtgattggcagtgtgtttcacatattgaagcagcttgggatcttgcatattctattggcagctgtgtgttcagcagtggttctgactccaagtcgcaggatgagcgaagaaggctgtacttgtatagtgcattattcaaccccctccgaagtatgttctacctggacaaaagatctaagaaggctcctgtttctagctttattatcaaggactcgctaaagttgaaaaccagcgatgctgaaacggttgtcaacatacatgctgctagcgaaaagtttgctgagttgattcctctcctcgagtcaaacgctgacgtgtatgctctcaaagagaagctggaagatgagtaccttgagataccaggagacagcgtgaagcgtgtttttgcagggcttatactccgagaaataaaggagttttggcgggtggcgctgcttctatccattctcttctaccgagaaactggaactcctgctggcaccctcgacgagcaggacgagctgcgtcggaggaaagagaaatacatcagagcagagcgttccataaccgacctagatcttgacggggtgtggaagctgaagccgatactcgacgggaaatcgattatgggagtcatgcaggtcaagtccggaggtccactgataggaaaatggcaacaacgtgtgctgaagtggcagcttgcgcatccggacggaaccgtggacgagtgcgtcgagtggatgaagcagtcgcagtcaaaacgacagaaagtggagtccagcacctgataatcaaaattgacagtttggtcgtagtcagttttcagataggttagcaactgcctgccccttgcaaacagtttttttgcgtagacggtgaactcttgctgctaagacagccagttctcccttgttcgaaacctgtcctgaacgtagagtgagagacgaaagagagagagagagatggtaatctataatattaaaatatagcatgaatataattgtcctgagcacaaaaagaaatatagttgtcctgagctcgtagtatatatgtccataagcctcaaattggaaagacgataagccaccctc

SEQ ID NO: 206995 - DNA, 902 bp, Zea Mays
cccccagccagtaaccagaccaggttaagtacatcacacacgctggccgctgcatacacagcaggtctacacccactcgggcccatatacgcgtctgttgggccgacacacacgacgagttgccacctcctgcttgcttggaccattcggtattgcaccctctcgctgttgtagcggctgggaaatctcctctattggcgagttggtaacacactatcgctacatcatatgcttctgtccaagctatataagccgccgctgttgtacgccgcttcctccatccactagctgcccggccggccggctagcggagaaacagcccgcccgctcgcctctgcctctgcccctgcacgcccaagatcctcaggccgggccggccgcgtggcagtgccgcgcgcgcgcgagagcgagagggatccatgggcgtctccgaggaggcggcgcgggtgtgggcggagctgcccgtgcgggtggactgggcggccgcggcggcgcaatgcgcgtccctgtgggcgcacgcgcgcgcgctgctggtcgcgccagcggtgcgggtcctggtgctcctgtcgctggcgatgaccgtgatgatactggcggagaagctgttcgtctgcgccgtgtgcctcgccgtgcgggcgctccggctcggcccggaccggcgctaccgctgggagcccatcggcggcggagtcggagacgaggaggaggagtccgggtccggccacggcgccaagtaccccatggtgctcgtgcagatccctatgtacaacgagcgggaggtgtacaagctgtcgatcggggcggcatgcgagctggagtggccgtcggagcgcttcatgatccaggtgctggacgactccacggaccccgttgtaaagatccgattctagtctagaccgaaa

SEQ ID NO: 206996 - DNA, 2090 bp, Zea Mays
acccatcctgctcagtgctcacttccacgcgggccccagcccgccacgagtccccgctcccacctgctcctcgccgccgttagcgcgccccgagccccgacagcctttctccttctagggtttctctctgtttcgtcctcatcgaatcggagtttcgcatggagtcatcgcggtctcggaagcggacgcgccaggcgcatgactgtgccgccgcgccgccaccagagcgagaagtggtagcgaggggtggcgcgtcgccaccatggagggaggatgaccgtgatggacacttcgtattcgaccttggcgagaacttgacccgccgatataaaatcttgagcaaaatgggagaaggtttgggttttctgcaatctgtcgtctcctcttctgctgggtatctccgttattattctaatgaagagggctacgagttggattttcgtaggtacatttgggcgtgttttggaatgctgggaccgtgaaacacatgaatatgttgccataaaagttgttcgcagtatccgcaagtaccgtgatgctgcaatgattgagatagatgtgctcaatcgccttgcagaaaatgaaaagtacagatctctgtgagtatctcagagacctaattacttaaagtataaccctattctgtttctgacttgacagttcctcttcaatttgtcagttgtgttcaaattcagagatggtttgactatcgtaatcatatatgcattgtaagtactagcttttggtcaattatactagtttctaaaagtcagttaccaattttgagaatgcatttttttgcagatgtgttggttgtttataatatttatcttattggccctcccagtacattgtatggaatgagagacttgtctatagaaattatgataaatcgcctgtagtatagtctttttgttcttcgctcgtgaaggttccctcatatggtcacaaattaaaaatattctttattcaatggatatcaatgattttgtcaggtttttgagaagcttgggccaagcttgtatgattttctaaagagaaatagataccaacctttccctgtggaacttgtgcgggagtttggacggcaactgttggaatctgtagcatatatgcatgagttgcggcttatccacactgatctgaagccagaaaacatactacttgtctcttctgagtatataaaagttccaagtacaaaggtttaggctggagttttccatgtgatatttggagtgttggctgtattcttgttgagctatgctctgttagatctcttcacacactttatttttctagtaccagtctggtaattgttttcctaacatcacattttttagggggaagcattgtttcagacacacgagaatctggaacacctagcaatgatggagagggttttgggacctctaccagaggatatgatacggaaagcaagctcttcagctcagaaatattttaggagagcaacacgattaaattggcctgaaggtgctgtttcaagagaaagcatcagagctgtgaggaaactggatcgactaaaggacttggtatcgaggaacgctgaccattcaaaggtggcactggtggacttgctatacggtctcctacggttcgagccatcggaacgcctgacagcagaagaagctctggaccatccattcttcaggaacccaacatgacttgttgagcaggcttgactcatgtaactctactgaaggtggtggtaggaagcaggcagagccgtccccattgcaaagctgaaggcatcttgttcctctataccagagagtttgtgtaaggcctgtcaatggggcttcttgtggtgataaaactgatggctttagtcacccaatgtcatgtacactagcatttttcctagggagcttagttcgccagacggcgcttgtatgttgttaaccgggatacactatgagctgtgccccgatgccctggtgctataatccaatcgcaaatgatgaaatcaagcatagcgtgcgtccgtatagtttatgattgaattgtaccttggaatgattgccctacattcgttcattcctacctagcgttgttacttcgatggttctggg

SEQ ID NO: 206997 - DNA, 1106 bp, Zea Mays
  misc_feature (1105)..(1106): n is a, c, g, or t
catgaagaaatcgttgaattttgaaagtatatgatgctatgatggtagcgcgtttgggttccagatcgggatctgtgatattttcgagaattctcgggtgtgctggcttcgagttttgtgagctctctgttgtgtgatgtgcaagttataggaattggatgtggctgggatttgagtgaattgtggtctaagaacaagagggaaggatctttctccagacttcgcaattttggacgacgaggttttgtgttatctggtttgtcgggatggatgccaaaaagttcctgcagctggtcgaagagaagaaaaggaggatcctcgagaagaaagaagccccactaaagtggcagcagaagctagaagcagcagttaacgtcaaagctgatgcagaagcgaaggcgaaaaaactaaaatcaagaaagcataggaggagaggagattcttcctcggactctgacagtgactatgacagcgatgttgatcggaaacaccggaggaggaaggatcgtagaaggaacaagaagcatgagcattctgactctgatgatgccaggagaggcaagcgtaggtccaaaaagggctcagactcaagtgatgagagcaaccgtgaatatgaaagcgggtctgaagaagaacatacaaagaagaagcgtttgcacagaagaaggcatcacagacactcttcaaggtcagactctgaagacaacagtgatgaggaagagcggagatctgccaaggaccattctcagccccgcagacgccaccatcagtcttctgatgatggctcggacaaggtcaggttgagacatgggaagcgtctgagatcaagtgacgagaatgctcggccagattccaacagccataagcatctcaggagccaatccttggaggagtcatcagatgatagagatgatgatggaccagagaagataagaaatggcaaaaggtatcacaagaatcatcaccgtcaccaccatcatcatcgtcaccatcggcaccaccatgaaagacataataactcagcagaacctaatgacaggaggcaagtactgaaagatgaccagagggcccttgaaggtagcagtgcagactgaaggtatccacnn

SEQ ID NO: 206998 - DNA, 2003 bp, Zea Mays
  misc_feature (2002)..(2003): n is a, c, g, or t
tctagatgtatgtgcacctgctgtcttataaaattgtcggccttggcccaagccaaggaccctttcgcttctctcagtctacgactaggcggcggcggcggccttcacgcacgagccttcgccgcctatacttgcgcttcgtcgagccggtgaattgtggtctaagaacaagagggaaggatctttctccagacttcgcaattttggacgacgaggtaaggaagtgtataatcgtgcatactcggtgtttgtttcttggtggcgactgcaattagctttagtttctcttagtgttagggtctgtttggataccaaggctaattgctagctagctaaaatttagctctagtacatccaacatgagagctaatagttgagatattttttagccaagtcttcaactagttattagctaacgacctagccaaccataactaattgagctaatttttagccctaactagtatctcaaacaggcctttaaccttcatgcttgtgcggtgtggttttataaacatgtaaccacagcttggttccaatcttgtattactgtcatttcgaaatataagatgttggtaattaaattgattggaactatgtgtctcttttgctgcacccagattcataaccataatcatgtttaaacacgtgctgtatgaagagtcatctttcatttatcaagggcaactgattttggtctaccatatcgtcctcgcataagtaatttttaggatattgcttataattgtgatacctttgagatcccttttgttaacatagttttatgagcttaaaatcttagaagccatctagctttgaacatgattgattggccactcttcttagaaagttgtcttgaacaaaaaatgaactgcgtgggtattatatgagaatactttggttacatttgaggcttaaactagctcaaagcgcctccaagtaatttgatgccagggattaattcaccacatttgttatgcctgtacatggaagtttattgtagaaggctttcaatctatctgattagatttacatctctactattgtgctatataatttcacaagttcaaaaaactaacagtgtttttatctctcttctatgagatgcacttccttgcatcatttcatgtccctacaggttttgtgttatctggtttgtcgggatggatgccaaaaagttcctgcagctggtcgaagagaagaaaaggaggatcctcgagaagaaagaagccccactaaagtggcagcagaagctagaagcagcagttaacgtcaaagctgatgcagaagcgaaggcgaaaaaactaaaatcaagaaagcataggaggagaggagattcttcctcggactctgacagtgactatgacagcgatgttgatcggaaacaccggaggaggaaggatcgtagaaggaacaagaagcatgagcattctgactctgatgatgccaggagaggcaagcgtaggtccaaaaagggctcagactcaagtgatgagagcaaccgtgaatatgaaagcgggtctgaagaagaacatacaaagaagaagcgtttgcacagaagaaggcatcacagacactcttcaaggtcagactctgaagacaacagtgatgaggaagagcggagatctgccaaggaccattctcagccccgcagacgccaccatcagtcttctgatgatggctcggacaaggtcaggttgagacatgggaagcgtctgagatcaagtgacgagaatgctcggccagattccaacagccataagcatctcaggagccaatccttggaggagtcatcagatgatagagatgatgatggaccagagaagataagaaatggcaaaaggtatcacaagaatcatcaccgtcaccaccatcatcatcgtcaccatcggcaccaccatgaaagacataataactcagcagaacctaatgacaggaggcaagtactgaaagatgaccagagggcccttgaaggtagcagtgcagactgaaggtatccacnn

SEQ ID NO: 206999 - DNA, 4582 bp, Zea Mays
tgcctaccaagtcacctctttgcccggttggccgccgcgcccagtggccccctcctagcctaccgctccccgatccaatctgtgccgtccgttctcccgccgcaaccttcgtcttgtcctcaaggccggcggcggccactgcccgccttacaccatgaaaccaccacggctctttcccctcctccgccgccacctctcatccgccgccgacgccaccgccgacgccgcggagctttccagcgcgctatccgtggcgccctcctcagatgcgaaacgcgatcttgccatcctgctccgccgccttggcggccgcggtctcgcctccgccctctcgtcccttccggctccgcttcccgcctcctccgccctgcgcctccttcagcatattctctccgacacccacgcgtccgcctcccgccacgccgaggacctcctgtctcctcgcgtctctacgctcctcctaccatcgctcgtcgccgatggcgcctcgctaccgtccgcgcgccgcctcatctcacgcctcctcttcttcaaccctctttctgtcgccgcagcggctatcgcggactccgactgcactgccacagcggaccttctcgtccgcgcctgcctcaactcgcctgcccccggatctctgtcctgtgccgccgatgcctttctcgagctttccacacgtggtgcatcaccgtccatcaagacatgcaatatccttgtcgaagccctaggttgtggtggccaactggacctggcccgcaaggtgttcggagaaatgcgggatggcaacgctgttgctcctgatgtgtacacatacacggtgatgattaaggcactctgcagggctggagagattgatgctgcttttgtgatgcttgcggagttggaacggtctggtatccagccgacggttgtcacttacaacgtgctaatggatgcattgtgcaggagtgggagggtggaagaggcctttcagttgaaggggagaatggttgaaggcaggctgagaccaagcattgtcacatttggcatcctgatcaatggtcttgcaaggggccaacggtttggtgaggttgatgcagtgctgcaggagatggagggttttgggatcacccccaatgaggttatttacaatcagctgatcggttggcattgtagggaaggacattgctcagaggcgcttaggctgtttgatgaaatggtctcaaaggggataaagcagacagtggtgacttacaacttgattgcgaaggctctgtgcaaggaaggagaaatggaacatgctgagcagatattggatgagatgttgttggctggaatgacggttcattgcagcttgtttaatagtgtggttgcatggcatcttcgcggaactggaagactggatgtggtgctaaggcttataagagaaatggttgcgagatttctgaaaccaaatgatgctgtgatgacagcttgtatccaggagctttgcaaaagagggaaacacgaagaagcagctgaaatttggttcctagtattgggtaaaggtttgggtgtcaatattgcaacatccaatgcgttgattcatgggctttgccaaggtaacaacatgaaagaagctactaaggttctaaaggctatggtggatagcggggttgaattcgatagaatcacatataatataatgattcaattctgctgcaaagccagtaaaatggaggaagcaatacaacttcgtgatgacatgatcaaaagagggtttaagccagacctcttcacgtttaatactttcctacgcgcttactgtaatttgggtaaggtggaagacatccttcacttgctggatcagatgaaaagtgagggtcttaagccagatattgtgacatatggtaccataatagatggttactgcaaagcgaaggatgtgcataaggcgaataaatatttgattgaattgattaaaaatgggttaagaccgaatgcagtcatctataatgctcttattggtggttatggtaggaatggtagcatttctgatgcaattggtgttcttgacactatgaagcataatggcatacaaccaacaccaataacttacaacagccttatgtattggatgtgtcatgctggtcttgttgaagaggccaaagaaattttcgcgcaatgtatactaaagaacattgagcttggtgtaattggctacacaattataatacaaggtttttgcaaaataggaaaaattgatgaagctgtgatgtactttaaggaaatgcattacagggatatacgtccaaataagatgacctacaccactttgatgtatgcctattgcaaatgtggcaacaaagaagaagctttcaagctttttgacgagatggtgagctcaggcattgttcctgatactgtttcttacaatacactaatttcagggtgttgtgaggtggattcattggataagattgtagaaagtcccgctgaaatgtcctcatgagttttggaacaaggtggttgtttgtcaacgtttttgataatggataactacaccctggagccagagaagctgtgtctagtgttgaattatgtgtaaccaaggaagatgtaagaaaggagactcaaactttgagcttgatatatcaccctaatgtcatcaggtcttagcgctcatttgttgtgggtcaaaacctttgggtagtagtgctgttcatgctagaaggttcatgtttgcaccaaatgaaggttggatatctgatggttttgaggagccagttattgcctctattctaaaggaaacactcaaagctctagactacctccataggcaggatatctttattgccatcccggtgtagtcaagcttggggactttggtgtctctgcttgcatgtttgataggaggcaaggggctatgaatacatttgttggaacactgtgctggaattaggatggctccagaagttctccagcttcaaactggatataatttcaagtatatgcatatcatcaacatcaagttggaacttttactctgcccagagattagagctgatatggtctttggaataactgcactggaggtggcacatggacatgctccctttttgaagtaccctcctatgaaggtaatgggtcatttggtctttgtaaattaagattttaaatcctttgtccttcttgctcttatggaatagagcaaggtaataatagtttccagggagcgtggatggttgatgattaattgcatcggttttattttattttgaaatttttatgaagtggcttatttcaaagttagattgcaagcatatgtggtcttaatcattttgctatgggcacactagaaaaagagagaaatcctcgaatttctcccaagggcacacattcttgtgaatacttatttagacttgctgattgacaccagcttgctgaactattataggcgtcagatagttttatccatggagttaactatctaactttacaaactttctggcaataactatttccataaagttcacctaatcacgtgtgtgaattcagtgttaactggtgatttccttggtggctcgggttcttctcatgacgctccaaaatgctctccaagttgaatgctttctgattatagttttctgccacaatctttctattctagaattctgtttcagtcattatttatacagagtctggtctttaggttagattaccgtggttgcacttctaatgaaattttttcacttgtaaagttgtaatcagtctttcagggaaatgattgcaatgtgcttggtgaaagatcaaacaaaggccaacagccgataaaattaattaagcattttttcaagaattcacaacctccaaagctaactgttaagagctttttaactgatttgccccctcattgggatcgtgtaaaagcactccatttttgtttccatatacttctttcgtatttctgtttacataatgtttgtgatagtttttcttagttaatgactctatttccagctaaaggattcagctagctttgaagagaatgccttcttcagaaatcagaacaagaaacacttttcatgggtgagtgttaataaggggtcagtgcatgaaactttgatattgaggatctaaaaagccagccatcactgatttgcaatgatgatgcacctgaaatagaagaacatgatgacactgctagaataactgacttcgataaagtttgtttgagtcctttgtctttattttaaaaatgccttcgagtcctttgtctttattttaagaaatgcattagtcatgtgtactaggaataatgacataaatatgatgtaagcttcacagagtgatagaagaaatcatatataagatcatcatctgtcactaggtgagtacccgtgcgttgcaacggggacatataataacataataacttatatataaaatgtgtcttatattgttataagaaaatgtttcataattcatttgtaatcctagtcatacataaattttgttattttaatttagctgtttcactactacattacaaccaccagtatcatgcagacttcgatatatgccacgatttgcatggtctcatcattgaagagcacgtgccacacct

SEQ ID NO: 207000 - DNA, 2478 bp, Zea Mays
agccgtcgcctctccttgctctgctcctctctctcccaagcggctctccctctatctcctcgtttctctcccctcctcttctacagccgctgccaggcaaccgaccgccgagcagcgcagccacccgagccccacgcccgccgcgccaggaaccagcgcccctgctctcgccaggacgccaggaattgctctttctatagcaagtttatgagttcagtttatattccattgaatatttgttgcagtgaagagaaatgagagaaagccttcggttgtagccttcagtttatattccattgaatatttgttgcatccgactcatctctgtttcgattccatccggtttggctcattttttaatcgagtgtgttgtagttttgtaccctaatgtcgtgggagtgctaccgaagtactgatagcatcactttaatttcattagctccgtcctggcaatcactttgggaaggtggtcagtggaataactttgcttaaaaagcttgaagcagttggtagtgaaactggaaatccttcttatcaagtgaaaattgtagactgtggtgaagtttccaacacaaattctcaggatccgctaaagggagataaagtaagctcaaagacagataacagcagttcagacagtgaaaagggtggccatcgtaccaagcgttccttgacgaaaggcttcaatgcagcagttgctgggtgcttctttgccattgaaactgtattaagacctcttaaagcagaaaattcacctccatttacgactgcaatgataatattggcatctgttatatcatctactgtttcaaatgttttacttggagccagaccagcttttatagtgccagcctatgagctaaaatctgctgccggttggaatggctgctacactagcttcagtctgttcagtcccattgacttcagtactgcttctctttgagctgacaaaggattacaggattttgcttcctctcatgtgaacaagggagaatattgtgaactgaaggtcatgtatcagcgaaaagcaggctttcctcttgtagcaattgtgcactgaaaaactacagtgcccttatgacaccacaatagtcgctcgaatgcaactgtccggcctagcatccaatcgacctcaaccactctgcatcccacgtgtgtgtggagctgatgaacatgtcgatgtgtactgattttttctcatatgtttctagccatgctttaattgattctttgtcaaattgtgcaacttgtgcaaaccatatgattacttggtattattgctttgatatggacatccagaaaaatattcaacttcgaatatctttggctttagtgactagtgactgatgtactttagcgtatccactaaaaaccatgaaagtctaggtatgtgtcatttggcattaggttttgtgatgtaacacttgactcaacatcctctaatatgtatatctgttttgacattatattttttcacatgactaacctttgggcatctctgttttcatattaccaatacaccaatgatgttaggcaaattcctccagctcgagtacttggagattacatagtcttctccattgtttttctagactttgaggttctaagcatgagcaagctgggttatgatggtgttgtggcactgctggttgctgatatatcactttcaatcggtcttgaccagattgaagctctgtatcagtatgcccaatttcagtttgagtgtggtaactactcaggggctgctgattacctttaccagtatggtgctttgtgcacaaacagtgagcgaaatgtgagtgccctctggggaaagctagcagcagaaatcctaatgcagaactgggacctagctttggaggaactcaaccgcttgaaggaaataattgattcaaaggttctaacttcaatgttttgttctgtgttctttgttctttgtgtacactatatcaccaatcatgttccttcctgatctttgggtagaacttctcatcacctctgaatcagctccagaataggatatggctgatgcattgggctctgttcatcttctttaaccatatcaggtacttgaatgctatacagacaaatgcacaccatcttattaggtatctagctactgcagttgttgtcaacaaaaaggagaaggaatatgcttaaagagttgattaaggtcattcaacaggagcaccatagctacaaggatcccgtaactgaatttttggaatgcttatatgttaactatgtagttgtgggcttttgaacaatagctggagtgatatgaaacattagtgatgtagttgtgggcttttgaactgcttcaagcaggagtgatgccgttgtggtgcttttgtgactgatcatctctggagcttttgtgaatgatctagctagctatctataaatgatctagttgtgaatgatattataattgtgatgcttttgtgaatatataattgtggtgcttttgtgtttatg

SEQ ID NO: 207001 - DNA, 2247 bp, Zea Mays
agccgtcgcctctccttgctctgctcctctctctcccaagcggctctccctctatctcctcgtttctctcccctcctcttctacagccgctgccaggcaaccgaccgccgagcagcgcagccacccgagccccacgcccgccgcgccaggaaccagcgcccctgctctcgccaggacgccaggaattgctctttctatagcaagtttatgagttcagtttatattccattgaatatttgttgcagtgaagagaaatgagagaaagccttcggttgtagccttcagtttatattccattgaatatttgttgcatccgactcatctctgtttcgattccatccggtttggctcattttttaatcgagtgtgttgtagttttgtaccctaatgtcgtgggagtgctaccgaagtactgatagcatcactttaatttcattagctccgtcctggcaatcactttgggaaggtggtcagtggaataactttgcttaaaaagcttgaagcagttggtagtgaaactggaaatccttcttatcaagtgaaaattgtagactgtggtgaagtttccaacacaaattctcaggatccgctaaagggagataaagtaagctcaaagacagataacagcagttcagacagtgaaaagggtggccatcgtaccaagcgttccttgacgaaaggtgagctctagaatgttgagccttggcgctctcaccacatttgattacttggggattgagtaaccgggaaaggcgtattgcacttgttgctgctggcgctgctgctggcattgcttcaggcttcaatgcagcagttgctgggtgcttctttgccattgaaactgtattaagacctcttaaagcagaaaattcacctccatttacgactgcaatgataatattggcatctgttatatcatctactgtttcaaatgttttacttggagccagaccagcttttatagtgccagcctatgagctaaaatctgctgccggttggaatggctgctacactagcttcagtctgttcagtcccattgacttcagtactgcttctctttgagctgacaaaggattacaggattttgcttcctctcatgtgaacaagggagaatattgtgaactgaaggtcatgtatcagcgaaaagcaggctttcctcttgtagcaattgtgcactgaaaaactacagtgcccttatgacaccacaatagtcgctcgaatgcaactgtccggcctagcatccaatcgacctcaaccactctgcatcccacgtgtgtgtggagctgatgaacatgtcgatgtgcaaattcctccagctcgagtacttggagattacatagtcttctccattgtttttctagactttgaggttctaagcatgagcaagctgggttatgatggtgttgtggcactgctggttgctgatatatcactttcaatcggtcttgaccagattgaagctctgtatcagtatgcccaatttcagtttgagtgtggtaactactcaggggctgctgattacctttaccagtatggtgctttgtgcacaaacagtgagcgaaatgtgagtgccctctggggaaagctagcagcagaaatcctaatgcagaactgggacctagctttggaggaactcaaccgcttgaaggaaataattgattcaaaggttctaacttcaatgttttgttctgtgttctttgttctttgtgtacactatatcaccaatcatgttccttcctgatctttgggtagaacttctcatcacctctgaatcagctccagaataggatatggctgatgcattgggctctgttcatcttctttaaccatatcaggtacttgaatgctatacagacaaatgcacaccatcttattaggtatctagctactgcagttgttgtcaacaaaaaggagaaggaatatgcttaaagagttgattaaggtcattcaacaggagcaccatagctacaaggatcccgtaactgaatttttggaatgcttatatgttaactatgtagttgtgggcttttgaacaatagctggagtgatatgaaacattagtgatgtagttgtgggcttttgaactgcttcaagcaggagtgatgccgttgtggtgcttttgtgactgatcatctctggagcttttgtgaatgatctagctagctatctataaatgatctagttgtgaatgatattataattgtgatgcttttgtgaatatataattgtggtgcttttgtgtttatg

SEQ ID NO: 207002 - DNA, 1821 bp, Zea Mays
caacttgcgcgctactctgactcggagtggccgctactctaccccacccacacccttccgcccgccgccactaaaccctagcgggacacccgccttgctcgcgccgcctcatcctctcactcctctcggacccccggtggccggtgcagagctgcgcgaccgagaaccgaatctgtgagccatgtcgaccaacaagggcagcgcggccaagggcggcggagggaagaagaaggaggtgaagaaggagacgaagctcgggatggcctataagaaggacgacaacttcggggagtggtactccgaggttgttgttaacagtgaaatgattgagtactatgacatttctggttgttatatattgaggccatgggcgatggaaatctgggagctactgaaagaattctttgatgcagaaattaaaaagctgaagctcaaaccatattatttccctttgtttgttactgagaatgttctacagaaggaaaaggaccacattgagggctttgcacctgaggtagcttgggttactaaatctgggaaatctgacctggaagcaccgattgcaatccgccccacaagtgagactgtcatgtatccatacttctccaaatggataagaagccaccgagacttacccttgaggtgtaatcaatggtgtaatgttgttagatgggagtttagcaatccaactcctttcataaggagccgtgaatttctgtggcaagaggggcatactgcttttgcgactaaagaagaggcagatgaagaggttctccaaatattggaactgtacagaaggatatacgaagaatttttagcagttccagtttccaaagggagaaaaagtgagatggaaaaatttgcaggtggcctttataccaccagcgttgaggccttcattccaaacactggtcgtggcatacaaggcgcaacctcacactgtcttggtcaaaactttgccaagatgtttgatatcacttttgagaatgagaaaggtgttagggaaatggtttggcaaaactcttgggcctacacaacccgctcgattggagtgatggtgatgacacatggtgatgacaaaggcttagtattaccaccaaaggtggcgccaatccaggttggaagtattcccactgggaaatgaaaggtgttccattgagaattgagattggtccaaaagatctggcaaacaaacaggtgcgtgttgtccgccgggacaacggtgcaaaggttgacatccctgtgaccaatttggttgaagaggttaaagtgttactggatgagattcaaaaaaatctgttcaaaacagcccaagaaaagagagatgcctgtgttcatgtcgtgaacacttgggatgaattcacaactgctctgaataacaaaaagttgatcttggctccatggtgtgatgaggaggaaattgagaaaaatgtaaaaactcggacaaaaggggaacttggagctgcaaaaacattgtgtactccatttgagcagccagaacttccagaaggtaccctgtgctttgcatctggaaagccagcgaagaagtggtcgttctggggccgcagctactgattgcctgtgctgggattatttccggattcagttctattctcatgtcatcactgctgacaaaagccatcgatttcctgtggaccatgctattcgagtttgaatgttgcaaggatgagaatacgtacattcttttactggcgtgcagtgttataattagaaaaaaacgcttcatatttgattgcaacacataattctgactggaatttaactggatctctttatctcttattaaagtagaatttgtta

SEQ ID NO: 207003 - DNA, 2009 bp, Zea Mays
ctgactcggagtggccgctactctaccccacccacacccttccgcccgccgccactaaaccctagcgggacacccgccttgctcgcgccgcctcatcctctcactcctctcggacccccggtggccggtgcagagctgcgcgaccgagaaccgaatctgtgagccatgtcgaccaacaagggcagcgcggccaagggcggcggagggaagaagaaggaggtgaagaaggagacgaagctcgggatggcctataagaaggacgacaacttcggggagtggtactccgaggttgttgttaacagtgaaatgattgagtactatgacatttctggttgttatatattgaggccatgggcgatggaaatctgggagctactgaaagaattctttgatgcagaaattaaaaagctgaagctcaaaccatattatttccctttgtttgttactgagaatgttctacagaaggaaaaggaccacattgagggctttgcacctgagcttgggttactaaatctgggaaatctgacctggaagcaccgattgcaatccgccccacaagtgagactgtcatgtatccatacttctccaaatggataagaagccaccgagacttacccttgaggtgtaatcaatggtgtaatgttgttagatgggagtttagcaatccaactcctttcataaggagccgtgaatttctgtggcaagaggggcatactgcttttgcgactaaagaagaggcagatgaagaggttctccaaatattggaactgtacagaaggatatacgaagaatttttagcagttccagtttccaaagggagaaaaagtgagatggaaaaatttgcaggtggcctttataccaccagcgttgaggccttcattccaaacactggtcgtggcatacaaggcgcaacctcacactgtcttggtcaaaactttgccaagatgtttgatatcacttttgagaatgagaaaggtgttagggaaatggtttggcaaaactcttgggcctacacaacccgctcgattggagtgatggtgatgacacatggtgatgacaaaggcttagtattaccaccaaaggtggcgccaatccaggtaattgtgattccagtgccttataaggatgctgacacaactgccataaagggagcctgcgaatcaactgtttacacactcgatcaatctggaattagagcggatcaggacacccgtgaaaattactctccaggttggaagtattcccactgggaaatgaaaggtgttccattgagaattgagattggtccaaaagatctggcaaacaaacaggtgcgtgttgtccgccgggacaacggtgcaaaggttgacatccctgtgaccaatttggttgaagaggttaaagtgttactggatgagattcaaaaaaatctgttcaaaacagcccaagaaaagagagatgcctgtgttcatgtcgtgaacacttgggatgaattcacaactgctctgaataacaaaaagttgatcttggctccatggtgtgatgaggaggaaattgagaaaaatgtaaaaactcggacaaaaggggaacttggagctgcaaaaacattgtgtactccatttgagcagccagaacttccagaaggtaccctgtgctttgcatctggaaagccagcgaagaagtggtcgttctggggccgcagctactgattgcctgtgctgggattatttccggattcagttctagtgagttatgtagctttgaagtgtcggatacaaatccaaaaatccatttacattgcgttttacatcgacttgcagttctcatgtcatcactgctgacaaaagccatcgatttcctgtggaccatgctattcgagtttgaatgttgcaaggatgagaatacgtacattcttttactggcgtgcagtgttataattagaaaaaaacgcttcatatttgattgcaacacataattctgactggaatttaactggatctctttatctcttattaaagtagaatttgtta

SEQ ID NO: 207004 - DNA, 1269 bp, Zea Mays
tttcataaggttctccaaatattggaactgtacagaaggatatacgaagaatttttagcagttccagtttccaaagggagaaaaagtgagatggaaaaatttgcaggtggcctttataccaccagcgttgaggccttcattccaaacactggtcgtggcatacaaggcgcaacctcacactgtcttggtcaaaactttgccaagatgtttgatatcacttttgagaatgagaaaggtgttagggaaatggtttggcaaaactcttgggcctacacaacccgctcgattggagtgatggtgatgacacatggtgatgacaaaggcttagtattaccaccaaaggtggcgccaatccaggtaattgtgattccagtgccttataaggatgctgacacaactgccataaagggagcctgcgaatcaactgtttacacactcgatcaatctggaattagagcggatcaggacacccgtgaaaattactctccaggttggaagtattcccactgggaaatgaaaggtgttccattgagaattgagattggtccaaaagatctggcaaacaaacaggtgcgtgttgtccgccgggacaacggtgcaaaggttgacatccctgtgaccaatttggttgaagaggttaaagtgttactggatgagattcaaaaaaatctgttcaaaacagcccaagaaaagagagatgcctgtgttcatgtcgtgaacacttgggatgaattcacaactgctctgaataacaaaaagttgatcttggctccatggtgtgatgaggaggaaattgagaaaaatgtaaaaactcggacaaaaggggaacttggagctgcaaaaacattgtgtactccatttgagcagccagaacttccagaaggtaccctgtgctttgcatctggaaagccagcgaagaagtggtcgttctggggccgcagctactgattgcctgtgctgggattatttccggattcagttctagtgagttatgtagctttgaagtgtcggatacaaatccaaaaatccatttacattgcgttttacatcgacttgcagttctcatgtcatcactgctgacaaaagccatcgatttcctgtggaccatgctattcgagtttgaatgttgcaaggatgagaatacgtacattcttttactggcgtgcagtgttataattagaaaaaaacgcttcatatttgattgcaacacataattctgactggaatttaactggatctctttatctcttattaaagtagaatttgtta

SEQ ID NO: 207005 - DNA, 639 bp, Zea Mays
actggctgagcataaggccaagatgcttgctgggaaaaactcacaccatatcatcgaggcatctttcaaagcgtttgctcgggcccttcgacaggcaacagagtatgacctgcgccgtcaaggcactgtccccagctccaaaggtgtcttgtcgagatcatagcatcgcagtttggacgaacgcatatcttccactgcagcgcacatcaatgagaggaaaacctgcagagtagacagcttggtttttgctgctcacgttgggagcctgcgttagcctctgaacattgctaatgggataatcaagaaccatctagcaactagcaagcaccacttattatctgccttgtgacagtggcatagcgcgtctgctcgctactgcaactctattatctgctcgctggagttacaggatatctgaagattgaaggtctagacatgctgtgagcctgtgactttgtaagctacaccggtcaggaataatgctgcgtctggatcatccgcagaaacataggggtatgtaaattgtttggacattgaagggaatgcattgatctttgcgcgttcagtttctgccaacaaattaacgggagagctgagaaaatacgagccctccaattatctgggaaaagggatggataa

SEQ ID NO: 207006 - DNA, 783 bp, Zea Mays
cccaacacaaaacgaagtcactaatattcaggatctgtctggtcgccctcatttaagctgtggcttagatattcctactcaaagagttggcacatatgatacacagctggttgagcacttcttccaatctgtggtgaacacatctgggatgactcttcacatccgtcagcttgctgggaaaaactcacaccatatcatcgaggcatctttcaaagcgtttgctcgggcccttcgacaggcaacagagtatgacctgcgccgtcaaggcactgtccccagctccaaaggtgtcttgtcgagatcatagcatcgcagtttggacgaacgcatatcttccactgcagcgcacatcaatgagaggaaaacctgcagagtagacagcttggtttttgctgctcacgttgggagcctgcgttagcctctgaacattgctaatgggataatcaagaaccatctagcaactagcaagcaccacttattatctgccttgtgacagtggcatagcgcgtctgctcgctactgcaactctattatctgctcgctggagttacaggatatctgaagattgaaggtctagacatgctgtgagcctgtgactttgtaagctacaccggtcaggaataatgctgcgtctggatcatccgcagaaacataggggtatgtaaattgtttggacattgaagggaatgcattgatctttgcgcgttcagtttctgccaacaaattaacgggagagctgagaaaatacgagccctccaattatctgggaaaagggatggataa

SEQ ID NO: 207007 - DNA, 876 bp, Zea Mays
aagcatttgtagggatgattattaacttgaggcactacttgaagcacttggtgatcgaaagggaattaaccgatttggtcattttacagcaccgcttgatgaggcagcggttgaggttatactggatctgtctggtcgccctcatttaagctgtggcttagatattcctactcaaagagttggcacatatgatacacagctggttgagcacttcttccaatctgtggtgaacacatctgggatgactcttcacatccgtcagcttgctgggaaaaactcacaccatatcatcgaggcatctttcaaagcgtttgctcgggcccttcgacaggcaacagagtatgacctgcgccgtcaaggcactgtccccagctccaaaggtgtcttgtcgagatcatagcatcgcagtttggacgaacgcatatcttccactgcagcgcacatcaatgagaggaaaacctgcagagtagacagcttggtttttgctgctcacgttgggagcctgcgttagcctctgaacattgctaatgggataatcaagaaccatctagcaactagcaagcaccacttattatctgccttgtgacagtggcatagcgcgtctgctcgctactgcaactctattatctgctcgctggagttacaggatatctgaagattgaaggtctagacatgctgtgagcctgtgactttgtaagctacaccggtcaggaataatgctgcgtctggatcatccgcagaaacataggggtatgtaaattgtttggacattgaagggaatgcattgatctttgcgcgttcagtttctgccaacaaattaacgggagagctgagaaaatacgagccctccaattatctgggaaaagggatggataa

SEQ ID NO: 207008 - DNA, 1423 bp, Zea Mays
cagaaaatgaagcatcaaccagcccaactaataagcaaacctgcttctctacaccacccaaggcccaatagagtccacgcgccctcatctcctccccaacccgttgtccactgcctccaggcaaaccggcagcgccgccgccggcgatgaccaccgcgcggctcgtctcaacatcccccgcccgcctaccctccacgtcggcttccccgattcccagaacctcgctgtgtgttgtcggtcgtgcccctgctttctccgctagggcgctcggcttctcgcttcgtctcaagccgtcgcctgccatggccgccgccggcccccctaccgcgcatggagactcaataggtggatcttctaggattggagaggttaagagggtgaccaaagagacaaatgtgcacgtgaagatcaaccttgatggcactggtgtcgccgagtgtagcacagggataccgttcttggatcacatgctcgatttggcatcacatggactctttgatgtctacgttaaagcaataggcgacacccatattgatgatcatcactcaaatgaggacattgctttggcaattggaacggcactacttgaagcacttggtgatcgaaagggaattaaccgatttggtcattttacagcaccgcttgatgaggcagcggttgaggttatactggatctgtctggtcgccctcatttaagctgtggcttagatattcctactcaaagagttggcacatatgatacacagctggttgagcacttcttccaatctgtggtgaacacatctgggatgactcttcacatccgtcagcttgctgggaaaaactcacaccatatcatcgaggcatctttcaaagcgtttgctcgggcccttcgacaggcaacagagtatgacctgcgccgtcaaggcactgtccccagctccaaaggtgtcttgtcgagatcatagcatcgcagtttggacgaacgcatatcttccactgcagcgcacatcaatgagaggaaaacctgcagagtagacagcttggtttttgctgctcacgttgggagcctgcgttagcctctgaacattgctaatgggataatcaagaaccatctagcaactagcaagcaccacttattatctgccttgtgacagtggcatagcgcgtctgctcgctactgcaactctattatctgctcgctggagttacaggatatctgaagattgaaggtctagacatgctgtgagcctgtgactttgtaagctacaccggtcaggaataatgctgcgtctggatcatccgcagaaacataggggtatgtaaattgtttggacattgaagggaatgcattgatctttgcgcgttcagtttctgccaacaaattaacgggagagctgagaaaatacgagccctccaattatctgggaaaagggatggataa

SEQ ID NO: 207009 - DNA, 231 bp, Zea Mays
agtggtgtcattggatttttgctatgtgcaaaagaaggtcatgcagtgaacttcttaactcctgtgaatccaattgagaaaatagaaggagcaacaaaagctggaagggaactcagattttacaattccgagatccatagggctgattttgttcgccaacatttgtaagaagagaactggaagcatataccactcctagtacttctgctgaaaacgagaaaccaaaagaat

SEQ ID NO: 207010 - DNA, 834 bp, Zea Mays
aagcaaagatatccttggtgatccaggagtgcagcagggggaaagagcattcggtccatcgtgtgtctgaatttgcctagtttttctggaggtttgaatccttggggcacacctggcacgaggagagcagaagatagggagttcactgcaccttttgtcgacgatggacttcttgaggttgttggcttccgtgacgcctggcacgggctggtcctgctggcccctaatggacacggcactcgcattgcccaggcccataggatccgctttgaattccacaaaggcgcagcagagcacacgttcatgagggttgacggagagccctggaagcagccccttcccaaggacgatgacacggttgtggtggaaatctctcaccttgggcaggtcaccatgctagcaaatgagccgtgcaggtccaagagcgtcaacgaccagtcgtcactgtcgccggcgcacgacagtcatggtgattacaatgatatcgctgaggaggacgaagacgagtgggaggacggcaggaggaagtttggggcggcagatacatttaagattcctgacgagattgacattgctcatttcagttgagctttgactagtgcatcgtcgtgtgcgttctgatcatacgagtatggtttggtttataaccatctcctttcttttgatttcatatatttgcgatatgattgttgcagccatgtgtaagtgaatcctaggtaaccaagtgctgcgttgctatatatgaccaatgtatgtatagattcagtggaacggtaaaaacacgcgaactctacggttttctccttaaaaataaaaaagaaaataaaataaaaa

SEQ ID NO: 207011 - DNA, 2062 bp, Zea Mays
aaagacgcaaaacgtccgtctgcccctctctggttataattttgggcattaattgcacgtctcctccccacctctccttccctccacccgtgccgtcgcctcgcctatccgatctgccacctcctcccgtctcgcacgttccttcccaactccgcagcgtagcctctccgcggcgcgatccagatccagcatgggcctggtgaaggaaggcatcgacatggaggagggaacccttgagatcggcatggagtacaggactgtatctggtgttgctgggcctctggtcatattggataaagtaaagggcccaaagtaccaagaaattgtaaacatccgacttggagatggcaccaatcgccgtggtcaagtcctggaagttgatggcgaaaaagctgttgtgcaggtctttgaaggaacttctggaatagacaacaaatacacaaccgtgcagtttacaggcgaggttttgaaaactcctgtctcacttgatatgcttgggcgcatttttaatggttctggaaaacctattgacaatggccccccgatattgcccgaagcctacttggatatctctggaagttctattaaccccagtgagagaacctatccagaggagatgatccaaactgggatatccaccattgatgtcatgaattccattgctcgtggacaaaagattccactgttttctgctgctgggctccctcacaatgaaattgctgctcagatttgtcgtcaggctggtcttgtgaagacattggagaaaggaaagcatgctgagggtggtgaagatgacaactttgctattgtgtttgctgctatgggagtgaacatggaaacagctcaattcttcaaacgtgattttgaagagaatggttccatggagcgggtcaccctttttctgaatctggctaacgaccccaccattgaacgtattatcacccctcggattgctctaacaacagcggaatatttggcatatgaatgtgggaagcatgtacttgttatcttgacagatatgagctcttatgcagatgcacttcgtgaggtttctgcagcccgagaagaggtgccaggtaggcgtggttatcctggatatatgtatactgatttggcaacaatatatgagcgtgctgggcgtattgaaggaagaacaggctccattacccagattcctattctaacaatgcctaacgatgatatcacacacccaactcctgaccttactggatacattactgagggacagatatacattgataggcagctccataacagacagatttatccacctattaatgtcctgccatctctttcacgattgatgaagagtgctattggtgagggcatgacacgtcgagaccattcggatgtatctaatcagctttatgccaactatgctattggaaaggatgttcaggccatgaaggctgtcgttggagaggaggcactctcgtctgaggatctgctttacttagagttccttgacaagtttgagaggaagtttgtgacacaaggagcatatgacacacggaacatcttccagtcactcgatcttgcatggacattgcttcggatcttccctcgcgaacttctccaccgtattccagcaaagaccttggaccagtactatagcagagatgcttcccactgaatcactgatcgttgatcagtgttccaatattttggcaagtgcagctttgaataaattgaacagattggcctcgtggccattttcctgtatttatctgtagtcaggtccaattcttttctgttggtgagcgcaagttattcatagatgactcggtcatgggaatatttgtaatattatgtcatgtatcgttaaatttcagttgttttgtttcagctgccagaactgttagcaagagtattctggagctggaagctcgaacgcaactggttgtatctatatccgtgaatgccgaataaaggaggggcaataaactgcagcgaaatatgtgctgtcagacattgttgaaaattttctcgattttgctgttttgagatgtgagaaatcttttcactgaaccaaaggtgttag

SEQ ID NO: 207012 - DNA, 1902 bp, Zea Mays
gttcagcaacagcggctgcggtttttcagcatgggcctggtgaaggaaggcatcgacatggaggagggaacccttgagatcggcatggagtacaggactgtatctggtgttgctgggcctctggtcatattggataaagtaaagggcccaaagtaccaagaaattgtaaacatccgacttggagatggcaccaatcgccgtggtcaagtcctggaagttgatggcgaaaaagctgttgtgcaggtctttgaaggaacttctggaatagacaacaaatacacaaccgtgcagtttacaggcgaggttttgaaaactcctgtctcacttgatatgcttgggcgcatttttaatggttctggaaaacctattgacaatggccccccgatattgcccgaagcctacttggatatctctggaagttctattaaccccagtgagagaacctatccagaggagatgatccaaactgggatatccaccattgatgtcatgaattccattgctcgtggacaaaagattccactgttttctgctgctgggctccctcacaatgaaattgctgctcagatttgtcgtcaggctggtcttgtgaagacattggagaaaggaaagcatgctgagggtggtgaagatgacaactttgctattgtgtttgctgctatgggagtgaacatggaaacagctcaattcttcaaacgtgattttgaagagaatggttccatggagcgggtcaccctttttctgaatctggctaacgaccccaccattgaacgtattatcacccctcggattgctctaacaacagcggaatatttggcatatgaatgtgggaagcatgtacttgttatcttgacagatatgagctcttatgcagatgcacttcgtgaggtttctgcagcccgagaagaggtgccaggtaggcgtggttatcctggatatatgtatactgatttggcaacaatatatgagcgtgctgggcgtattgaaggaagaacaggctccattacccagattcctattctaacaatgcctaacgatgatatcacacacccaactcctgaccttactggatacattactgagggacagatatacattgataggcagctccataacagacagatttatccacctattaatgtcctgccatctctttcacgattgatgaagagtgctattggtgagggcatgacacgtcgagaccattcggatgtatctaatcagctttatgccaactatgctattggaaaggatgttcaggccatgaaggctgtcgttggagaggaggcactctcgtctgaggatctgctttacttagagttccttgacaagtttgagaggaagtttgtgacacaaggagcatatgacacacggaacatcttccagtcactcgatcttgcatggacattgcttcggatcttccctcgcgaacttctccaccgtattccagcaaagaccttggaccagtactatagcagagatgcttcccactgaatcactgatcgttgatcagtgttccaatattttggcaagtgcagctttgaataaattgaacagattggcctcgtggccattttcctgtatttatctgtagtcaggtccaattcttttctgttggtgagcgcaagttattcatagatgactcggtcatgggaatatttgtaatattatgtcatgtatcgttaaatttcagttgttttgtttcagctgccagaactgttagcaagagtattctggagctggaagctcgaacgcaactggttgtatctatatccgtgaatgccgaataaaggaggggcaataaactgcagcgaaatatgtgctgtcagacattgttgaaaattttctcgattttgctgttttgagatgtgagaaatcttttcactgaaccaaaggtgttag

SEQ ID NO: 207013 - DNA, 1206 bp, Zea Mays
ttgtgacatcttgttaacactctgaatggatactggaaatgtgccttgaatggatgcttatggtactattttgttcttcattaaaaatcaactcagaaatgtttatcatgcatcccattttatatatttaagattaaccttttctattagctaattaaatgacaaattgatgtcgttgtttctaataatgctacatgggcattgtgcttttttgtaggtttctgcagcccgagaagaggtgccaggtaggcgtggttatcctggatatatgtatactgatttggcaacaatatatgagcgtgctgggcgtattgaaggaagaacaggctccattacccagattcctattctaacaatgcctaacgatgatatcacacacccaactcctgaccttactggatacattactgagggacagatatacattgataggcagctccataacagacagatttatccacctattaatgtcctgccatctctttcacgattgatgaagagtgctattggtgagggcatgacacgtcgagaccattcggatgtatctaatcagctttatgccaactatgctattggaaaggatgttcaggccatgaaggctgtcgttggagaggaggcactctcgtctgaggatctggtctgttgcgagtgaaataaattcgagcatatgacacacggaacatcttccagtcactcgatcttgcatggacattgcttcggatcttccctcgcgaacttctccaccgtattccagcaaagaccttggaccagtactatagcagagatgcttcccactgaatcactgatcgttgatcagtgttccaatattttggcaagtgcagctttgaataaattgaacagattggcctcgtggccattttcctgtatttatctgtagtcaggtccaattcttttctgttggtgagcgcaagttattcatagatgactcggtcatgggaatatttgtaatattatgtcatgtatcgttaaatttcagttgttttgtttcagctgccagaactgttagcaagagtattctggagctggaagctcgaacgcaactggttgtatctatatccgtgaatgccgaataaaggaggggcaataaactgcagcgaaatatgtgctgtcagacattgttgaaaattttctcgattttgctgttttgagatgtgagaaatcttttcactgaaccaaaggtgttag

SEQ ID NO: 207014 - DNA, 1347 bp, Zea Mays
ttcttggtgaggtctacgtgaaggtagtggaacgagatcaccttccgagacgagaaaggaatcactcgttttcctccgggcacattcctccgagttcggacggcaacgccttttatggccgccgttgcctcctccttctcgcggttctccttccgctgcgccgtctgcccctccccgctccgcgtccgcttttcgcagccccatccgcccgcgcggctccgcgtctcctccaccgtcgttgctctccacaagcgcaaccccaagcggctcaagtacgccgccgagcgccagttcacgagaggggatgccgggttgctgcgggtggaggtggagccctccggcggggacttctggaagcttgaccccattatcgacctcatcaatcgcggcgccgtcggggtgatccctactgacaccgtctactccgtcgtctgtgacctgagtaacaatgaatcgattgagcgccttcgcagactgaaaggcattggagactccaagcctctcagcatcctgtgtcgctcattacgtgacatcgatacctacacaacaggatttcctcaaggcactaaccaagggcaagctaacatttttcgtgttgtcaagcgtgcaatacctgggccttacacatttattttacctgcaagcaagcagtttcctaaacaatgtataaagcatggttcttccacaaggtatgcaaaaaggaggcaggttggcgtccgaattccagatgatcccatctgccaggcaatattgcaaaatcttgatgaacctttgatatgcacaaggggcttgattttattgttgatggcggacctagaattgctgacccttctaccgtagtagatatgatgggagcaaaccctactgtaattcgtcagggaaagggtctaaagttggattggatggtagcaaaagatgaagaggaggacgaggcacagtcgatgttttctttcaaatcagcttgaaatttgcttcgcctgacctgtatgggctggcactttgctatggtcccccaaccgaagcgtcttctttcaactgcatataggatgtcagttgttagctgtaagcatagatgtcgaacacgaactgcgtgctgtaaatatgcaaggcgatgtaagcgaactggcagaatttgctcagtagcaacctttgctggaggtgatggaaagtttcctgctggttttcttgaactttgccgtgtacgcctaccagaatttccgtcctggaaggttccatattattccaattcatcctgcttctgtgatgcttttaattcgagaagcataactttttgggataattatgattatatccttcgctagacttgtaattattattttaccctct

SEQ ID NO: 207015 - DNA, 1365 bp, Zea Mays
ttcttggtgaggtctacgtgaaggtagtggaacgagatcaccttccgagacgagaaaggaatcactcgttttcctccgggcacattcctccgagttcggacggcaacgccttttatggccgccgttgcctcctccttctcgcggttctccttccgctgcgccgtctgcccctccccgctccgcgtccgcttttcgcagccccatccgcccgcgcggctccgcgtctcctccaccgtcgttgctctccacaagcgcaaccccaagcggctcaagtacgccgccgagcgccagttcacgagaggggatgccgggttgctgcgggtggaggtggagccctccggcggggacttctggaagcttgaccccattatcgacctcatcaatcgcggcgccgtcggggtgatccctactgacaccgtctactccgtcgtctgtgacctgagtaacaatgaatcgattgagcgccttcgcagactgaaaggcattggagactccaaggatttcctcaaggcactaaccaagggcaagctaacatttttcgtgttgtcaagcgtgcaatacctgggccttacacatttattttacctgcaagcaagcagtttcctaaacaatgtataaagcatggttcttccacaaggtatgcaaaaaggaggcaggttggcgtccgaattccagatgatcccatctgccaggcaatattgcaaaatcttgatgaacctttgatatgcacaagtgtcaaatatctatcggaggatgaatggatacttgatccagtaatcattgcagatctttatgagccactggggcttgattttattgttgatggcggacctagaattgctgacccttctaccgtagtagatatgatgggagcaaaccctactgtaattcgtcagggaaagggtctaaagttggattggatggtagcaaaagatgaagaggaggacgaggcacagtcgatgttttctttcaaatcagcttgaaatttgcttcgcctgacctgtatgggctggcactttgctatggtcccccaaccgaagcgtcttctttcaactgcatataggatgtcagttgttagctgtaagcatagatgtcgaacacgaactgcgtgctgtaaatatgcaaggcgatgtaagcgaactggcagaatttgctcagtagcaacctttgctggaggtgatggaaagtttcctgctggttttcttgaactttgccgtgtacgcctaccagaatttccgtcctggaaggttccatattattccaattcatcctgcttctgtgatgcttttaattcgagaagcataactttttgggataattatgattatatccttcgctagacttgtaattattattttaccctct

SEQ ID NO: 207016 - DNA, 2984 bp, Zea Mays
ctccagcccccagacccagaggccagatccccttccgtctcaactattccttcgcacgccgccggcacccgcagggccccacctgccagtgaaaacttctcccccgcagttccatctctccgtcgccgtcgtcgtcgcgtcctccgcgtctccggcgagtctagagagagagagagagagagagagaggaaggagggtggagggccgcgcccatggacgcggagcttctggagctgcagcggcagctagaggcggcgcagagcgcgaggtccagcgtgcgcctgtcggagcggaacgtggtggagttggtgcggaagctgcaggagcgaggcatcatcgacttcgacctcctccacaccgtctccggcaaggagtacatcacatccgaccatttgaagcatgagattaagatggagatcaagaagagaggccgtgcatctctagttgacttatcagataccctgggggtggacctttaccatgttgagaggcagtcacagaaggtcgtctccgatgatcccactctaatgctgataaatggcgagatcatgtcacaatcttactgggacaccgtgacggaagagataaatgagaagcttcaggagcgcagtcagattgccttggcagagattgctgctcagttacatattggatccgagcttgtcatcagtatcctcgagccgcggcttggaactattgtgaaaggaaggctagaaggcggacagctatacactccagcgtatgtctcacggattactgctatggttcgtggtgctgcaaggggtataacagtgccaacaaacctgccatctgtttggaactccttgcaacaacagcttcatgagatgcatggtgctagtggagtttctgtggaaggttcattcttccaatccattttcaatggtttgctaaaagaaggtgctgtactgggatcagtccgtgcaggaggacagtggacaccagctgttttcgcccatgcccaaaaggagagtgttgatgcttttttctcacagaactcttacattgggtacgacgtgcttcagaaacttgcaattcctcaacctaaacagttcttggaggcccgatatccagatggtattgcattggatgctgtctttgttcatacttctgtggttgatatgctcgatactgcggttggtgatgcaattgagaatggacactggattgattctctttcagttcttccatcatatattagtggaccagatgcaaccaaaattttatctatctgtccatctctgcagaaggctatcaagtcttctaaagcagtggtatttggagagtcatgtgtcttcagtaacatgtttattaagggtatttttgaccgacttgagaaagatatggactcgtttggtattagacttagtgttggtcaaggaagacctgtgaatacgaatctgggtagtgagcacaagacagggtctggtcagcactcggacacaaaagatcttggtggtaatggcactagcagtaccggtgcttcatcagacagagggtcaaagaagaaaagggggaaagggacagggtctaccaaaggtggatcacttgaaaaggatgatgacaatgaagaaagcattcctgttaagggcaagaaatctcacaggaaaaacaaggatgctggtgcatctggtgacataaaacatggtggtaaaaaaacgtcagagaaaatgatagaggagaatgcaaatatctttcctgatgaattgatagaagaaaaggttttggctgttgctccagagttagaagagttgggaggctctgatgactcaaatgccccccttaaattgttgtcttctcacctgaggccaatgcttgttgactcatgggcaaagaaacggaacaccatgctgtcaggaaatgctgaaagaaggcgacgcttgctcgataatctgcagaagcagatagatgaggctgtcctggagatacaactctatgaaaaagctttggatgtatttgaggaagatcctactacttctggtatactacacaagcatcttctaagaagtatgggcactccaatagttgacaaagttttgattacattggataaggacaacaaattgaagaatggaatggaggttgaggatagcgaagatcatgtccaattgagcactgctgaccgaagctctctggccaaggatcttcctagtgcattgtcattgaaggctcaagctttaattgaagcattagagggaaagaggtttgattcatttatggatgccttaagagatatactggaggaaagtggcttgacatttaagaagcttgataaaaggttagagaggacaatgctgcattcctatcgcaaggatttgacagcacaagtttcatcagagaatgatcctgttgcctttcttccaaaagtcgttgctttacttttcctgcaggcatataataaggctattcaggcaccaggaagagctgttggtgctgttatcacactgctgaaggataagctgccagctgcaacctacaaggtattgactgattatcacagcactactgtgaaacttttagcactacaagctgctgctactgacgatgaagaagattgcacatcagaccgaatgcgagaaaggaaggaggatctggaagaaaggctgatgccagaactgaaatccctggtcctcggcacaaacaaagagtgatcaacaacattcttgtgcataccggaccatttcggcgtacatatacaaagcaacactcagcttaaaagtttttttttgctctgtttttgcaatttgcaccgtttgaaagcaaaagatagcaggaaacaggtttactgattgtaagaatctgactagtttatactcccgtttacattcctgcactaggtttctactgataacaacaaaattatactatggtgtaatgaagagcatagtggatgttaacagggaatcagggatgaaagtagatatctgaattgttaggataatatatatatatatactctattcatt

SEQ ID NO: 207017 - DNA, 3020 bp, Zea Mays
ctccagcccccagacccagaggccagatccccttccgtctcaactattccttcgcacgccgccggcacccgcagggccccacctgccagtgaaaacttctcccccgcagttccatctctccgtcgccgtcgtcgtcgcgtcctccgcgtctccggcgagtctagagagagagagagagagagagagaggaaggagggtggagggccgcgcccatggacgcggagcttctggagctgcagcggcagctagaggcggcgcagagcgcgaggtccagcgtgcgcctgtcggagcggaacgtggtggagttggtgcggaagctgcaggagcgaggcatcatcgacttcgacctcctccacaccgtctccggcaaggagtacatcacatccgaccatttgaagcatgagattaagatggagatcaagaagagaggccgtgcatctctagttgacttatcagataccctgggggtggacctttaccatgttgagaggcagtcacagaaggtcgtctccgatgatcccactctaatgctgataaatggcgagatcatgtcacaatcttactgggacaccgtgacggaagagataaatgagaagcttcaggagcgcagtcagattgccttggcagagattgctgctcagttacatattggatccgagcttgtcatcagtatcctcgagccgcggcttggaactattgtgaaaggaaggctagaaggcggacagctatacactccagcgtatgtctcacggattactgctatggttcgtggtgctgcaaggggtataacagtgccaacaaacctgccatctgtttggaactccttgcaacaacagcttcatgagatgcatggtgctagtggagtttctgtggaaggttcattcttccaatccattttcaatggtttgctaaaagaaggtgctgtactgggatcagtccgtgcaggaggacagtggacaccagctgttttcgcccatgcccaaaaggagagtgttgatgcttttttctcacaaactcttacattgggtacgacgtgcttcagaaacttgcaattcctcaacctaaacagttcttggaggcccgatatccagatggtattgcattggatgctgtctttgttcatacttctgtggttgatatgctcgatactgcggttggtgatgcaattgagaatggacactggattgattctctttcagttcttccatcatatattagtggaccagatgcaaccaaaattttatctatctgtccatctctgcagaaggctatcaagtcttctaaagcagtggtatttggagagtcatgtgtcttcagtaacatgtttattaagggtatttttgaccgacttgagaaagatatggactcgtttggtattagacttagtgttggtcaaggaagacctgtgaatacgaatctgggtagtgagcacaagacagggtctggtcagcactcggacacaaaagatcttggtggtaatggcactagcagtaccggtgcttcatcagacagagggtcaaagaagaaaagggggaaagggacagggtctaccaaaggtggatcacttgaaaaggatgatgacaatgaagaaagcattcctgttaagggcaagaaatctcacaggaaaaacaaggatgctggtgcatctggtgacataaaacatggtggtaaaaaaacgtcagagaaaatgatagaggagaatgcaaatatctttcctgatgaattgatagaagaaaaggttttggctgttgctccagagttagaagagttgggaggctctgatgactcaaatgccccccttaaattgttgtcttctcacctgaggccaatgcttgttgactcatgggcaaagaaacggaacaccatgctgtcaggaaatgctgaaagaaggcgacgcttgctcgataatctgcagaagcagatagatgaggctgtcctggagatacaactctatgaaaaagctttggatgtatttgaggaagatcctactacttctggtatactacacaagcatcttctaagaagtatgggcactccaatagttgacaaagttttgattacattggataaggacaacaaattgaagaatggaatggaggttgaggatagcgaagatcatgtccaattgagcactgctgaccgaagctctctggtatagttagcctatttttcattctgccatgtatcatgccaaggatcttcctagtgcattgtcattgaaggctcaagctttaattgaagcattagagggaaagaggtttgattcatttatggatgccttaagagatatactggaggaaagtggcttgacatttaagaagcttgataaaaggttagagaggacaatgctgcattcctatcgcaaggatttgacagcacaagtttcatcagagaatgatcctgttgcctttcttccaaaagtcgttgctttacttttcctgcaggcatataataaggctattcaggcaccaggaagagctgttggtgctgttatcacactgctgaaggataagctgccagctgcaacctacaaggtattgactgattatcacagcactactgtgaaacttttagcactacaagctgctgctactgacgatgaagaagattgcacatcagaccgaatgcgagaaaggaaggaggatctggaagaaaggctgatgccagaactgaaatccctggtcctcggcacaaacaaagagtgatcaacaacattcttgtgcataccggaccatttcggcgtacatatacaaagcaacactcagcttaaaagtttttttttgctctgtttttgcaatttgcaccgtttgaaagcaaaagatagcaggaaacaggtttactgattgtaagaatctgactagtttatactcccgtttacattcctgcactaggtttctactgataacaacaaaattatactatggtgtaatgaagagcatagtggatgttaacagggaatcagggatgaaagtagatatctgaattgttaggataatatatatatatatactctattcatt

SEQ ID NO: 207018 - DNA, 2936 bp, Zea Mays
ctccagcccccagacccagaggccagatccccttccgtctcaactattccttcgcacgccgccggcacccgcagggccccacctgccagtgaaaacttctcccccgcagttccatctctccgtcgccgtcgtcgtcgcgtcctccgcgtctccggcgagtctagagagagagagagagagagagagaggaaggagggtggagggccgcgcccatggacgcggagcttctggagctgcagcggcagctagaggcggcgcagagcgcgaggtccagcgtgcgcctgtcggagcggaacgtggtggagttggtgcggaagctgcaggagcgaggcatcatcgacttcgacctcctccacaccgtctccggcaaggagtacatcacatccgaccatttgaagcatgagattaagatggagatcaagaagagaggccgtgcatctctagttgacttatcagataccctgggggtggacctttaccatgttgagaggcagtcacagaaggtcgtctccgatgatcccactctaatgctgataaatggcgagatcatgtcacaatcttactgggacaccgtgacggaagagataaatgagaagcttcaggagcgcagtcagattgccttggcagagattgctgctcagttacatattggatccgagcttgtcatcagtatcctcgagccgcggcttggaactattgtgaaaggaaggctagaaggcggacagctatacactccagcgtatgtctcacggattactgctatggttcgtggtgctgcaaggggtataacagtgccaacaaacctgccatctgtttggaactccttgcaacaacagcttcatgagatgcatggtgctagtggagtttctgtggaaggttcattcttccaatccattttcaatggtttgctaaaagaaggtgctgtactgggatcagtccgtgcaggaggacagtggacaccagctgttttcgcccatgcccaaaaggagagtgttgatgcttttttctcacaaactcttacattgggtacgacgtgcttcagaaacttgcaattcctcaacctaaacagttcttggaggcccgatatccagatggtattgcattggatgctgtctttgttcatacttctgtggttgatatgctcgatactgcggttggtgatgcaattgagaatggacactggattgattctctttcagttcttccatcatatattagtggaccagatgcaaccaaaattttatctatctgtccatctctgcagaaggctatcaagtcttctaaagcagtggtatttggagagtcatgtgtcttcagtaacatgtttattaagggtatttttgaccgacttgagaaagatatggactcgtttggtattagacttagtgttggtcaaggaagacctgtgaatacgaatctgggtagtgagcacaagacagggtctggtcagcactcggacacaaaagatcttggtggtaatggcactagcagtaccggtgcttcatcagacagagggtcaaagaagaaaagggggaaagggacagggtctaccaaaggtggatcacttgaaaaggatgatgacaatgaagaaagcattcctgttaagggcaagaaatctcacaggaaaaacaaggatgctggtgcatctggtgacataaaacatggtggtaaaaaaacgtcagagaaaatgatagaggagaatgcaaatatctttcctgatgaattgatagaagaaaaggttttggctgttgctccagagttagaagagttgggaggctctgatgactcaaatgccccccttaaattgttgtcttctcacctgaggccaatgcttgttgactcatgggcaaagaaacggaacaccatgctgtcaggaaatgctgaaagaaggcgacgcttgctcgataatctgcagaagcagatagatgaggctgtcctggagatacaactctatgaaaaagctttggatgtatttgaggaagatcctactacttctggtatactacacaagcatcttctaagaagtatgggcactccaatagttgacaaagttttgattacattggataaggacaacaaattgaagaatggaatggaggttgaggatagcgaagatcatgtccaattgagcactgctgaccgaagctctctggccaaggatcttcctagtgcattgtcattgaaggctcaagctttaattgaagcattagagggaaagtggcttgacatttaagaagcttgataaaaggttagagaggacaatgctgcattcctatcgcaaggatttgacagcacaagtttcatcagagaatgatcctgttgcctttcttccaaaagtcgttgctttacttttcctgcaggcatataataaggctattcaggcaccaggaagagctgttggtgctgttatcacactgctgaaggataagctgccagctgcaacctacaaggtattgactgattatcacagcactactgtgaaacttttagcactacaagctgctgctactgacgatgaagaagattgcacatcagaccgaatgcgagaaaggaaggaggatctggaagaaaggctgatgccagaactgaaatccctggtcctcggcacaaacaaagagtgatcaacaacattcttgtgcataccggaccatttcggcgtacatatacaaagcaacactcagcttaaaagtttttttttgctctgtttttgcaatttgcaccgtttgaaagcaaaagatagcaggaaacaggtttactgattgtaagaatctgactagtttatactcccgtttacattcctgcactaggtttctactgataacaacaaaattatactatggtgtaatgaagagcatagtggatgttaacagggaatcagggatgaaagtagatatctgaattgttaggataatatatatatatatactctattcatt

SEQ ID NO: 207019 - DNA, 2986 bp, Zea Mays
cagctccagcccccagacccagaggccagatccccttccgtctcaactattccttcgcacgccgccggcacccgcagggccccacctgccagtgaaaacttctcccccgcagttccatctctccgtcgccgtcgtcgtcgcgtcctccgcgtctccggcgagtctagagagagagagagagagagagagaggaaggagggtggagggccgcgcccatggacgcggagcttctggagctgcagcggcagctagaggcggcgcagagcgcgaggtccagcgtgcgcctgtcggagcggaacgtggtggagttggtgcggaagctgcaggagcgaggcatcatcgacttcgacctcctccacaccgtctccggcaaggagtacatcacatccgaccatttgaagcatgagattaagatggagatcaagaagagaggccgtgcatctctagttgacttatcagataccctgggggtggacctttaccatgttgagaggcagtcacagaaggtcgtctccgatgatcccactctaatgctgataaatggcgagatcatgtcacaatcttactgggacaccgtgacggaagagataaatgagaagcttcaggagcgcagtcagattgccttggcagagattgctgctcagttacatattggatccgagcttgtcatcagtatcctcgagccgcggcttggaactattgtgaaaggaaggctagaaggcggacagctatacactccagcgtatgtctcacggattactgctatggttcgtggtgctgcaaggggtataacagtgccaacaaacctgccatctgtttggaactccttgcaacaacagcttcatgagatgcatggtgctagtggagtttctgtggaaggttcattcttccaatccattttcaatggtttgctaaaagaaggtgctgtactgggatcagtccgtgcaggaggacagtggacaccagctgttttcgcccatgcccaaaaggagagtgttgatgcttttttctcacaaactcttacattgggtacgacgtgcttcagaaacttgcaattcctcaacctaaacagttcttggaggcccgatatccagatggtattgcattggatgctgtctttgttcatacttctgtggttgatatgctcgatactgcggttggtgatgcaattgagaatggacactggattgattctctttcagttcttccatcatatattagtggaccagatgcaaccaaaattttatctatctgtccatctctgcagaaggctatcaagtcttctaaagcagtggtatttggagagtcatgtgtcttcagtaacatgtttattaagggtatttttgaccgacttgagaaagatatggactcgtttggtattagacttagtgttggtcaaggaagacctgtgaatacgaatctgggtagtgagcacaagacagggtctggtcagcactcggacacaaaagatcttggtggtaatggcactagcagtaccggtgcttcatcagacagagggtcaaagaagaaaagggggaaagggacagggtctaccaaaggtggatcacttgaaaaggatgatgacaatgaagaaagcattcctgttaagggcaagaaatctcacaggaaaaacaaggatgctggtgcatctggtgacataaaacatggtggtaaaaaaacgtcagagaaaatgatagaggagaatgcaaatatctttcctgatgaattgatagaagaaaaggttttggctgttgctccagagttagaagagttgggaggctctgatgactcaaatgccccccttaaattgttgtcttctcacctgaggccaatgcttgttgactcatgggcaaagaaacggaacaccatgctgtcaggaaatgctgaaagaaggcgacgcttgctcgataatctgcagaagcagatagatgaggctgtcctggagatacaactctatgaaaaagctttggatgtatttgaggaagatcctactacttctggtatactacacaagcatcttctaagaagtatgggcactccaatagttgacaaagttttgattacattggataaggacaacaaattgaagaatggaatggaggttgaggatagcgaagatcatgtccaattgagcactgctgaccgaagctctctggccaaggatcttcctagtgcattgtcattgaaggctcaagctttaattgaagcattagagggaaagaggtttgattcatttatggatgccttaagagatatactggaggaaagtggcttgacatttaagaagcttgataaaaggttagagaggacaatgctgcattcctatcgcaaggatttgacagcacaagtttcatcagagaatgatcctgttgcctttcttccaaaagtcgttgctttacttttcctgcaggcatataataaggctattcaggcaccaggaagagctgttggtgctgttatcacactgctgaaggataagctgccagctgcaacctacaaggtattgactgattatcacagcactactgtgaaacttttagcactacaagctgctgctactgacgatgaagaagattgcacatcagaccgaatgcgagaaaggaaggaggatctggaagaaaggctgatgccagaactgaaatccctggtcctcggcacaaacaaagagtgatcaacaacattcttgtgcataccggaccatttcggcgtacatatacaaagcaacactcagcttaaaagtttttttttgctctgtttttgcaatttgcaccgtttgaaagcaaaagatagcaggaaacaggtttactgattgtaagaatctgactagtttatactcccgtttacattcctgcactaggtttctactgataacaacaaaattatactatggtgtaatgaagagcatagtggatgttaacagggaatcagggatgaaagtagatatctgaattgttaggataatatatatatatatactctattcatt

SEQ ID NO: 207020 - DNA, 2637 bp, Zea Mays
gcccaacccaccgccgccagcgctctgcaatggcggctccgcgcccccttcaaaaccggctttctcctctccccctctccatccccatcctcctcgcaatctccctctactagtgctgctgctctcattcctccaacaatccaaggttcgagctcattcattacacgaatctgcggccgcgtgggtgccggagagcggcgagcaatggagggggtgtggaggaaggccaagagggcgctgggcgccagcctctgtgtgcgcctccccgccgtcgccggcgaccgcgaggacggcgccagcgagcgccgcgcctcggatgcgctctccctcgactctacagcggcggcgcacgcatcggcgcccaacacgccggccgcgccggggaccggcgcgctgcggaggtccaagtccggaggcaagtcctccaagagaatgtgtgcaatatgttttgattccatgaagccaggtcttggacaagccctattcactgctgaatgttctcatatgtttcacttccactgcatctcctctagtgtgaaacatggaaaccatgtatgcccagtatgccgggcaaaatggaaagagatccccttcaatcgctcattatcttctatagttcctcgtggaagaggtggactgaatgtaaaccaagctcgattgccccaacaaggtgcctacatggctcttctccgccaggttccaaaccgtcagcgagaaggtccagtattggttacttctgagccatcagacttcaatgatgatgaacctttgcataagatggagcctgctaatattggatctagtagaactgtggaaattaagacatattcagagttttcagccattcaacagtcatctcaagatgactttgctgttctgatccatctgaaagccccatatgctaacccagagcaggtcataggcagaccggtcaatgcaacctcagttggttatcctactgcccgcgccccagttgatcttgttaccgtgcttgatgttagtggaagtatggcaggcactaaactggcactcttgaagcgagccatgggttttgttatacagcatcttggcccatcggatcgcctttcagtcatcgctttctcttcaaccgccagaaggttgttccatctccaacggatgtcacactctggccggcagcaggccctgcagactgtcaactcgcttgttgctagtggtggcacaaacattgctgatgcactgaagaaagctgctaaggttattgaggaccgaagccatcaaaatccagtatgcagcatcattctcttgtctgatggccaagatacgtacaatattccctcaaatattaggggtgcccggccagaatacagttcactagttccatcctccattctaaaccgcacatttggcttagtgccggtgcatgggtttggttttggagtagaccatgattcggatgctttgcattcgattgcggaggcctctggcggtacattctcctttatcgaggatgaaggtgtgattcaggacgcatttgctcagtgcataggtgggctcctcagcgttgttgttcaaaacatgcaagtaaatgtggagtgtgtccatcctggtgtccagcttcgctccatcaaatctggtagttaccacagcaaggtggctgcacatgggcgaaatggttccattgatgttggccatctctacgccgacgaggaaagggacttcctactgtcggtgagcttaccacattgtcgtgaacagaccacacttctgaaagttgcctgtgcctacagagattcattgaccaacgaagagatcaagattcagggtggcgaggtagcaatcttgaggcctagatcacccgtatctgagccagtttgcatggaggttgaccgcgagaggaaccgtgtccgtgctgcggatgctatcgaggccgcaagggctgctgctgagagaggtgctctttctgatgctgtgtcaatcctcgaagactgccggaggatactttcagaaactttttcaagccggagcggggaccggctgtgcatggcccttgatgcagagctgagggagatgcaagagaggatggctaaccggcaacgctacgaggcttcagggcgggcatatctgctgtctggcctcagctcacattcttggcagagggccactgcgcgaggcgactccactgacagtgacacacttgtttattcctaccagacaccatccatggttcacatgctacagcgctcacagaaccactgcccttctcctcaaggcccttcacaacctagggtcttggtgaaaccccagccaagaggcggtgaggcgggcttggaggtaaatataatctggttgggtatactggggaacctaaggtgggggctttggtggtaaatacattgtggggggtatactcctgtggtgttaagaaataagtagggtagtagtagtagtagatgaggggctggagaaattgtgtaatagtttcaacgggttggagctaggtagtttagtggaggtcagttcttgtcaaagtctttatttgatctttggtgatgtagataagagggtatgatctcggggtggtatatcatggaatctctgtttttttgggtggtgatggtggtgttcaatgctattccatggattcaaactttcaat

SEQ ID NO: 207021 - DNA, 2608 bp, Zea Mays
cccaaccgtccctgcctttggcaaccaccccgccccaaaatctctttctccgctgcgctgcaaacccaccgcttccaccatcgccactcgtcaccccttgctcccatagtccccataccatgcccgacctccacccgccggagcaccaagtcgccggtcaccgcgcctccgccagcaagctgggcccgctcatcgacggctccggcctcttctacaagccgctccaggccggcgaccgtggggagcacgaggtcgccttctatgaggcgttctccgcccacgccgccgtcccggcccgcatccgagacaccttcttcccccggttccacggcacgcgactcctccccaccgaggcgcagcccggggagccgcatccgcacctcgtcctcgacgacctcctcgcggggtttgaggcgccctgcgtcgcagacatcaagatcggcgccatcacgtggccaccgagttcgccggagccctacatcgccaagtacctcgccaaggaccgcgggaccacgagcgttctgctcggattccgcgtcttgcgtccgagtcgtcggccccgagggcgccgtgtggcggacggagcgcccggaggtgaaggctatggacaccgtcggcgtccgccgcgtgctccggcgctacgtgtcatccgcttgccgacgaggggatggactgcgcgctcgcggcggcggtgtacggaggaaaaggtggagtcttgtcacagctgcgcgagctcaaggcatggttggaggagcagactctgttccacttctactcggcgtcgattcttctgggctatgatgctgctgcagtcgcagcaggcggaggtgggggtggggtaacagtgaagctggtggactttgcccatgtggccgagggtgatggggtgattgaccacaacttcctgggcgagctctgctagctgatcaagttcgtttctgacattgttccagagactccttagacgcagcctttgggtccttcttaagagaggatcctgacatttttgatttgataacaaaggaagcactttcagctgcaaaaaaagaaagcagcagtgaggatgaagatgacagtagtgaggaaagttcggatgatgagccaacaaaagttgaagaaaagaaggctccaaaagtatcagaaaacattggatctgaggatgaatcttctgaagacgagagtgataaagacagtgaagagcctcaggcatgccatcatttaacacctcaggcacgccatcatttttgtttcacaactcaaaagtaaaggaaaacactaaaagtatgcaggcagtatgagggacacacacagtttactgaaactcccttacacagacacatacacaccgtgttcactgaaacattcagatttcactaaactgcaacttctccaaacaaacactatctgcggctcggtcaagtaacgagcctcggctcggctcgctcctctagcgagcctaaaaagtcggctcggttcggcgagccaacgagcctgaccataagcatgaaatcagtctccaaaatataatataaagtctcaaaaataatttaagtgacacgtcttaaattagtaaaataaatatatatcatataatatagaaaataagttaattttgtacagtaatctaaaaatataaattaatcatctatttagtacctataatatatgctaattaaaatttatataacaaaaatgttgttgttcgagccagctcgcgagctgaactggctcgctcttttattgagccagaaaaaaactccgctcgaccttgttctaagcacagtttctggatcggaggagcatccccgcctaggtctctgcagccatggttcgcggatcgctcggcaagcttgcatcgcgcgccctctccgtcgccgggagatggcagcaccagcagctccgccgcctcaacatccacgagtaccagggcgcatagttgatgggtaaatacgggatcaacgtgcccaggggcgcggcggctgggtccgtacatgaggtcaaggacgccttgaagaacatgttccccagcgagaaagagatagttgttaaaagtcaaatccttgctggtggccgagggctgggaactttcaaaagcggattgcaaagtggtgtccatattgttaaggctgaggaagctgaattgattgcaagtaaaatgttaggccagattctgataacgaaacaaactggtccagagggaaagattgtgagcaaggtctacttgtgtgagaaactatctcttacaaatgagatgtactttgccatcacccttgataggaaaactgctggtccgctcattattgcttgcagcaggggaggaaaacactatagttgacctcaatgttcaaaggatggccagggctacatcatcttgttgttgacgggttccgtgtgttcaatcgccgagcagaaagccaggaacagaacttaggcgttggcgattggcatctccctcccctaagccatggccaccgggcggcccgtacgactcgtgctggatgcctccctcctcctcgacccctcctccaccagggaggcggcggcggtggctctgcggcccggggtagaggagctgttgcggcggttgcgctactccaacctgactgtg

SEQ ID NO: 207022 - DNA, 840 bp, Zea Mays
gcatgccatcatttaacacctcagaaaaaaactccgctcgaccttgttctaagcacagtttctggatcggaggagcatccccgcctaggtctctgcagccatggttcgcggatcgctcggcaagcttgcatcgcgcgccctctccgtcgccgggagatggcagcaccagcagctccgccgcctcaacatccacgagtaccagggcgcatagttgatgggtaaatacgggatcaacgtgcccaggggcgcggcggctgggtccgtacatgaggtcaaggacgccttgaagaacatgttccccagcgagaaagagatagttgttaaaagtcaaatccttgctggtggccgagggctgggaactttcaaaagcggattgcaaagtggtgtccatattgttaaggctgaggaagctgaattgattgcaagtaaaatgttaggccagattctgataacgaaacaaactggtccagagggaaagattgtgagcaaggtctacttgtgtgagaaactatctcttacaaatgagatgtactttgccatcacccttgataggaaaactgctggtccgctcattattgcttgcagcaggggaggaaaacactatagttgacctcaatgttcaaaggatggccaggtatttctttttttcctgtctctattcaactgttgtcgcatagctaatcttgaactacggattgcgacagccattagaatccagttatatatactttgctgcagtgagcagccaattggccatagaccgaacaatctcatgttcatgatgaaaaagaaaaaaaatgagggatttagagttttggaacccaatttgtttttaccttt

SEQ ID NO: 207023 - DNA, 883 bp, Zea Mays
ctcaggcatgccatcatttaacacctcagctcgcgagctgaactggctcgctcttttattgagccagaaaaaaactccgctcgaccttgttctaagcacagtttctggatcggaggagcatccccgcctaggtctctgcagccatggttcgcggatcgctcggcaagcttgcatcgcgcgccctctccgtcgccgggagatggcagcaccagcagctccgccgcctcaacatccacgagtaccagggcgcatagttgatgggtaaatacgggatcaacgtgcccaggggcgcggcggctgggtccgtacatgaggtcaaggacgccttgaagaacatgttccccagcgagaaagagatagttgttaaaagtcaaatccttgctggtggccgagggctgggaactttcaaaagcggattgcaaagtggtgtccatattgttaaggctgaggaagctgaattgattgcaagtaaaatgttaggccagattctgataacgaaacaaactggtccagagggaaagattgtgagcaaggtctacttgtgtgagaaactatctcttacaaatgagatgtactttgccatcacccttgataggaaaactgctggtccgctcattattgcttgcagcaggggaggaaaacactatagttgacctcaatgttcaaaggatggccaggtatttctttttttcctgtctctattcaactgttgtcgcatagctaatcttgaactacggattgcgacagccattagaatccagttatatatactttgctgcagtgagcagccaattggccatagaccgaacaatctcatgttcatgatgaaaaagaaaaaaaatgagggatttagagttttggaacccaatttgtttttaccttt

SEQ ID NO: 207024 - DNA, 537 bp, Zea Mays
cccaaaccaacctcaagaggagactataaataccaagtgccatccgggtcttagatgcacaacacaacgcttatattacttacaacaaaagataagcccacgaatcagtagatcgaggtcccgcccagtccagcagaagcgcacacggagatgtcccagctgagccctgctggccacatggctgcgacgctcctcctcatcctcctggcctccgcagcagcagcagcggtgtcagctgaccaacaggtctctgcctgccagaatgacatagacgcactgtggcgcagctgcaagcagttcgtccagaaggaggggcccaagatgcctccgtccgaggactgctgcaaaaccatcaaggccttagacgcgcacgcgtcctgcatctgcgactacgtcggctccccggacgccaggaataagctagacctggacaaggtgttcttcgttaccaaacagtgcggcgtcaccgtccccaagggctgcgcagccagagagggtcctgcatgtcgatgtcagtcagctcatgctccacgtggc

SEQ ID NO: 207025 - DNA, 474 bp, Zea Mays
caagtgccatccgggtcttagatgcacaacacaacgcttatattacttacaacaaaagataagcccacgaatcagtagatcgaggtcccgcccagtccagcagaagcgcacacggagatgtcccagctgagccctgctggccacatggctgcgacgctcctcctcatcctcctggcctccgcagcagcagcagcggtgtcagctgaccaacaggtctctgcctgccagaatgacatagacgcactgtggcgcagctgcaagcagttcgtccagaaggaggggcccaagatgcctccgtccgaggactgctgcaaaaccatcaaggccttagacgcgcacgcgtcctgcatctgcgactacgtcggctccccggacgccaggaataagctagacctggacaaggtgttcttcgttaccaaacagtgcggcgtcaccgtccccaagggctgcgcagcaactcatgtgaagatcaag

SEQ ID NO: 207026 - DNA, 745 bp, Zea Mays
cacggtcacctccaaagcaagacccaggctgcttctacaaggagttgtacaaagatgatacatggattcacttgttctcatttcttgttaatggtttgtgccttcgtagtcttctccgatatattgaagcgggtgccagataagctacatgtaactaagaaggcagtacttcatgtcttccctgctgctctcccgcaatcgctccgactctcatgcctgtgcccgcgccgtcaactctccgggctcgatgtgcctttccacgcagcacccacctccactcacactcccaccgtggtgaccccctgttcgtcgacgcgtcgatccatggtcagccaaccagtgaaaaccttcttcgcaatcactatgtatggtactgccaattcacattttacaagtgttgtttggaaggcatctaccaactccaatgctctcttcttgatagcggctgcacataacctattgtgtttgaagttaggaaaggagattggtgttagtatcggaaacccatgattacttggttcgaggttgctagcgtgccagcactttttgggattttagtgactccttatttaatttactcctgtagcccaacattagctgttgagaagctaaagaacatgggtccagtaacaagaaatgaatgcatcatgattggaacgatgctttttgcactctcactacagatttttgggtaagatttttctttttaaagagtgtttttaaccatgagttgccttgcaatctg

SEQ ID NO: 207027 - DNA, 874 bp, Zea Mays
cgcattctcccttccctggactattcttggtgggtggagagagccgcagaaggcagctggaagaggagaggaccgcgcgaggctccgtgccggcgagttcgggtgcttttcctgcggtccgagatgcgatcgttgggacccgggagatagcgcagctcgggttcgggttcgggggcggctaccgcgacggcggccgccacctgagcaggatgtttaactggaacgacgagcagcaccaggtaagggatgcaatatgggctgaattcaatgagtgtgatgaccattttgggctttgcccaaagggggcaaaaaaaaacccaatatttatttccggggtccccaaaaacaatgaggaagaggtggctagtattgctgccatcactgaacagtctgcaggtgttcaaaatggacatcaagggaaggaaaaagcagactgcaagtcacacaagtgcacatatttcacccacacaaattgacatggaatcctggcccggacttccttccctgaatcctacacttgatagaaactatagtgatgacaacatagcatccacatatctggatttttgtgctgcaaccagtttacaagaagtgaccagaaattctacagagcaactagatggtaaatcagaagtgtttggtaatgatcaagaagaaaagagtaacagtttccttgattgcgactggggcaatattggaggttttgatgattttgaccgtctatttagccatagtgactccatatttggtaatgagatagttgccaacgacagtgattttctttctgcatcttcgaatttgatggatactgctgtgctatcaatcccagttccgttctgctccagttggttctctcaagcccattataaaagtt

SEQ ID NO: 207028 - DNA, 2412 bp, Zea Mays
ccccaccccaccccacccgcgccgagacggattggaggaggaaccctaccatatcaatctcgcttctcgcctcgtttcgtctcagctgcattccaattccacctgtaagcggagagccttcgtggtccctgctcggttcatcagaatacaggaggctccggagctttaagattgtgcagacacataatttggatgctcctgcctatgcaagatgtcaaccaccagagatattgtttagtgctgggaaagttatgcagttttggatcataaattctaaatagacaagataattatggaccgtgcagacacatcagggtttgtcagtggtggttgctttgtgggatgctcagcgccaagctctacggtggagaacatgggccaaagcacactctgtatggatggcctgaacccagcaattgttagttgcagccatgttaatggaaatacacagataatgaatgacataacagcgagagatgatggcagcaggttagtccttggtttgggtccaacaccgaatttttattctgcagtgtccactggctcaaaacaagctcagagattgtcaggccagagttcaactttcactgattcagggatgctgaggcttggccttcacaccgatggtgggggagcaattcaatgtctgcaaggaccgaatggagcactccattctttaggtattgtcgacgaggcttcgacatctactactgtaaggagcatgggtggttacatgccatccctactctttgctccccgctccaatcctactgtcaacgagacacaagtagaaatcccagattctctaaacctcacgcacagcaccagcaacagtcagcatattcaacgtcacctccagtttagccctgaaccctctgcaatgaccgagtcttcatttggtgtgagttctgatgttgtcaccgcaacaactacatcagaacgtagccattctcgacatcctaagaaatgcaggttcaagggatgttccaaaggtgcaagaggcgcatcaggattgtgtattgctcatggaggtgggcagagatgtcataaacctggatgccataaaggagccgagagcagctctgcatactgcaaagcccacggtggcggtcgtcggtgtgaggaacttggttgtaccaaaagcgcagaaggaaaaacagattattgcattgctcatggtggaggccgccgctgcgaacatcctggctgtcctaaagctgcccggggtaagtctgggcggtgcatcaagcatggtggtgggaagaggtgtttggttaaaggttgcattcggagtgcggaggggaaggctggattgtgcatttctcatggcggtggtcgacggtgccagtatccagattgtggcaagggggcacagggcagcacattgtactgcaagggacatggtggtggcaagaggtgcgtcttcgatggttgcagcaaaggcgcagagggtagcacacctctgtgcaaagcacatggtggcgggaagcggtgcatgtttgaaggaggtggtgtctgtgcaaaaagtgtgcacggggctactgaatattgcgtggcgcatggaggaggaaagcgctgttccgtgcccggctgcaccaagagtgctcgtggccgcactgactgctgtgtgaagcacggtggcggcaagcggtgcaaggttgagaactgtggcaagagcgcccaggggagcacggacttctgcaaagcccatggcggaggaaagcggtgcacatggggcacaggctgtgaaaaattctcccgtggcaagagtggcttctgtgcggcacatggtaccttgatggccaggcagcgagaacaagaggcggcgaagaatgtaggaagcatgattggaccaggtctcttcagcggcattgttgtgtcatctgccaccgcagcaagcagcatgacgaacgagcactcgtcctctggtgtcagcaccgcttccgactgcgacggcactgtgaggagccaatcaatgattcctccacaggtgctggttcctcgctctatgatgccttcttggtcgactgagcctgtagatggaggcagagagggaggtcatgttgttcccgaggggagggtccatggtggtggcctcctgtcactcatcggtggcagcttcaggaacgccgatttggagaagcttcaaagctagtgcttttccatcagcagattcggtcagtttgtttgtacataaacaggccgcgtttcggcctattgtattcttattgtaccttttcttgtctagataaacatttcaaccttcatgtactggtttaagtccattgtaaatggtgactgccaattgttgtgaacgcttttggcttgttggttcagctgtagtcagtactgcaataatttcgtgtgttgtttaagctgctcttatttgtttgtgcatattcttgtctggat

SEQ ID NO: 207029 - DNA, 2515 bp, Zea Mays
ccccaccccaccccacccgcgccgagacggattggaggaggaaccctaccatatcaatctcgcttctcgcctcgtttcgtctcagctgcattccaattccacctgtaagcggagagccttcgtggtccctgctcggttcatcagaatacaggaggctccggaggtagtccaccaaaacaaaacaccactccatctctcctcttcccagcgatttcctcttcccctcctcgcccgccgaggccgcccgtcctccgtccgccgtcccagcgagagattgtgcagacacataatttggatgctcctgcctatgcaagatgtcaaccaccagagatattgtttagtgctgggaaagttatgcagttttggatcataaattctaaatagacaagataattatggaccgtgcagacacatcagggtttgtcagtggtggttgctttgtgggatgctcagcgccaagctctacggtggagaacatgggccaaagcacactctgtatggatggcctgaacccagcaattgttagttgcagccatgttaatggaaatacacagataatgaatgacataacagcgagagatgatggcagcaggttagtccttggtttgggtccaacaccgaatttttattctgcagtgtccactggctcaaaacaagctcagagattgtcaggccagagttcaactttcactgattcagggatgctgaggcttggccttcacaccgatggtgggggagcaattcaatgtctgcaaggaccgaatggagcactccattctttaggtattgtcgacgaggcttcgacatctactactgtaaggagcatgggtggttacatgccatccctactctttgctccccgctccaatcctactgtcaacgagacacaagtagaaatcccagattctctaaacctcacgcacagcaccagcaacagtcagcatattcaacgtcacctccagtttagccctgaaccctctgcaatgaccgagtcttcatttggtgtgagttctgatgttgtcaccgcaacaactacatcagaacgtagccattctcgacatcctaagaaatgcaggttcaagggatgttccaaaggtgcaagaggcgcatcaggattgtgtattgctcatggaggtgggcagagatgtcataaacctggatgccataaaggagccgagagcagctctgcatactgcaaagcccacggtggcggtcgtcggtgtgaggaacttggttgtaccaaaagcgcagaaggaaaaacagattattgcattgctcatggtggaggccgccgctgcgaacatcctggctgtcctaaagctgcccggggtaagtctgggcggtgcatcaagcatggtggtgggaagaggtgtttggttaaaggttgcattcggagtgcggaggggaaggctggattgtgcatttctcatggcggtggtcgacggtgccagtatccagattgtggcaagggggcacagggcagcacattgtactgcaagggacatggtggtggcaagaggtgcgtcttcgatggttgcagcaaaggcgcagagggtagcacacctctgtgcaaagcacatggtggcgggaagcggtgcatgtttgaaggaggtggtgtctgtgcaaaaagtgtgcacggggctactgaatattgcgtggcgcatggaggaggaaagcgctgttccgtgcccggctgcaccaagagtgctcgtggccgcactgactgctgtgtgaagcacggtggcggcaagcggtgcaaggttgagaactgtggcaagagcgcccaggggagcacggacttctgcaaagcccatggcggaggaaagcggtgcacatggggcacaggctgtgaaaaattctcccgtggcaagagtggcttctgtgcggcacatggtaccttgatggccaggcagcgagaacaagaggcggcgaagaatgtaggaagcatgattggaccaggtctcttcagcggcattgttgtgtcatctgccaccgcagcaagcagcatgacgaacgagcactcgtcctctggtgtcagcaccgcttccgactgcgacggcactgtgaggagccaatcaatgattcctccacaggtgctggttcctcgctctatgatgccttcttggtcgactgagcctgtagatggaggcagagagggaggtcatgttgttcccgaggggagggtccatggtggtggcctcctgtcactcatcggtggcagcttcaggaacgccgatttggagaagcttcaaagctagtgcttttccatcagcagattcggtcagtttgtttgtacataaacaggccgcgtttcggcctattgtattcttattgtaccttttcttgtctagataaacatttcaaccttcatgtactggtttaagtccattgtaaatggtgactgccaattgttgtgaacgcttttggcttgttggttcagctgtagtcagtactgcaataatttcgtgtgttgtttaagctgctcttatttgtttgtgcatattcttgtctggat

SEQ ID NO: 207030 - DNA, 1925 bp, Zea Mays
aatcagttgacagtcagtctaattttacttttcatcgccgaatgaacgagaaaataattaaagcatcgatgtgcttcccctggaactccatacacttgatagctccagcaatttgtatggttagagcttttaccagtacgaccgaatgcacacgcttccgaatttaatacctttgccggcccttcgtatttacgtgctgaaatacgaaactagttactcactccatcccagatttaggtcttgtttgtttatcctccagattatataatccggcttaaataagttaaagagccaaacagacaacacagattattaggtggattatattatctagatacctagattatgataatccataagcaggtgcaggtcattaggtgtttatgtaattcataagatggattatataatcttggaaagaaacaaacatggccttataagtcgtcttggcttttcagcatggcttgtgctacgcagctagacgttcgctgtgtcttggttggtgcccggtaaagaaaaaaaaataactattctctcccttcttttttatttgtcgctgtttagatcaaaattgaactagcgggcgataaatatttgagaacggagggaggtagtgtgtagtatgtaggagtatataaaaaagagaataaaaaatgatctataataatttcataatttggagcagagcaggggcggagggcccagtatggcccagtattgcctgggcaataccttgggccggcccactaatagaatagagattagggttcgtcacggcgttccgcacagccgcactgccagcgtcccgcacagctgcctgctcggccgcaggccgctcctgccggtgctccagcctccaggcctccagccgctcggagcctcggactcgtcacgctccagccgccagctccggtgctccgctgatctgcttgtccggttgaccggttgtcttgtcccgccggcggccggctgcgggctgcttgccgcttggtcccgccgaggcgccgacccgcatggccgcacggctgccgcctgccgctgcttcctgcttggccgcacgtctgcttgtctagttgtctgcttggctgattgcttaatgcttagtgcttctagttgtctgcttgcttcgtgcttctatgcttctagttgtttgattgtgacttgtgagacttgtgagcagagcatagaaaggtcaaaggtagctcatgagtatttatttgattacccgcatttaaagagctatttcagtcaagcttctagtggaagtagactaagcactcgcgctgatggagtttgcaatgaacccagaatacaagttggagtccaagagaataatagtgaagatgccaatggtgaaaatgttaatggtcaagtcgaagattttattcgccatatgacatttggttgtaaatggattgtaatcaagatgactattaaataaggtatttttcaacatctattacttattttatagctacaagttgttttaaactgtgtcataaatttttagtcttagtcgcgttagcaacacctaaattttctagcgtcctccgccactggagcagagataacacatccgcatcccatataatcgtgtagcataccagacgggagatggatccaccgcatcaattaaaaagtatgattgtcgacgagcatatattacaaaaaaaaaattaagaggatttaggtcatccttcgagagacggatgcataaagcagcggagacccaaaactgtcgagagcatccatggagggagatgatcgacgcaacgcaagggtaggcggcaggcccaaaggacccctttacagtggatctacgcgcacggcgaaaccattaaccggcatcatcccgtgaacgaaaggggaccggcgagtcgagtacctacctactccaaaaagatctactaccaatcgttcccgac

SEQ ID NO: 207031 - DNA, 1632 bp, Zea Mays
ctccattccagattttgatattgtgacttacctggattcaactacgtggcctgagtaaaagaaatcctctcgtccgactatgcgccaaagcatggtgtaaggcccagcccacattcttatgggcaatgtggccaccgtgtaagcatggatatagaaaatattattttgtattgtacacagcactatttacagagtgtaagaaaggaggttcgaggtttttcttgatctatgtgaaaggtttttatcaggcaatgcctgttggttgttttaccctgcaggtcaagtttttttatcttatcagtcaccaccgcatgtataagtggatggaagtcagaagagtttgcaatcatgaaattgccagcacggcaacgacagaatgacaggatccacacagttgcttcaccagacagggagtgccctggtagaggtaacaacaacaacggagttccacagacctatccggatgacaagaaaggctcttcatcagggagtgaggggtccatctggccgaagtttgaaatcaccctgtcaaacagggaaaaggaagaggatttcctggtgttcaaaggatccaagctgcctcaaagacccaagaaaagagctaaggtcatccagagaaccgtcaattttgtatgcccaggaacgtggctatgtgacttgactcttgaaagatatgaagtccgggagaagaaggtttccaagaagcgccccaggggattgaaagctatgcacgacatggacagtgactcggaataaataaaagaagatcactgaacatgagaagctgaatattagaaagaaggccaggacagatcctgcagatggaggccgacgagaaaacgtcctgatggaatgaatggccgtatcaacgattcgccacttctcgtgattgctactggagatcagtttgttccaaaaggacttatggagatcggaggacggccgaaatgtcaggaagctgcatggaagaacagaagagagccgcaggagctggaattcctggacattactattcagttccctctgtaaagcagcaacgctgttttgcaagcctcccatgctaatttcgcgctgccaaatattagcgtgatcgcgaagctagccagtcctggcgcgtctagtttgccgggttgtctgacaacaaaagttagtatgaatatgaaagggccttccttaatgttttttcccacttggtgctgtataaaggttcagtgtatattccattcaggagaatgagaaaaagttcaacactccagtgtgggtggattcaaaacaggcgacttttaattttgaaagtttcagtagatttgttagtttatagtttatattttgaaagtttcagtagtgtccaatggaactcgatgtgtaattcaaaacaggcagacttttaattttgaaagtttcagtagttttattagtttatattttatacagacctactattttcgtctaaaaaagagagaaattcatattagacactagaaaacttttttcctatttaacacttcggttatttcagaccaataacggtgttatgttctagttttacccctattttttttctaaccatgatatttccttttgctagctaaagaaaatatgatagttggaaataaaaaacatcaatagcca

SEQ ID NO: 207032 - DNA, 2469 bp, Zea Mays
gtttctttattggcccggagcagcggcagcgcttaactgtttccgccattgatccggcgacctcagctctggctttgcccttgtttgtggaaccggaaagccttttctcagcgctcaaaatcccgcatatgatctggtgctgggggttgccaccaacaggttgttgcccctgcccccgtaatccttgccccctttgctccttgctttcttctctgtgctgcctttgaagtgttgccagatcgctcttgggagatcactggttcgttagccggcccatagtttgtggacaaacaagggccagttcggtctatttcatttcacagaaggggaaaaaattaggcggcgggatcctgctctttcctgcatggtcccttttggagatactgtttgggttgggaggaagtaaaagcggacaagcttggaggttccgaggagggaggaacatatccctttgtagctgcatgaggaggcactgagacaatgagagatgacaactcaagcaagaacaagctgtcctggtccaagacccttgttaggaagtggttcaacatcaaaacaaaggcgaaggatttccattcggattatgcagccgaggaagccggagtgcagtggaggaccagcttctcggatagagacgcatgtaaatccaagaaaagcaggacagagaggttgactaagaggaacgtggagcgagatggtagagtagaaaacggatttgatggtgcttatattacaaacacgcaggactacagggtcttcgttgctacatggaatgtcggcggaaggtcaccatctagtcatttgaacctggaagactggcttcatacttctcctgctgctgatatatatgtgatagggtttcaggaaattgttcccttgaacgctggtaatgttctgttgaccgaagacaacggtccagcgaagaagtgggtttctctcgttagaaaaactctaaacaaccttgaccaacaaggctccggtgtctataattaccacactccctcgccggctccagacccaatcgtggagctcaatgttgacttcgagcgatcatcaaggaggcaacggaactcgtcgtttttccatcgccgttcgttccagtccttgaaccgcagctcaaggatcgacatgatggatccgcactcgttagtggaccgtcgattcagtgtctgcgaccggatcagcttcgggagcaggccaagtgacgttgacaccagcgtgaggtgtggtgggtcgtctgatgatgagactattgacgaggaatcgcctagcggtattgcttagtcgccagcaagcaaatggttgggatttttctcatggtgtgggtacgaagtgacataagggagcatgtgaagaacctgaaggtttcatgtgtgggtagaggcctgatgggctaccttggaaacaagggatccatatcaatgagcatgtctctgcatcagacaagcttctgcttcgtttgcacccacttgacatcaggccaaaaggacggagaccagcttaggcgaaacgcagacgtagtggagatcctgaggaagaccaggttcccgcacgttcacggagcaggtgaagagaagtcaccggagacgatcctggatcacgatcgtgttatttggcttggggacctgaactaccggatcgcgctttcctaccgctcggtgaaggctttggttgagatgcacaactggaagcagttgctggaaaaggaccagcttcgcatagagcaaaggtttggccgggtcttcgcgggctggagagaagggaggatctacttcccgcccacctacaagtactcgtacaactccgacaggtgtgatcggatcctatggtacgggcgaggcctgtcccagctgtgctacgtgcgtggcgagtctcggttctcggaccacaggcccgtgtacagcgtattcacggcggaggttcggattccgagccagcagcaggcagcggctcagttcggcggcggcggcggcggcattactcgttccgcgtccctcctggggctggcgctggacgagctgccttatccacgcagttacatggacatcaatttttactgatcgactgcgcgtgtctcgatggaggacgaaaggagccagccaagccaagggttcaccttctgatggctggctctggctgggtgaagttcatttctcccaaggttccatcggtcggcatgttttgtactagctaacagatagatattcgaggaggtgctttctgactgtaagattagttttgaatgtaaacgtcgagtcccggttttcgggagagagaaaaaagggagtgttttgtgtcccaggcaccaccttggaagaaggccgtcctggtttcacctttctgtttgttttttttcttctttttggcgtcctgatgtagcaatagtaatgtaacaagagcagccagagccgcgccatgaaaatatttttcttactagtcggaatgaaatggcggcttgttgtacagcga

SEQ ID NO: 207033 - DNA, 2548 bp, Zea Mays
ctcctgttctgcatctgtggcgtttctttattggcccggagcagcggcagcgcttaactgtttccgccattgatccggcgacctcagctctggctttgcccttgtttgtggaaccggaaagccttttctcagcgctcaaaatcccgcatatgatctggtgctgggggttgccaccaacaggttgttgcccctgcccccgtaatccttgccccctttgctccttgctttcttctctgtgctgcctttgaagtgttgccagatcgctcttgggagatcactggttcgttagccggcccatagtttgtggacaaacaagggccagttcggtctatttcatttcacagaaggggaaaaaattaggcggcgggatcctgctctttcctgcatggtcccttttggagatactgtttgggttgggaggaagtaaaagcggacaagcttggaggttccgaggagggaggaacatatccctttgtagctgcatgaggaggcactgagacaatgagagatgacaactcaagcaagaacaagctgtcctggtccaagacccttgttaggaagtggttcaacatcaaaacaaaggcgaaggatttccattcggattatgcagccgaggaagccggagtgcagtggaggaccagcttctcggatagagacgcatgtaaatccaagaaaagcaggacagagaggttgactaagaggaacgtggagcgagatggtagagtagaaaacggatttgatggtgcttatattacaaacacgcaggactacagggtcttcgttgctacatggaatgtcggcggaaggtcaccatctagtcatttgaacctggaagactggcttcatacttctcctgctgctgatatatatgtgatagggtttcaggaaattgttcccttgaacgctggtaatgttctgttgaccgaagacaacggtccagcgaagaagtgggtttctctcgttagaaaaactctaaacaaccttgaccaacaaggctccggtgtctataattaccacactccctcgccggctccagacccaatcgtggagctcaatgttgacttcgagcgatcatcaaggaggcaacggaactcgtcgtttttccatcgccgttcgttccagtccttgaaccgcagctcaaggatcgacatgatggatccgcactcgttagtggaccgtcgattcagtgtctgcgaccggatcagcttcgggagcaggccaagtgacgttgacaccagcgtgaggtgtggtgggtcgtctgatgatgagactattgacgaggaatcgcctagcggtatgttcttcccaccgatgccgtgtgcgtatggtgctccactatgcgatggttctaggtattgcttagtcgccagcaagcaaatggttgggatttttctcatggtgtgggtacgaagtgacataagggagcatgtgaagaacctgaaggtttcatgtgtgggtagaggcctgatgggctaccttggaaacaagggatccatatcaatgagcatgtctctgcatcagacaagcttctgcttcgtttgcacccacttgacatcaggccaaaaggacggagaccagcttaggcgaaacgcagacgtagtggagatcctgaggaagaccaggttcccgcacgttcacggagcaggtgaagagaagtcaccggagacgatcctggatcacgatcgtgttatttggcttggggacctgaactaccggatcgcgctttcctaccgctcggtgaaggctttggttgagatgcacaactggaagcagttgctggaaaaggaccagcttcgcatagagcaaaggtttggccgggtcttcgcgggctggagagaagggaggatctacttcccgcccacctacaagtactcgtacaactccgacaggtgtgatcggatcctatggtacgggcgaggcctgtcccagctgtgctacgtgcgtggcgagtctcggttctcggaccacaggcccgtgtacagcgtattcacggcggaggttcggattccgagccagcagcaggcagcggctcagttcggcggcggcggcggcggcattactcgttccgcgtccctcctggggctggcgctggacgagctgccttatccacgcagttacatggacatcaatttttactgatcgactgcgcgtgtctcgatggaggacgaaaggagccagccaagccaagggttcaccttctgatggctggctctggctgggtgaagttcatttctcccaaggttccatcggtcggcatgttttgtactagctaacagatagatattcgaggaggtgctttctgactgtaagattagttttgaatgtaaacgtcgagtcccggttttcgggagagagaaaaaagggagtgttttgtgtcccaggcaccaccttggaagaaggccgtcctggtttcacctttctgtttgttttttttcttctttttggcgtcctgatgtagcaatagtaatgtaacaagagcagccagagccgcgccatgaaaatatttttcttactagtcggaatgaaatggcggcttgttgtacagcga

SEQ ID NO: 207034 - DNA, 2297 bp, Zea Mays
tttctttattggcccggagcagcggcagcgcttaactgtttccgccattgatccggcgacctcagctctggctttgcccttgtttgtggaaccggaaagccttttctcagcgctcaaaatcccgcatatgatctggtgctgggggttgccaccaacaggttgttgcccctgcccccgtaatccttgccccctttgctccttgctttcttctctgtgctgcctttgaagtgttgccagatcgctcttgggagatcactggttcgttagccggcccatagtttgtggacaaacaagggccagttcggtctatttcatttcacagaaggggaaaaaattaggcggcgggatcctgctctttcctgcatggtcccttttggagatactgtttgggttgggaggaagtaaaagcggacaagcttggaggttccgaggagggaggaacatatccctttgtagctgcatgaggaggcactgagacaatgagagatgacaactcaagcaagaacaagctgtcctggtccaagacccttgttaggaagtggttcaacatcaaaacaaaggcgaaggatttccattcggattatgcagccgaggaagccggagtgcagtggaggaccagcttctcggatagagacgcatgtaaatccaagaaaagcaggacagagaggttgactaagaggaacgtggagcgagatggtagagtagaaaacggatttgatggtgcttatattacaaacacgcaggactacagggtcttcgttgctacatggaatgtcggcggaaggtcaccatctagtcatttgaacctggaagactggcttcatacttctcctgctgctgatatatatgtgatagggtttcaggaaattgttcccttgaacgctggtaatgttctgttgaccgaagacaacggtccagcgaagaagtgggtttctctcgttagaaaaactctaaacaaccttgaccaacaaggctccggtgtctataattaccacactccctcgccggctccagacccaatcgtggagctcaatgttgacttcgagcgatcatcaaggaggcaacggaactcgtcgtttttccatcgccgttcgttccagtccttgaaccgcagctcaaggatcgacatgatggatccgcactcgttagtggaccgtcgattcagtgtctgcgaccggatcagcttcgggagcaggccaagtgacgttgacaccagcgtgaggtgtggtgggtcgtctgatgatgagactattgacgaggaatcgcctagcggtatgttcttcccaccgatgccgtgtgcgtatggtgctccactatgcgatggttctaggtattgcttagtcgccagcaagcaaatggttgggatttttctcatggtgtgggtacgaagtgacataagggagcatgtgaagaacctgaaggtttcatgtgtgggtagaggcctgatgggctaccttggaaacaagggatccatatcaatgagcatgtctctgcatcagacaagcttctgcttcgtttgcacccacttgacatcaggccaaaaggacggagaccagcttaggcgaaacgcagacgtagtggagatcctgaggaagaccaggttcccgcacgttcacggagcaggtgaagagaagtcaccggagacgatcctggatcacgatcgtgttatttggcttggggacctgaactaccggatcgcgctttcctaccgctcggtgaaggctttggttgagatgcacaactggaagcagttgctggaaaaggaccagcttcgcatagagcaaaggtttggccgggtcttcgcgggctggagagaagggaggatctacttcccgcccacctacaagtactcgtacaactccgacaggtacgccggcgacgacatgcggccaaacgagaagcggaggacaccggcatgggtgtgatcggatcctatggtacgggcgaggcctgtcccagctgtgctacgtgcgtggcgagtctcggttctcggaccacaggcccgtgtacagcgtattcacggcggaggttcggattccgagccagcagcaggcagcggctcagttcggcggcggcggcggcggcattactcgttccgcgtccctcctggggctggcgctggacgagctgccttatccacgcagttacatggacatcaatttttactgatcgactgcgcgtgtctcgatggaggacgaaaggagccagccaagccaagggttcaccttctgatggctggctctggctgggtgaagttcatttctcccaaggttccatcggtcggcatgttttgtact

SEQ ID NO: 207035 - DNA, 2902 bp, Zea Mays
gagagccgccgggcctggaagcttctccgcggcgctgcgtcgccagctcgcagcgatttcaaggtgctggtgaatctggcttggccacatagatcttttttattgttgtcctcagaagacaggtttgctgagactgctttctgtctactgtaaattgatgaaattttggtgatcatatactatggaaaaaaagacagttcacgttctggctgagggtaatggtgagattgaaaatggtacgagctctagtcagaatcctgagacccttgagcatccagttttgctgtctgcatctcaaactgtgccaaataacttggggataaggaaaaactataaaagggcagcaaacagaggttcaaagacaacatctactgagcatgtgcagcctccaggacaaccagctgccaagagaagaaaaaggagcagagcctcaaacaaaaattcgacagatgagttctcacaaattcgtaaacgggttagatacattttgaaccgaatgaattatgagcaaagcctaattgaagcttatgctagtgaaggctggaaaaatcaaagtttggataagataagacctgagaaggagcttgaacgagccaaatcagaaatcttacgatgcaaattgagaatacgggaagtcttccaaaatattgattctcttctatccaaggggaaaattgacgaatctttatttgattctgaaggagaaatatcttgtgaagatatcttttgtgctacttgtggttcgaaaaatgctacattgggtaatgatatcattctctgtgatggagcttgtgacagagggttccaccagaactgtctaaatcctcctctgcgtactgaagatattcccatgggagatgaaggatggctctgcccagcatgtgattgcaagttagactgtatagatctaataaatgaactccagggcagtgacatctccattgaggacccttgggagaaagtttttccagaggcagctgctatggccaatagctctaagcaagatgaagcatttgatcttccatctgatgattcggatgacaatgattttgaccccaatatgcctgaagagcatgtggctagtaaggaagaaggatcttctgaagaggaagaggatgatgacggaggatcagactctgacgactctgacttcttaacctgttctgatgatttggaacctttgatagataaaaagaatgttgatgacctgggattaccttctgaagattcagaggatgatgactatgatccagcaggtcctgattcggataaagatgtcgaaaagaagtcaaattctgatgagtctgatttcatgtctgactcggatgatttttgtaaggagattaaaaaatctggtggacatgatgaagtttcatcgcctccattacccgatgtcaaggtgggtgatatggaaaagaacactgctcagtctaacacaacaagttctgctgacgaccctatggagactgaaatagaccagagtgtggttttaccagtatcaaggaggcgtcaagctgaacggttggactacaaaaggctgtatgatgaggcatatggtgaagcatcatctgattctagtgatgaagaagaatggtctgggaagaacacaccaataaaaagcaatgaagagggtgaagttggttctcctgcaggaaaaggctctagagttgcgcaccataatgaactgactacacaaaacactaaagaaagcttgcattctcttcatggttcagtagatgagaaacatggagatcttacttctaatggcagcaatatcaaagataggaaaggacattttggtccagtgattagtcagaagctacatgaacattttaagacacaaccataccctagtcgttctcttaaagaaagcttggcagaagaactagggctaacatttcatcaggtcggttcttatcattttctaactgcatggtttccattattatattgccattggatttgaccctcgctgtgcattattctgacaggtcaacagatggtttgaaaataggcgtcattttgcaaggttagcttcttccaggaaaggcatcagtccagataagcatagcccccaaaatactaatagcccagtgacacctagtatgcaacctaaagaaccagaggggactgtgatggaagaatctaatgtatgcataaacagggatgctaccatctctaaaaaagcggtttcttcaaaagtcggatcaagaaagaaccttagcaagagttcccctaaaagccgggtcagaagttgattctgccgcggatcagaatctgtggcctgaccttacagagaaggcagggcaggcaaaaagcaatacagcaggagttgaagaagaaaatgggacgatgaagtttgtagacaaagacatgagccagaatttggactgctcctgaaatttgcaggtctatgggccttgaaacttggcttgtatgactctacactggtagccaaaaaacatagatataccattgcaagtcagctagctctcattagatcatgccaatcaactaacaagcacgtcattcagtttttttcttctttttttttcctgtgggggctattgattcccgttctttgccaactgagggcttcctctgatttctgggtcgctctataggtattagctatcctacagatttgtttgcagcaattactgtcattgcaggaagagctcaattacaaaaccctaaggttcagtaacgacagcacgatgctgctatgacaggatgcagaagatgcattgttttcatcgatgttgattttcttgtaagatggaatgttgtaccaaacctgaacagatcactttgttgtgattcagtgtgcggctatggcctatggatttgtacttgttggactcacagagcatcgcgctttacatgcaaacggattttcggt

SEQ ID NO: 207036 - DNA, 2850 bp, Zea Mays
tcccgctcttcctccccgccacactcgccccacgcaggagaggaggagagccgccgggcctggaagcttctccgcggcgctgcgtcgccagctcgcagcgatttcaaggtgctggtgaatctggcttggccacatagatcttttttattgttgtcctcagaagacaggtttgctgagactgctttctgtctactgtaaattgatgaaattttggtgatcatatactatggaaaaaaagacagttcacgttccggctgagggtaatggtgagattgaaaatggtacgagctctagtcagaatcctgagacccttgagcatccagttttgctgtctgcatctcaaactgtgccaaataacttggggataaggaaaaactataaaagggcagcaaacagaggtaaaaagggttcccaaggactaacaggacaaccagctgccaagagaagaaaaaggagcagagcctcaaacaaaaattcgacagatgagttctcacaaattcgtaaacgggttagatacattttgaaccgaatgaattatgagcaaagcctaattgaagcttatgctagtgaaggctggaaaaatcaaagtttggataagataagacctgagaaggagcttgaacgagccaaatcagaaatcttacgatgcaaattgagaatacgggaagtcttccaaaatattgattctcttctatccaaggggaaaattgacgaatctttatttgattctgaaggagaaatatcttgtgaagatatcttttgtgctacttgtggttcgaaaaatgctacattgggtaatgatatcattctctgtgatggagcttgtgacagagggttccaccagaactgtctaaatcctcctctgcgtactgaagatattcccatgggagatgaaggatggctctgcccagcatgtgattgcaagttagactgtatagatctaataaatgaactccagggcagtgacatctccattgaggacccttgggagaaagtttttccagaggcagctgctatggccaatagctctaagcaagatgaagcatttgatcttccatctgatgattcggatgacaatgattttgaccccaatatgcctgaagagcatgtggctagtaaggaagaaggatcttctgaagaggaagaggatgatgacggaggatcagactctgacgactctgacttcttaacctgttctgatgatttggaacctttgatagataaaaagaatgttgatgacctgggattaccttctgaagattcagaggatgatgactatgatccagcaggtcctgattcggataaagatgtcgaaaagaagtcaaattctgatgagtctgatttcatgtctgactcggatgatttttgtaaggagattaaaaaatctggtggacatgatgaagtttcatcgcctccattacccgatgtcaaggtgggtgatatggaaaagaacactgctcagtctaacacaacaagttctgctgacgaccctatggagactgaaatagaccagagtgtggttttaccagtatcaaggaggcgtcaagctgaacggttggactacaaaaggctgtatgatgaggcatatggtgaagcatcatctgattctagtgatgaagaagaatggtctgggaagaacacaccaataaaaagcaatgaagagggtgaagttggttctcctgcaggaaaaggctctagagttgcgcaccataatgaactgactacacaaaacactaaagaaagcttgcattctcttcatggttcagtagatgagaaacatggagatcttacttctaatggcagcaatatcaaagataggaaaggacattttggtccagtgattagtcagaagctacatgaacattttaagacacaaccataccctagtcgttctcttaaagaaagcttggcagaagaactagggctaacatttcatcaggtcaacagatggtttgaaaataggcgtcattttgcaaggttagcttcttccaggaaaggcatcagtccagataagcatagcccccaaaatactaatagcccagtgacacctagtatgcaacctaaagaaccagaggggactgtgatggaagaatctaatgtatgcataaacagggatgctaccatctctaaaaaagcggtttcttcaaaagtcggatcaagaaagaaccttagcaagagttcccctaaaagccgggtcagaagttgattctgccgcggatcagaatctgtggcctgaccttacagagaaggcagggcaggcaaaaagcaatacagcaggagttgaagaagaaaatgggacgatgaagtttgtagacaaagacatgagccagaatttggactgctcctgaaatttgcaggtctatgggccttgaaacttggcttgtatgactctacactggtagccaaaaaacatagatataccattgcaagtcagctagctctcattagatcatgccaatcaactaacaagcacgtcattcagtttttttcttctttttttttcctgtgggggctattgattcccgttctttgccaactgagggcttcctctgatttctgggtcgctctataggtattagctatcctacagatttgtttgcagcaattactgtcattgcaggaagagctcaattacaaaaccctaaggttcagtaacgacagcacgatgctgctatgacaggatgcagaagatgcattgttttcatcgatgttgattttcttgtaagatggaatgttgtaccaaacctgaacagatcactttgttgtgattcagtgtgcggctatggcctatggatttgtacttgttggactcacagagcatcgcgctttacatgcaaacggattttcggt

SEQ ID NO: 207037 - DNA, 2682 bp, Zea Mays
cccaggtacggacactctcctactccgcccggcgcccatccccgcgcacgcccagcagtccagccggaggccagatcaaagcgccaccgccacgccgcacttagctaatcccgccgctgccccggggtcgctaggaggagatgaagcccaaaagcctcccgttcatcgccttcgagcacaagcgggatgcgtacggctttgctgtgcggccacaacacctgcaacgttacaaggagtacgctggcatctacaaggaggaagaggaggagagatccgatagatggaagaattttctggagaggcagcctgagtcatctggacaggatgctggtgataatgctacgggtgatggttctgaatcactgcatgagaagaccgtagcagggccacagaagattcaaatatggacgccaattagatcgtccctgagcaacattgagcagataatgagcctgcgcatcgggaagaagcaatcttctgctggcaagcagcaagcaaaggacggaacccatcacgtgaaaggtgaagagagcaagttgtcggaggattcagatgacgaattctatgatgtagataaggttgatctgagccaagaagcgcaatcgagtgatactaggaatgctgatgttggaagcaggaaccaagaagaaaattacatttcaagggaagagttggagtgcctggtccatggtggactgccgatggttttgaggggagagctatggcaagcttttgttggtactggagctcgtaggatagaagggtattatgatagtcttgcagcagagggtgaattagataacaaaagttctccaacttctgaaggtgttcaagaaaagtggattgggcaaatagataaggacttgcccagaacttttcctggtcatcctgctttagatgaggatggaagaaatgctttgagacgcttgcttatagcttatgcgaaacacaatccatcagttggttactgccaggcaatgaacttctttgctggtctcttgcttctattgatgccagaggagaatgcattttggacattggttgggattatggaggactattttgatggctacttttctgaagaaatgattgagtcacaggtggatcaacttgttttagaggagttagttcgagagaagttccctaaattagcaaatcacctggattaccttggacttcaagttgcatgggttactgggccatggttcttatccatcttcacaaatgtgcttccctgggaaagtgttctccgtgtctgggatgtgcttttgttcgatggaaacagagtaatgctgttccggaccgctcttgcgctactggagttctatggtcctgcacttgttactacaaaagatgccggtgatgcagttacccttttgcaatctttagctggttccacatttgacagcagccagcttgtcttgacagctcgtatgggatatcaatccgtaaatgaaacaatattgcaagagctaagtaataaacaccgcccatctgttatgtctgccatggaagaaagagcgaaaggtctaggcgtttggacagatactaatggtcttgcatcaaaactgtataactttaaacgtgatcctgaaccactggtttctttaagcaactcagcagaccagttgagtgatgtgggagatggggatgccaatcaagaaagtgatcctgtaaacatggatgacgagtatgttggtgtgacagtgaaatctgagattgattctttgcctgatccaaaggaccaggttgcctggctgaagttggagttgtgccaactcctagaggagagaagatcagcagttctcagagctgatgaactagaaacagcactcatggaaatggttaagcaagacaatagacgccaattaagtgcaaaggttgagcagtttgaacaagaaatatctgaattcagagaggctttgtcagataagcaggagcaggagcaagcaatgtttcaggtcctgatgcgtgtcgaacaagaactgaaaattgcagaggaagctcgcatctcagccgagcaggatgctgctgctcagagatacgcagcaaatgttctacagaaaagtacgaggaagctatggcttcacttgcccaaatggagaaccgagctgtaatggcagaaacaatgttagaggctacactgcagtaccaatctagccagcagaaagcactgtccccttgcccttctccaaggccatcaatgctcgatgcatcccctagtcaggcaagtcagaattcatcgcaggtgtttcagccaagaaggaaaaacttgcttggcccattttcgctgagttggcgtgataagaacaaggaaaagccgaacaatgttgaagactctgcgaacacaaagtttaccaatagtgatgaaatggtagatgagaagcagatggaaaccctggatctagataacgaacagagagcagaatcaactaaagaagatggcaagatgagagcagaaacccctcagaaagacgacgatctggtaagggtccaattaaccacggaccatttgaatggacaccatgaacagatgcaagaaataaaactggattggtaagcacaatggcacccagtccaagtaccttcggcaacacttctcagtgtatttgtgacctgatcacggtgccagttggtgcagcattgagggtggcctaatgttctttatatcccccccccccc

SEQ ID NO: 207038 - DNA, 1160 bp, Zea Mays
ttggaatgcatctgatgaaattttgaaataatgagggaattaggtgtcagctgggatgttgaactgtatggagaattgctcaggataggtggtggaaaggaaaggatgacagcttacttcaaccagacaggatggccggctaaagcaccaaagacagatgacaaaagaaaggagttcatagcttctcttcacaagaggaaaacagaattattcatggccctaattgagaaaaagttgcttcctctccgtccaggtgttcaaaggttaatcgatgaagctttaggaaaggcagttaaagttgcagtgtgcagtacatcaaatgagaaagctgtttcagcaatagtgtcgtacttattggggcctgatagagctgataagattaccatatttgctggagatgtggttcctcacaaaaaacctgacccagcaatctacatattagcagcaactacacttggagttgatccacaaagctacactgcagaagaggacttcgagacagcagatgcagtgttcgattgcattggtgacccgccagaagtgcgcttcgatttggatttctgcgccaagttgctcaagaaacaatatgtgagctgaaagggggctagtgcaagtgatataccaagtacgaggttcctgaatatggagaaagagtccatggcatgccaatgttggttcttcaagccatgacctgatactaggacttggaagtccacgttctacccaatagtaacttatagaatgacattcactactgcccacccagttggcagttgcaaatgtgttagtcattcaacaaattggaaaccactcgaataagggatcaccaagtccaaactcttcagtcaaagcaataacaattgaggttacgagtcgaaaaatatgtaaggcaatcaaactattataagtgggtgtttgaatgtactagaactaatagttagtggctaaaattagttgagacatccaaacaacctagctaatagtttagctattagctgtttttggtaaattaattaatagttaggtagctatttgttagctagctaattccactagcaatttttagctaactaactattagttttagtgcattcaaacaccccctaagactaaacttatcgatagactaatcggttttgagtacttgaaaaggaaaaaaa

SEQ ID NO: 207039 - DNA, 1239 bp, Zea Mays
cataccatgcctttggaatgcatctgatgaaattttgaaataatgagggaattaggtgtcagctgggatgttgaactgtatggagaattgctcaggataggtggtggaaaggaaaggatgacagcttacttcaaccagacaggatggccggctaaagcaccaaagacagatgacaaaagaaaggagttcatagcttctcttcacaagaggaaaacagaattattcatggccctaattgagaaaaagttgcttcctctccgtccaggtgttcaaagctttaggaaaggcagttaaagttgcagtgtgcagtacatcaaatgagaaagctgtttcagcaatagtgtcgtacttattggggcctgatagagctgataagattaccatatttgctggagatgtggttcctcacaaaaaacctgacccagcaatctacatattagcagcaactacacttggagttgatccacaaagctgtgttgttattgaagacagtactatagggctcgcagcggcaaaagctgccggcatgaagtgtatcgtaacaaaaagcggctacactgcagaagaggacttcgagacagcagatgcagtgttcgattgcattggtgacccgccagaagtgcgcttcgatttggatttctgcgccaagttgctcaagaaacaatatgtgagctgaaagggggctagtgcaagtgatataccaagtacgaggttcctgaatatggagaaagagtccatggcatgccaatgttggttcttcaagccatgacctgatactaggacttggaagtccacgttctacccaatagtaacttatagaatgacattcactactgcccacccagttggcagttgcaaatgtgttagtcattcaacaaattggaaaccactcgaataagggatcaccaagtccaaactcttcagtcaaagcaataacaattgaggttacgagtcgaaaaatatgtaaggcaatcaaactattataagtgggtgtttgaatgtactagaactaatagttagtggctaaaattagttgagacatccaaacaacctagctaatagtttagctattagctgtttttggtaaattaattaatagttaggtagctatttgttagctagctaattccactagcaatttttagctaactaactattagttttagtgcattcaaacaccccctaagactaaacttatcgatagactaatcggttttgagtacttgaaaaggaaaaaaa

SEQ ID NO: 207040 - DNA, 1689 bp, Zea Mays
gtcctcatttctattcccagtttcccaccctccagacccacaacaccaaacgccacctgtaaaatcctcacgccacatcttcagccacaggcgcgcgatatccccgctcaaaaaagccatgtcaatggcggcagccgccgcccccgccgcggcatcatccacgctgctgcgggcaagcaacttctctattgcgcgccccgtcccaagcggcgttgtctgctgcatccgcgccgtcagtgggcggagagcatcggtagtgcgcgtggcagcggctggcgacagggccgcgccggccggtgcctttccggcggcgctgttgttcgattgcgatggtgtgctggtggacactgagaaggatggccaccgcatctccttcaacgaaaccttcgccgagacaagtttctcctgcagcgcagttgaccactaacgactgactcataccatgcctttggaatgcatctgatgaaattttgaaataatgagggaattaggtgtcagctgggatgttgaactgtatggagaattgctcaggataggtggtggaaaggaaaggatgacagcttacttcaaccagacaggatggccggctaaagcaccaaagacagatgacaaaagaaaggagttcatagcttctcttcacaagaggaaaacagaattattcatggccctaattgagaaaaagttgcttcctctccgtccaggtgttcaaaggttaatcgatgaagctttaggaaaggcagttaaagttgcagtgtgcagtacatcaaatgagaaagctgtttcagcaatagtgtcgtacttattggggcctgatagagctgataagattaccatatttgctggagatgtggttcctcacaaaaaacctgacccagcaatctacatattagcagcaactacacttggagttgatccacaaagctgtgttgttattgaagacagtactatagggctcgcagcggcaaaagctgccggcatgaagtgtatcgtaacaaaaagcggctacactgcagaagaggacttcgagacagcagatgcagtgttcgattgcattggtgacccgccagaagtgcgcttcgatttggatttctgcgccaagttgctcaagaaacaatatgtgagctgaaagggggctagtgcaagtgatataccaagtacgaggttcctgaatatggagaaagagtccatggcatgccaatgttggttcttcaagccatgacctgatactaggacttggaagtccacgttctacccaatagtaacttatagaatgacattcactactgcccacccagttggcagttgcaaatgtgttagtcattcaacaaattggaaaccactcgaataagggatcaccaagtccaaactcttcagtcaaagcaataacaattgaggttacgagtcgaaaaatatgtaaggcaatcaaactattataagtgggtgtttgaatgtactagaactaatagttagtggctaaaattagttgagacatccaaacaacctagctaatagtttagctattagctgtttttggtaaattaattaatagttaggtagctatttgttagctagctaattccactagcaatttttagctaactaactattagttttagtgcattcaaacaccccctaagactaaacttatcgatagactaatcggttttgagtacttgaaaaggaaaaaaa

SEQ ID NO: 207041 - DNA, 2694 bp, Zea Mays
agtgcatatagactggtcattttacgattagggattattttggccgccgtcgctgcccttcctagtcgctgtcgcgacctcatctgcttccagagtccggcctcgtctgcttgcagcgtcgccgaccagatccacccgcacgcggccgtccgcgcctcgtccatcgcagcggccgcccgcacgcgtccatgacctcgtcggcttccggcgccggccagatccgcccagcctctccgcccccgccgaccgcgctgcagccctctccgcggtgcctcggcccctcccgtcgcggctacctccagccgccggtcaacctgccgacgtggccacctccggccgcccagatccgctgcaccacctccagacgccagccgccgaccgcccagaccccctgctccaccagggagagtcgccagccgctacctctagccgccggtcgcgtagatcccctgctccaccagggagtcggccgcccagatcccctgctccaccagggagagccaccagccgctccaccactgtgtcccaaccctaggccgagggattgcgcgcctccctgacgtgagccgcgactgggtgaacacagatattgctccagtttgtgaagcagctgttcaacacagcttctaagagattagagattggggtagttgacttgacaaacctcttttcacacgaactgaaaaactaatccatcagtaaaccttgatgtttctgatgttgagaggctgaaagagcagtatgcatgttgcacagaagatcagttggcttttgaaggctatagaaagctcttgccaaccagaaaggcacttcctgatgggcaggtcataacaattgagaaagagaggtacattgttggtgaagctttatttcaaccacatatattgggcttggaagattatggtatcgttcaccagctagttactagcgcctcaaatgtttcatcagagtaccatcgtcagctgcttgaaaataccatgttatgtggtggcaccacatcaatgactggttagttgccttttgtttttgatgtgcacctttgctttattcaaccttgtgagtcataggtcaaatagcgaaagggcctctaacgtaatggttaaggcttccgagtagcatctccaggtcctggttcgatccctaacttcgggcttggttaaaaaaatcccctcgctgtgtcccacccgttcttgggttatgtcctgcgcgccaccctcccgctgggccgttgtagagtgggcagaatggattttatcagtcgaaaccatgattcggtctcttcttaatttaatatcgggagggcggtctttccctaccggccgagtttttttagctataggtcaaatgcatatcaattagctgtatagggtaagtaatatcattttgttttaaacttttgtggatttaacatatgttttctagttgaacgcagcttcattcaagatgaaaatctgccttcggtatgaactgattgtatggatgccaacctatgcaccactagtccgggacattctctgttgttatgttccctaataataaagagtgccagctttgatgttctgttagaactttgaagtttcatttgatacttgtcctttggataagtagtcaaacattgtagtgaatatgggtagcaatagcacaactggaggtggaaagtatgttggttaagtaagaattaggtagcaatagcacaactggaagtgggaagtatgttggttaagtaagaattaggtagcaatagcacaactggaagtgggaagtatgttggttaagtaagaattaggctttgaggacaggttccagagagaagcaaatctgtctgcttcagcaatctttccatcacttgtgaagcccccctgaatacatgtccgagaacctagcaaggtactcggcctggttgggtggtgcgatattggccaaggtcgttttccctgaaaaccagcatatcaccaagggcgagtatgatgagacggggcgtctattgtgcaccagaagtgcttttagagacaaactgccttgaactagcacggttgtgcaccatttgctgctgttcatgtcacagctgtgctcgtacctgaatgttgcaggtgccgatgcttgagtccactgtacgccagccacagttcataccgctagccacagttcatacctgactgttgcgaagtgttggtgcatctaggtcggttgggtttatttagagtgcaatagagggtaacattgacgtgtattcgttaggagttttagccaattgcccatttgcacctgtagtattagagaattagctgagatttccttttcaacttacattatgatccattatctcttcagctactgctagtgaaagagttgtttgggtcatgcccacaaactaagcatgtcacaggttcttaggcatatgtttttgttaggagccaagtagccaacggcatcctctccccctgccggccagagggtgcacgtaacattccatcgctcttcaacggctcccccttgggagcactctgcattgagaaaggggcttctctagggtgaaaatgggtcgggtacgccctatgggtaccgtgtcgggtactgaatgtgaatacagatagtgtaaatatctgttttttatgcgagtttgagtatttttatattcgtgatgaatatgggtaatatccgaatagtgtatcttttgattcgggttggatacgg

SEQ ID NO: 207042 - DNA, 741 bp, Zea Mays
caccaactgataagcagaatcgatctcctcccatcacctccatcacaacctctcgacggcagcttcatccccacctcaatcggcggcagcctagggcttcatcccccacccccaattccatgtcatgtggatctgaatcagcccactcccaaatctccaatccactcgccggcttttcctcgtgcccagttcacgacatttgctcggggatctgaccaatgtcgtcttctgctcgtgttcctcgcagccgctcagattggagatcaagggtcaagttggtggacttgcaccccacataggcatggatgtcgagcctgtactcgaggagtgcctgcatctgggattatcaaacacagtttagtcaatttgtaggagagaggacgccatacatcaaagatgactgaagaagaggaagatgaagaatacctcgaagaggaagaagatgcccttgctggtgcaggggggaacacatttagtttcacaaccttcatctcttaacccctccgatcccggtgcgtggcggattagactccgatggggaagtctctggcgaggtggatcaagttcgtgctcttcgggaagaagtcgtcgtccaggtccagctccaccaaggccaataatttatcgataagaatgttgttacgatttcaagtgtggctcaagatatgcatctccagctatggagaaagagctcacgttctctgagagctctctagtgatctcggagcttgtgcttgttag

SEQ ID NO: 207043 - DNA, 977 bp, Zea Mays
cgccatcgacgcagctgtctttggtctctcgtgcttccctttgagagatcgggctctcatcattttgtttgttgctacctgaggacacatcgttttgtttgttgctacctgctaacatatcaactagcacgattttgagcctatctaaatgcccttctgtttatggctgtcaaggtttatggctgttcaggttcttattgattttggtctgagtttcacattgacaattcctgaggacaaagcagtggacctatatgttctagagagagctttgatttccatgcattcgtcctgtggggaagtggctcgactgatctgtgcaaacatttacgactccgcatcacagattagtccagttgcaattggatttatgccttttccttttgttcgtggcatcttgtttcctatggtttttatgcaggtctgttatgttgtgttaatcatgccttagcaaacttatgtgggtaacaacactgatcttgatgatgaaccagatggagaaaatccttgcggtgtatagaaaggcttcaaagcaatggtgttccacccagaacaagctggctcaagtgaggcaacgggtcaggaagcgcaccatggtcggatgaacgaagaagaaaaaattgtggcatggaatggatgtatgttattagattaaaataacaaaatttatgtatggatagaatcacagatggattctgaaacattttctcataacaatataacacacatatgtatataagttatcgtgttattatatggttccgttgcaacgcacgggcactcacctagtatatatatatagacttattgtcatccatttgaatatgaaaaaaatagaaaggaaagaccaatagtattttagaacatagggagtatttgattatctccaaaatccttgatccgcatttcagatgttagcatgcttaggttgggtccaacgctggcccttatcgattgttgttgtggctcgtctggca

SEQ ID NO: 207044 - DNA, 2259 bp, Zea Mays
ttagacaccgttggagacagccatagtctctaccgcatccttccacaaaaccctttcttccttccgccgccgccgcgaccggctaaacccttcatttcgccgcagcgacgaccacccgccgcgggccaactatggcgcccgttgcggctcccatacgcgacctgcttacctctttcagccccggcgcggacttcctcgcgctctcttctggggacggccgcatcaaggtatgggacgccgtgcggggccggctgcagaccgagtttgctgacatccctgcagtggaggcggtcgcggtcgctgagtcgaagcgcggccacctcgccctcgattacacctgcatgaagtgggtacaactttccagtaagaagaagaggaaggctgggagctcattgattgtgcttggtacaggcagtggagatgtgcttgcacttgatgttgccgcgggacattggaagtggaaggtcagcgattgccaccctgggggtgtgacagctgtagaatactcgaaacatgggcggaatgtgtacacggcaggtgctgatggcatggtctgtaggattgatgcctctaatggggctgttgttggaaaatttaaatcttcttcaaaggcaatatctgcattagctgtgtcatcagatggaaatatgttggcaacagcagctggccagttgaggacctttgacacttccagcaacaaaaaaattaaaaaattctctggacatccagttgctgtgaggagcatggtctttagcaatgatagccaatatgttttgtcatctggagttggtgaacgctatattgccatttggaagctgggcagtggtaaaacccagagctcaaactgtattctgtcgatggagcacccagcaatgtttgtggactgtaaatgttcagacaaaggagaaatacacattctggctatttctgagattggtgtctgctatttctggtctgcaaatgttgtggatgacctgcgtaataagaagcccaccaagatcatattatctgagtcatctgtgtcaacaactcatcaagcattatcgatatttgctgcaaaacttcaaggagtggatgggcctaattctgcccatgtcctactggcttatgggtctgtagtgaaaccatcttttgataaacttttggtttgttatggtacagatattagtttgggcatttctcaagatggagttctcttgccaaatactcaaaccaccatggcaaagaaaggccaatctgtgaaaaagcatgaaactgtcattgctctagaccgagccaatgctgaagatgccatccttcctcttccaaaactccatacacaggaaaagaaaaggaaacatggtgtaacaaaacccagtggcgatgttgagcctgagattcatagtgacctcaccactacaagatctattcataaaagagttcctgtgcaaagaattgaagatgacagcacatgcatcgaggatatgatgagggagtgtggcatcattgaaactagagtagatgagagcatgaagggccatgctggtataccctttaacattttgtcttgtctctttggtgatggcagcataaaagtcgatgccaatttacccaattcgaggtcatctaagatcattaaaacctggagatgcttgcaaacttcttgataaattagtatctgcatggaaaacgagatctggtagcacggaacttgtattgcgttggatatactgcctgttagtcattcatggccgttttatctgctccgaggaatcgattaacaacctggagaagatgtgtgcagaaagatacacagttactgaagatttgctgaagctttctgggcggcttcggttaataacagcacaggtcgacaaggctgctagtaacatgtctgagccgacatcaggggagatgcaggatgctgctttccagtctgacgaagaggaggaagatgaagatgttgatgaaacagtattcggtcaagattcagattcgtcacaaaatagcggcaccgacgacgatgcaaagtagactcactgctggtattcatcattatggtgattgtattgtttttaattaaattgccaagcttgatttttgtcaaggcgacgttggaaggttgcacagaattttgacagtgtctctggtttcattttgaaagcactcgaagttgtctcctcctttacccctttttccttatatacgacggcaattggttaaagttacatacccgaaggttgtccttgcacataattttgacagtgtctctggtttcat

SEQ ID NO: 207045 - DNA, 1798 bp, Zea Mays
acagccatagtctctaccgcatccttccacaaaaccctttcttccttccgccgccgccgcgaccggctaaacccttcatttcgccgcagcgacgaccacccgccgcgggccaactatggcgcccgttgcggctcccatacgcgacctgcttacctctttcagccccggcgcggacttcctcgcgctctcttctggggacggccgcatcaaggtatgggacgccgtgcggggccggctgcagaccgagtttgctgacatccctgcagtggaggcggtcgcggtcgctgagtcgaagcgcggccacctcgccctcgattacacctgcatgaagtgggtacaactttccagtaagaagaagaggaaggctgggagctcattgattgtgcttggtacaggcagtggagatgtgcttgcacttgatgttgccgcgggacattggaagtggaaggtcagcgattgccaccctgggggtgtgacagctgtagaatactcgaaacatgggcggaatgtgtacacggcaggtgctgatggcatggtctgtaggattgatgcctctaatggggctgttgttggaaaatttaaatcttcttcaaaggcaatatctgcattagctgtgtcatcagatggaaatatgttggcaacagcagctggccagttgaggacctttgacacttccagcaacaaaaaaattaaaaaattctctggacatccagttgctgtgaggagcatggtctttagcaatgatagccaatatgttttgtcatctggagttggtgaacgctatattgccatttggaagctgggcagtggtaaaacccagagctcaaactgtattctgtcgatggagcacccagcaatgtttgtggactgtaaatgttcagacaaaggagaaatacacattctggctatttctgagattggtgtctgctatttctggtctgcaaatgttgtggatgacctgcgtaataagaagcccaccaagatcatattatctgagtcatctgtgtcaacaactcatcaagcattatcgatatttgctgcaaaacttcaaggagtggatgggcctaattctgcccatgtcctactggcttatgggtctgtagtgaaaccatcttttgataaacttttggtttgttatggtacagatattagtttgggcatttctcaagatggagttctcttgccaaatactcaaaccaccatggcaaagaaaggccaatctgtgaaaaagcatgaaactgtcattgctctagaccgagccaatgctgaagatgccatccttcctcttccaaaactccatacacaggaaaagaaaaggaaacatggtgtaacaaaacccagtggcgatgttgagcctgagattcatagtgacctcaccactacaagatctattcataaaagagttcctgtgcaaagaattgaagatgacagcacatgcatcgaggatatgatgagggagtgtggcatcattgaaactagagtagatgagagcatgaagggccatgctggtataccctttaacattttgtcttgtctctttggtgatggcagcataaaagtcgatgccaatttacccagtaagaagattcgaggtcatctaagatcattaaaacctggagatgcttgcaaacttcttgataaattagtatctgcatggaaaacgagatctggtagcacggaacttgtattgcgttggatatactgcctgttagtcattcatggccgttttatctgctccgaggaatcgattaacaacctggagaaggctggaacaaacctgacaccagcccaatctagg

SEQ ID NO: 207046 - DNA, 1755 bp, Zea Mays
acagccatagtctctaccgcatccttccacaaaaccctttcttccttccgccgccgccgcgaccggctaaacccttcatttcgccgcagcgacgaccacccgccgcgggccaactatggcgcccgttgcggctcccatacgcgacctgcttacctctttcagccccggcgcggacttcctcgcgctctcttctggggacggccgcatcaaggtatgggacgccgtgcggggccggctgcagaccgagtttgctgacatccctgcagtggaggcggtcgcggtcgctgagtcgaagcgcggccacctcgccctcgattacacctgcatgaagtgggtacaactttccagtaaggcagtggagatgtgcttgcacttgatgttgccgcgggacattggaagtggaaggtcagcgattgccaccctgggggtgtgacagctgtagaatactcgaaacatgggcggaatgtgtacacggcaggtgctgatggcatggtctgtaggattgatgcctctaatggggctgttgttggaaaatttaaatcttcttcaaaggcaatatctgcattagctgtgtcatcagatggaaatatgttggcaacagcagctggccagttgaggacctttgacacttccagcaacaaaaaaattaaaaaattctctggacatccagttgctgtgaggagcatggtctttagcaatgatagccaatatgttttgtcatctggagttggtgaacgctatattgccatttggaagctgggcagtggtaaaacccagagctcaaactgtattctgtcgatggagcacccagcaatgtttgtggactgtaaatgttcagacaaaggagaaatacacattctggctatttctgagattggtgtctgctatttctggtctgcaaatgttgtggatgacctgcgtaataagaagcccaccaagatcatattatctgagtcatctgtgtcaacaactcatcaagcattatcgatatttgctgcaaaacttcaaggagtggatgggcctaattctgcccatgtcctactggcttatgggtctgtagtgaaaccatcttttgataaacttttggtttgttatggtacagatattagtttgggcatttctcaagatggagttctcttgccaaatactcaaaccaccatggcaaagaaaggccaatctgtgaaaaagcatgaaactgtcattgctctagaccgagccaatgctgaagatgccatccttcctcttccaaaactccatacacaggaaaagaaaaggaaacatggtgtaacaaaacccagtggcgatgttgagcctgagattcatagtgacctcaccactacaagatctattcataaaagagttcctgtgcaaagaattgaagatgacagcacatgcatcgaggatatgatgagggagtgtggcatcattgaaactagagtagatgagagcatgaagggccatgctggtataccctttaacattttgtcttgtctctttggtgatggcagcataaaagtcgatgccaatttacccagtaagaagattcgaggtcatctaagatcattaaaacctggagatgcttgcaaacttcttgataaattagtatctgcatggaaaacgagatctggtagcacggaacttgtattgcgttggatatactgcctgttagtcattcatggccgttttatctgctccgaggaatcgattaacaacctggagaaggctggaacaaacctgacaccagcccaatctagg

SEQ ID NO: 207047 - DNA, 2040 bp, Zea Mays
acagccatagtctctaccgcatccttccacaaaaccctttcttccttccgccgccgccgcgaccggctaaacccttcatttcgccgcagcgacgaccacccgccgcgggccaactatggcgcccgttgcggctcccatacgcgacctgcttacctctttcagccccggcgcggacttcctcgcgctctcttctggggacggccgcatcaaggtatgggacgccgtgcggggccggctgcagaccgagtttgctgacatccctgcagtggaggcggtcgcggtcgctgagtcgaagcgcggccacctcgccctcgattacacctgcatgaagtgggtacaactttccagtaagaagaagaggaaggctgggagctcattgattgtgcttggtacaggcagtggagatgtgcttgcacttgatgttgccgcgggacattggaagtggaaggtcagcgattgccaccctgggggtgtgacagctgtagaatactcgaaacatgggcggaatgtgtacacggcaggtgctgatggcatggtctgtaggattgatgcctctaatggggctgttgttggaaaatttaaatcttcttcaaaggcaatatctgcattagctgtgtcatcagatggaaatatgttggcaacagcagctggccagttgaggacctttgacacttccagcaacaaaaaaattaaaaaattctctggacatccagttgctgtgaggagcatggtctttagcaatgatagccaatatgttttgtcatctggagttggtgaacgctatattgccatttggaagctgggcagtggtaaaacccagagctcaaactgtattctgtcgatggagcacccagcaatgtttgtggactgtaaatgttcagacaaaggagaaatacacattctggctatttctgagattggtgtctgctatttctggtctgcaaatgttgtggatgacctgcgtaataagaagcccaccaagatcatattatctgagtcatctgtgtcaacaactcatcaagcattatcgatatttgctgcaaaacttcaaggagtggatgggcctaattctgcccatgtcctactggcttatgggaaaagaaaaggaaacatggtgtaacaaaacccagtggcgatgttgagcctgagattcatagtgacctcaccactacaagatctattcataaaagagttcctgtgcaaagaattgaagatgacagcacatgcatcgaggatatgatgagggagtgtggcatcattgaaactagagtagatgagagcatgaagggccatgctggtataccctttaacattttgtcttgtctctttggtgatggcagcataaaagtcgatgccaatttacccagtaagaagattcgaggtcatctaagatcattaaaacctggagatgcttgcaaacttcttgataaattagtatctgcatggaaaacgagatctggtagcacggaacttgtattgcgttggatatactgcctgttagtcattcatggccgttttatctgctccgaggaatcgattaacaacctggagaagatgtgtgcagaaagatacacagttactgaagatttgctgaagctttctgggcggcttcggttaataacagcacaggtcgacaaggctgctagtaacatgtctgagccgacatcaggggagatgcaggatgctgctttccagtctgacgaagaggaggaagatgaagatgttgatgaaacagtattcggtcaagattcagattcgtcacaaaatagcggcaccgacgacgatgcaaagtagactcactgctggtattcatcattatggtgattgtattgtttttaattaaattgccaagcttgatttttgtcaaggcgacgttggaaggttgcacagaattttgacagtgtctctggtttcattttgaaagcactcgaagttgtctcctcctttacccctttttccttatatacgacggcaattggttaaagttacatacccgaaggttgtccttgcacataattttgacagtgtctctggtttcat

SEQ ID NO: 207048 - DNA, 1178 bp, Zea Mays
ggcgtctactcctagcgaggaagataaaactgcaatgatgtcttaccattacctctagctgttaaataattgatcgttaaagagatcatgcagctgcagtgcaataggttagaaaataatactatccctattatgactcgacgcataataccaggtgttttgtctgtgtatagggaaagatcatgcattgcatataaaaagtaggcaaaggaaactacttttatctgatactaacattttactatgtgttttggtgttgtcagaactcagaacatagaggttgttgttcaaatatgcacttgagttatactaggactgatataacattgttcgagagaccatatcgtttaattattttagtgggcatgccaatgttgattgctccaatttcacatatgcccatcatgtacgtactctgcttttgcatcgaaacttttattagaaatattgtttttaactttttattaatttcatttggtagcaccgcccatttatactggtctctgtaaagtgggggagaagtacttgttctgtgctgtgtgaggttagaatagataataatggcaccaagaatgttcgatttagcatctatccttgaatgccattccccttctatcttctccaacttttatcctacggttaagttcagtaattcattttatacttggtcttagtggaaagatcagacctctctggaggcattacttccagaacacacagggtcttatctttgttgtggatagcaatgaccgtgaccgtgttgttgaagccagagatgagctgcacaggatgctgaacgaggatgagctacgtgatgctgtgctgcttgttttcgccaacaagcaagatcttcctaatgccatgaatgctgctgagatcactgacaagcttggattacactccctgcgccagcgacactggtacatccagagcacttgtgccacaactggcgagggtctgtacgaggcctggactggctgtccagcaacattgcgagcaaggcttgaatatcaaatgcgaactgactaggagctccggatgtatcatggaaacttaggacagaatcgcctctgcaacctgttaggtgtcttctaccggcacaatatatcttccaaacccacacagtcgtgcaacctgaatgtatgtcatgttccacaatttgtaaatgctggattttt

SEQ ID NO: 207049 - DNA, 1794 bp, Zea Mays
ctgaaccctaacaaagcaggcgcctttttgctcctccctcccttccacgcaagcgactgctgctgcttccccacaccccccggtaggctcaccgccggcgacgagcacgcgtcccaccacacccaaacccaccgccaccggtgctcgctccgcccaggaccagcgggggagcctccagatctcggcgcgccgcgcaggccagcatggcgtcgtcctccgacgagcagtccaagccgccggagccgcccgccgccgccgccgtggtcaccgccgcagcaccgccacagacgcacgccgagtgggtcgcttcgcttcaggcctactacgctgccgcggggcacccctacgcctggccggcgcagcacctcatggcggcggctgcggcgggggcgcacttcggcacgccggtgccgttccccgtctaccacccaggcgccgccgcggcgtactacgcgcacgcatccatggccgcgggcgtcccttacccgacgtgcgaagctgtccccgcggtggcgctgcccactgtgccggaagggaaagggaagggtaagggcggaggcgcgtcgcctgagaaaggcagctccggggcgccctccggcgaggacgcttctaggagcgatgacagcggcagcgatgagtcatcggagactagagatgatgacactgaccataaggattcatctgcgcccaagaagaggaaatctggtgagccgtctcaagctactgttgtgcgatatgctgcggttgagtcaccatatcccgcaaaaggaaggtctgcctcaaagcttccagtgtctgcacctgggcgtgcagcgcttcctagtgccaccccgaatctaaacattgggatggacatttggaatgcttctcctgccttggctgtgcctgcagtgcagggggaagtgagtcctgggttggcacttgcccgacgtgatggcgttactcaactggacgaacgtgaaataaagagggagaggcgaaaacaatctaacagggagtctgcaaggagatctagattacgcaagcagcaagagtgcgaggagttagcccggaaggtagctgacctaacgaccgagaacagcgctctcagagcagaacttgacaacctcaagaaggcttgtcaagacatggaagcagaaaattcacgtctgttgggtggggtggctgacgcccaggtaccaagtgtcacgaccacactgggaatgagcatcgagccgccgaagttgcagctgcagctgcagcagcatcatgatgaggagggccagctccacaagaaatctagtaataacagcaatgggaactgtgctggaggcagccacaaaccggaggctaacactactaggtgagatacagaggtggatgaggaagtgacaaagatgagatgagatgaggtgtttcttatctaaccacaacacccatcatcggtcagtgtgtgtgttttttcttagcgaagctgtcgttttagtcctcgcagcccgctggggccatgtagagtcgcccccactgcagccatgtattatttatggctcgtcgcggtgtgctttgtgtttttttgtgtgttgtgtaaaaactattgatgtaacaaaacctagagagcctagaggttttttttatgtctgctaactcctgacgagggatgtaatgtaaccggccaatttgttgcctgatcgttcgttagatgaaatgctagcaaatgtcactcgatagccttgcctgcctcgctttgctgtttatacgggttattgaaagtctggtggtgtttttatggtgtttttcatgttgtggcttgtagta

SEQ ID NO: 207050 - DNA, 1613 bp, Zea Mays
ttctcaaggatgcacgagaggccggcacgcctgatctcaaggaggctaagaagaaggctgctgccgtaccttacaacggggaggacaaaaacggattcttgaaaaagttgacactaaagttcaaggacccggagaacaccacgctgatcatccttgacaaatttgatgggaactccgaactagttgctgagcttgtgacagccaatggttacaaagctgcttttgcagtgaaggatggtgcagaaggaagccgaggatggaagagcagtaaccttccctggaaggctccgccaaaaggattcagctttgacttgggcgaattatttggggatggttcagatggtttgcctgtgacaattggtctcgctgcagctactggtttgggagtacttgcctacacagagattgaaactttgctacagtttttggggtcagctgctgttgttcagctagtggtaaccaaactcttgtatgccgaggatcgacaaaagacacttaaacagatcgatgagttctttaacaagaaggttgctccgaaggagcttattgacgaaataaaggaaatcgggcaggctctactacctttacctggcgatgctaaaagccaaccagcactagcaacagcgactcaagttgctgccacacaaacagctgcaccagcagaggacgctaccgcagaagccaccacggaatcagatcctgcaacgccaacacctctttcaccttatacaaatgtcagcgtaaacattatatttataaccactgcacaagtgagcctgaatgcccatgtcacactcattactctgcaattggaattccatgcagtacccagatctcaagccgccatcaacccctacgccaccgtcagtggagtctgaagtcgagacgaaggctagcagcaccgtgactgaaggaccagcagtggtcaattctgcacctatagcagacgctgccacgggatcatctcctgccactactaggcccagacctcagtcaccataccctaattatccagatttcaagccaccatcctcgccttcaccgtcagcaccttaatttggcaagagtacaagaaaccgggtctagaggatattaaagaagttgagttgttcatatggagccggcatctcactagaggtgtatgttgtactatgagcgtgacagtgtggctaagtcactgtggcgagttttctgcagcagtaaatatatgatgtaatgttcattagttatcaatgtgctatgattttctttttgttgtcttattttcgatacatgtaaatgtcgaataactagccgtgagaattgagagttcaagcctatagagcttgatatgtttgatcaaagtaaatgtatcttcttaaaaacatgaaagtcaggtgctttctttttttatcctctataaaaagcacaaagtgatggtgatggttttctgtaaggatcttctatgcagtagtttaagtgtgcatttactgtgtgctagatattataatgtacagatagcctttcttttttagtgaagttagaggagtatgtcattaggtgcttcataaaatcgtggagctagaattgtgaatgtacagaagatatttacataaatcattttatttttttta

SEQ ID NO: 207051 - DNA, 661 bp, Zea Mays
ccaatgtctaatattcaagttggaagggaacttcctcgatattgaagtttctttcacggggccaatctaccttacatgagaaaagaaaatctgatggactaatttgcagtcatcaaggtcccgggagttcttcggaagcatacaaagctggagcacacaatgtgcccgcggaagctgaggataggaacaacaccaacagttgtgctgaaccctctggcagtaacacatggacgttcaaccttcaagacattgatccagcggtggtagaggagctgccaccagagatccaaagagaaatacaggggtgggtccgtccatcgaagcacccgatcacgaagagacgtggttctacaatttcttcatactttccacccgcgaggtcttagatacgttgatacgttagttcttgattgtatattctttattttctacacacaacggcctcgctctgtgtattgtaattgtaagatgtgaagatgtttaggtagccctatatgtgattaacagcttgacgggacctctgagaatggtaagtttatttacgtggggtatggaaacatgaacattaaagcatgtgcaattgagttgaggtcctagggttgcatctacttatgttcatgttggaaaatgatttgagtacagtactcaaacaccacctgac

SEQ ID NO: 207052 - DNA, 2513 bp, Zea Mays
cttcttcatcttgccaagctttcctcaaaaactcgaaaaaggaacggagaaggcgtcctcgacgactgcccatggccgccgcccggacctaggctagggattgctgtctcctgagtcccgacctaccaaggcggaaagggagagggggcgctgtggcgtcaggaaataactggaagccgagggctgagggcgagttcagagtcaggtggttatcgctttctttttcgttttctttttccggagggtagtattggggatgccggttgctaggccggagccgcaggagccccgggtgatcgcccatgtcgacatggactgcttctatgttcaagtcgagcagcggaggaacccggcgctcaggggacagccgaccgccgtggtgcagtacaacggctggaaaggcggcggcttgattgccgtcagctacgaggctcgtggatttggtgtgaagaggtccatgcgcggagatgaggccaagagggtttgtcctggtattaatcttgttcaggtcccagtggcgcgtggcaaggctgaccttaatctttacagaagtgctggtgctgaggttgttgcaatccttgcaagcaaagggaagtgcgagcgggcatccatcgacgaagtttatcttgaccttactgatgcagcaaatgaaatggtcttacaagctcccccagattcaccagaggggatttttatggaggcggcaaagtcaaatatcttgggccttccggctgatgccagcgagaaggaaaagaatgtgagggcatggctttgtcaatcagaagctgattaccaggacaagttactggcatgtggagctataattgttgcacagttacgagtcagagttctggaggaaacccaattcacatgctctgctgggattgctcacaataaggtttataatgagtcgtactaatgttagctaaacttgtcagtggaatgcacaagcctgctcagcaaacagttgtcccttcttcatcagttcaagacttactagcatcactacctgtgaagaagatgaaacagcttggtggtaagcttggaagttccttgcaggatgatcttggggttgagaccattggtgatctcctaagttttacagaggaaaaattacaagagcagtatggagtaaatactggaacttggttatggaagactgccaggggcattagcggggaagaagttgaggaccgtcttctcccaaagagtcacgggtgtggaaagacatttcctggcccaagagcactgaagtacagtgcttctgtcaaaggctggctggatcaactatgtgaagaattaagtgaacgtatccagtctgacctgaaccagaacaagagaattgctcaaacgctaactcttcatgccagagcatttaagaaaaatgaacatgattcaatgaagaaattcccttccaaatcctgtcctttgcgctatgggactgggaaaattcaggaggatgcaatgaggctatttgaatctggccttcatgagtttttagaatctcagaacactggatggggcataacatctctttctgtcactgcaagcaaaatatttgatatacctagtggaacaagctcaatcctgagatacattaaaggtccaagttctgctgcagctctgactatacctgattctccaagttctgctgcagctctggctatacctgattcttcatttgtacctgaggatccatctcttgataatgatgtatttgtggagccaattcatgaagaagaatgccaaccatcaacctctgagaaagaagacgacaataatacacattctgcgtctgcattttcagctaaaaaatgccgagcaaatgaagaaaaaagaatatcaaagaaattgcctggagttcagggaacttcctcgatattgaagtttctttcacggggccaatctaccttacatgagaaaagaaaatctgatggactaatttgcagtcatcaaggtttgctggactgtcccgggagttcttcggaagcatacaaagctggagcacacaatgtgcccgcggaagctgaggataggaacaacaccaacagttgtgctgaaccctctggcagtaacacatggacgttcaaccttcaagacattgatccagcggtggtagaggagctgccaccagagatccaaagagaaatacaggggtgggtccgtccatcgaagcacccgatcacgaagagacgtggttctacaatttcttcatactttccacccgcgaggtcttagatacgttgatacgttagttcttgattgtatattctttattttctacacacaacggcctcgctctgtgtattgtaattgtaagatgtgaagatgtttaggtagccctatatgtgattaacagcttgacgggacctctgagaatggtaagtttatttacgtggggtatggaaacatgaacattaaagcatgtgcaattgagttgaggtcctagggttgcatctacttatgttcatgttggaaaatgatttgagtacagtactcaaacaccacctgac

SEQ ID NO: 207053 - DNA, 3116 bp, Zea Mays
gggctttgtattcaatgggccgtgggctggtctagtaaatgagccttatgtagttgcccgttcatcttcttcatcttgccaagctttcctcaaaaactcgaaaaaggaacggagaaggcgtcctcgacgactgcccatggccgccgcccggacctaggctagggattgctgtctcctgagtcccgacctaccaaggcggaaagggagagggggcgctgtggcgtcaggaaataactggaagccgagggctgagggcgagttcagagtcaggtggttatcgctttctttttcgttttctttttccggagggtagtattggggatgccggttgctaggccggagccgcaggagccccgggtgatcgcccatgtcgacatggactgcttctatgttcaagtcgagcagcggaggaacccggcgctcaggggacagccgaccgccgtggtgcagtacaacggctggaaaggcggcggcttgattgccgtcagctacgaggctcgtggatttggtgtgaagaggtccatgcgcggagatgaggccaagagggtttgtcctggtattaatcttgttcaggtcccagtggcgcgtggcaaggctgaccttaatctttacagaagtgctggtgctgaggttgttgcaatccttgcaagcaaagggaagtgcgagcgggcatccatcgacgaagtttatcttgaccttactgatgcagcaaatgaaatggtcttacaagctcccccagattcaccagaggggatttttatggaggcggcaaagtcaaatatcttgggccttccggctgatgccagcgagaaggaaaagaatgtgagggcatggctttgtcaatcagaagctgattaccaggacaagttactggcatgtggagctataattgttgcacagttacgagtcagagttctggaggaaacccaattcacatgctctgctgggattgctcacaataaggtttataatgagtcgtactaatgttagctaaacttgtcagtggaatgcacaagcctgctcagcaaacagttgtcccttcttcatcagttcaagacttactagcatcactacctgtgaagaagatgaaacagcttggtggtaagcttggaagttccttgcaggatgatcttggggttgagaccattggtgatctcctaagttttacagaggaaaaattacaagagcagtatggagtaaatactggaacttggttatggaagactgccaggggcattagcggggaagaagttgaggaccgtcttctcccaaagagtcacgggtgtggaaagacatttcctggcccaagagcactgaagtacagtgcttctgtcaaaggctggctggatcaactatgtgaagaattaagtgaacgtatccagtctgacctgaaccagaacaagagaattgctcaaacgctaactcttcatgccagagcatttaagaaaaatgaacatgattcaatgaagaaattcccttccaaatcctgtcctttgcgctatgggactgggaaaattcaggaggatgcaatgaggctatttgaatctggccttcatgagtttttagaatctcagaacactggatggggcataacatctctttctgtcactgcaagcaaaatatttgatatacctagtggaacaagctcaatcctgagatacattaaaggtccaagttctgctgcagctctgactatacctgattctccaagttctgctgcagctctggctatacctgattcttcatttgtacctgaggatccatctcttgataatgatgtatttgtggagccaattcatgaagaagaatgccaaccatcaacctctgagaaagaagacgacaataatacacattctgcgtctgcattttcagctaaaaaatgccgagcaaatgaagaaaaaagaatatcaaagaaattgcctggagttcaggtcagctgctcttttctccttggtggataccatcaaactgattttttgttggttattctcaagctgttggtgaatgaagatcttattttccttttgttgctgtttgcttgtttccgtgcaacaaagcagcaccaatgtctaatattcaagttggaaggtggcataacatccccaaaattaatgcttggcattgccttttgtatcagaaatgatcaaatcgagggcttttatttctgagtcagctgcagtttctttcttacattatgttgcctatcatgattacggtcttgtacttgctttttattcagtgaaattagtactctattgtgccattttgccatgtactgaacttgttcacttctctttttttctcatttcttttgtgttggtagtacaagattttcaaactaatttttagtttccatgtcattaactcgcccaaggtgtttcattaccatagggaacttcctcgatattgaagtttctttcacggggccaatctaccttacatgagaaaagaaaatctgatggactaatttgcagtcatcaaggtttgctggactgtaagatgcaatgatgcagacattgattaagccactgccacgtttttttcgtttgctgaatattcatgatgacattaggtcccgggagttcttcggaagcatacaaagctggagcacacaatgtgcccgcggaagctgaggataggaacaacaccaacagttgtgctgaaccctctggcagtaacacatggacgttcaaccttcaagacattgatccagcggtggtagaggagctgccaccagagatccaaagagaaatacaggggtgggtccgtccatcgaagcacccgatcacgaagagacgtggttctacaatttcttcatactttccacccgcgaggtcttagatacgttgatacgttagttcttgattgtatattctttattttctacacacaacggcctcgctctgtgtattgtaattgtaagatgtgaagatgtttaggtagccctatatgtgattaacagcttgacgggacctctgagaatggtaagtttatttacgtggggtatggaaacatgaacattaaagcatgtgcaattgagttgaggtcctagggttgcatctacttatgttcatgttggaaaatgatttgagtacagtactcaaacaccacctgac

SEQ ID NO: 207054 - DNA, 2935 bp, Zea Mays
cagccacagaggtaacccatggggtgcgcgagctccaaggccaacgccgacgtcgcggtggccgacgtctactgcccgccgcccaccagtctgaatctggttaagtctgaacagctcaaaaattctactaaaattcagtacttcgccatttggtgtgttgaagtcgtttggttgccatatacctctagcctagcctgtattaggccagattgtgtggatacatacagtagcagtttgttttgttgtatgtcttaattaagagtggacattatgtatcctacctctttagaacatggataaggaaacatgtttcattttgttgccatacacctctaatctatcctgtataggcgagaccgtgtggatgcagttgcagtttgcttcattagctgaattaattaagaatgctcataaaggatggtttagtaatgagggcgtgtctgatcatttgttggacagttctttctcaagtattctttctcaagtatacttgagaaaaaatatggttttctcaagctaaatgggcgtgtctgatcatttgttggacatgtctgatcatttgtgcttctgaagttctttctcaagtattctttcactacatgtctggacagttctttcactacatgtctgcagttctttcagcctactaatgtgcttctgaagttctttcactgcagaaaaccatattctttcagcctactaatgtgcatcatcgagtactaccattttcccactgcctctaccaaatgatcagcaacaaccagtttcccatttgctgctcatttcgttccaaacatcatcgagtactaccaaaaccttgctcccatttagctttttctcaagtattctctgaactagatctaagttactgatgctgttcaagtcagctgatatggagccatcccatgaaaccctgctggttccacctcttttccttttatgcctacggcatttctgtgactgtaccatctcttttgtgaggcgtttgacaccaaatttttctgagacatagagccatgccatgatgtcaaaatgtcctatatcacgaaaatggctgtataccctctgcagtagcgcagttttaccaacgccggcgactccaactattgctattacagaatatggttttctgcaccaatcatttggttgttgctgctgctggtagaggcagtggtgttggttgttgcggaggatgaagagttaacagtacttcgccaaattagtacttcgccaaatgtatcagtacttcgccaaattagtgtatcagtttcaattttatagcagttttagttctagcacttttagcaaatgtatatagcagtttcatagcagttaactgcataacattcatgccattctcttgtagaaaaaacagaagacaagtgttccaacaactaaacctccaaacttgcgaccaagaccacaaagacaaagtgttccaacaactaaacctccaaacttgcgaccaaggccacaaagacaaaatgctcaacctcaagacgaacaagcgattgctgatttgcagacggtgggagattttctcactgacaatgttgaagtttccgaggatgatccaatcaatgctacaaaaaagaggcctgcaaggggcataactaagatggagggaatattctcaaggtcacctgaaatgccaaaaatcaaaattttactcaatgatcgaggtcagcctattggtaaaagtgctagacaactttcaagtgctattgggtgtcaagttagaaagaaattgtctattgctaccacggactggaggcttgttgatataaacaagaagtatgagttgtgggaggatataaagacatattatgatgtagatgctgctgccttaaactgggttatgcgcacagctggaaagaagtggaagcaatttaaagcatccataaagcaacgatacttcaatcctgaattgtctataaaagaaattccagaatgtcctgataagagggttaatgatgatgattggcactctatgtacaactattggatgtcttctgaatttcaggatcgctcagaaaaagctaaaataaatcgacaaaagctaaagatgcaccatacagccggcagtgaccaacttaatgatgttcttggagtatatccagagttaaaggaccgatcaattcaagagggtgatgcattctctattgtttgtggaccgaaagagccaaaaggatatgttcgtgttttgggtttaggccctactcctcaagatattggcactccagagttgaagtcttatactgcaacaagactacaaatggagattcttgctcgtacaaaggttcaaagtgagaaggctgctttagaagagcgtgtacttgagctacagactcaaattgagcaaagggctcaaccagaccgggcaagtgaagagcccatgtcacatcgcggctctacttcatttcaacataaggtgatgaggaacaagtttgctgctgaggatgaggaagacaatgaagaatattgtgcttctgaagatgaggaattagatgatgaggatgatcaaatatttcatcagatgcaaggtgctaactcaccaagatctacaaggcactttgctgaagcttcacactctaaacatgatgatcttgttggaaaagatgtcatattatatgctatgttgagatctgatttgcctgtggctaaagggacaattgtttctactaaaccaagcaccacagttggaggccagatccttggaaggcaatattgtgaagttattgtaacttgtgtgataaaacgagatacagttttgcctcgcccttgtgcaaatgtggaaactatggctgatgcttacatgatgtcagttgcatggccgtacaagaaactgaagttggtgcataaggctgcaacaccgtctagtggaggtagcatcaaaactgtatttttatttgcaaatgtagcaacaatatactaa

SEQ ID NO: 207055 - DNA, 3478 bp, Zea Mays
cgatccctctctcgttctctcaacaaatcgacgaagtccctgaactcatttccagcctctccgcgccccaaccaccgccaccgcgtgcgagatcacaagcctccacaccgtgaccaccggcgccgctgcggcgtcctgagcaggcggcgagcctcgtgcacagggcaggctcggctcgccggggcggacgagatgagcgggcacgactccaagtacttctctaccaccaagaagggggagatccccgagctgaaggaggagctcaactcccagtacaaggacaagagaaaagatgctgtcaagaaagtgattgctgctatgactgtaggaaaagatgtctcatcattgttcactgatgttgtgaactgcatgcagactgagaacttggagctcaagaaactagtatatttgtatctcatcaactatgctaaaagtcaacctgatcttgccattcttgctgtgaacacatttgttaaggattcacaagacccaaacccattgattcgtgctttggctgttaggacaatgggttgtatccgtgtggacaaaatcacagagtatctctgtgatccacttcaaagatgtctcaaggatgatgatccctatgtacggaagactgcagctatttgtgttgctaaactttatgatataaatgctgagctagtagaggatagaggatttctggaggcccttaaggatttaatatctgacaataatcctatggttgttgcaaatgctgttgctgctctggcagagattcaagatagtagtgttcgtccaatctttgaaatcaccagccatacactgtcaaagcttctgacagctctgaatgaatgcacagagtggggtcaagttttcattttggattctttgtcaagatacaaagcagcagatgccagggaagctgaaaacatagtggaacgagttacaccccgtctccaacatgcaaattgtgcggttgttctttctgctgtcaagataatccttctacaaatggagctcattacgagcacggatgtagtcaggaatctctgtaagaaaatggctccccctcttgttactcttttgtcagcagagcctgaaattcagtatgtagccttgaggaacattaatctgatagttcaaaagaggcctacaatactcgctcatgagattaaggttttcttttgcaagtacaatgaccctatatatgttaagatggaaaaactggagattatgataaagcttgcctcggatcgaaatatagatcagctacagttttggtttattatttttatttgtggcctcatacaatagagaagtgcagaaatcaacaaaggaagcattccagggacgatttcaatacgagtttgaaattcaattgctagatttcttgaacatgtttatcttatgagagacttgagagttctgttggtactggtgtgacttctctctgttcaagagttgaccgagctttttgtaggtgctcttggaattcaaagaatatgccacagaggttgatgttgactttgtgcggaaagccgttcgtgcgattgggagatgtgcaattaaattggagagagctgctgaaaggtgcatcagcgttttgcttgagctgattaagataaaagttaattatgttgttcaggaagctataattgttatcaaagacatcttcagacgctaccctaacacgtatgagtctatcatcgctacactttgtgaaagtctggacactttagatgaaccagaggctaaggcatccatgatttggataattggagaatatgccgaaagaattgacaatgctgatgaacttcttgagagtttcttggaaacatttcctgaagaaccagcattagttcaactgcagctgctaaccgctactgttaaattgtttcttaagaagccaactgaggggccacaacagatgatacaggctgttctcaataatgccacagttgaaacagataatcctgatttgagggacagagcttatatatactggcgacttctgtctactgatcctgaggctgcgaaagatgtagttttggcagagaaacctgtgatcagtgatgactccaaccagcttgactcatcacttcttgatgagctgctagcaaacatttctaccctttcatcagtttatcataagcccccagaatcatttgtcagccgtgtcaaggcagctcctagggctgatgatgatgagtttgctgatacagctgaaacagggtattcggagtccccatcccagggagttgatggggcgtcgccttcctctagtgctggtacttcttctaatgtacccgtgaaacagccggcggcagcatccccacctggtccagtggtaatgccagaccttttaggtgatttaatgggtatggataatgctattgtccctgttgatgaacctgcagcaccttctggccctccgctacctgtcttactgccttcgaatacaggtcaagggctgcagattagtgcacaactaacacggcgtgatggccagatatactatgatatatctttcgagaatggcacccagggtgtcctagatggatttatgattcagtttaacaagaacacatttggtcttgctgctggtgaagcacttcaggttactccactgcaaccaggccaatcaacaaggacacttttacaaatgaacacgttccagaatatcagccctggtgcaccaaactcgctattacaagttgctgtgaaaaataatcagcagccagtgtggtacttcaatgacaaaattccactgcatgttttctttggtgaagatggaaaaatggaacgagctagttttcttgaggcctggaaatctttacctgatgacaatgaatttacaaaagaattcccgggctctgtaatcagcagtatagatgctacagttgagcgccttgcagcatcaaatgtgttctttatagccaagcggaaaaatgcaaacatggatgttctgtatctgtccgcgaagatgccccgcggaatcccctttcttatagaggttacagctgcggttggtgttcctggtgtgaaatgtgcagtcaaaactccaaatagagagatggttcctctcttctttgaagctatggaggctctcaccaagtgacgccaaagttaatggatatgtggttctacaaaaatttatcagtcgatgagctgctataggtgtttggatgcggcattttttttttcacggaagcttgtgtgaattgtagtttttgtattagattacagtatttaaactgatagttcctggttccaaagtttttcgccagaaatactggagatgttcttgcctcacataatctgtacatcttaccctgttggacctggaaattttcatcttgttatgcatagcatatgaaatatgactagttttctacacggctaatgtaaactgatactacctccgttgacaaatatttgttgcccgctagtttatttttgaactaaacggcgaaaaacaaaaaagaacgaagggagt

SEQ ID NO: 207056 - DNA, 1349 bp, Zea Mays
tgcattcaaacatgaccttaatatgatataaactaaaggttagatttatttttaaattattgtttatgtaatctaaagtttagaaaaggttgtacctgagacgaaatccgggcggcagcagccatcggaggctgggcggcagccgccagcctcccgctcgcacgggagccacacacggacaccacgctgcgttcactcgcaaccgtggcccgtggcccgtgggtttcgcctgtggtcaccgcgaggccgcatccagtcgcccatgccgccttccgcatcgatgccggcgacgcacacggccgtgtacgtggcggcggtgcccctgcgggcgcccaagggccccgcccagctgctgatgtcggcgggctactcgctgggcatgtgggacctgcagcacttcatggtgctcctccgtcccgacccggcgctggcccaggcgctggtcttcgatttccagccgcgggacccggaggacgtcctcgccgcgctcgcggtgctgtcgcggagagagatccctggcgtggttcgcagaagaacgctgcggagggtcccggacgggcggtgctggctcgtggggcactgctgcgacgccgtcggtgccgccacaaggttcagcgagcggtggacgaccggcctggtggtcggggagcacgactgccgggactacaccaacgggctggtcgaggtcctgacaggtgaaaaacgtgtcctggagtcgctcagattgcgcggcaacggcagcagcaccagtggggcggcgccgccgtgatggatgatctaaactgtacggactacggtcatatatcggattctataaactggagacccaacacgcaatgcagaaatttcatggaaacgaggagacgttttgaaagggaaaaaaaatgaggagagaaaacaaagaagctactactcaagacaaggcgatggtgtaacgaagaaatgaggccacttgactagttgactgtgaaagatactagaggtgctacgtgaagcaagaaattagacacgctatgtggagaagcaccgttgactaagtaaacttaggaggtgtttggtttgaagaaatcaatctattctaaatgaggtggtatatcatgagtctattatacaaattttgtggaataaacttattctttatattattactaattattagcccacgtagaatgaaatggtgatggatcgactcaaaccaaacaagaaattgaggagtgataagataatagactaccttattcctcaaatcaaatgcgctgttagatttttggtggatgcttgctgattgtgtaactaagggcctatttgtttcagcttatagattatataatctggattataatataaat

SEQ ID NO: 207057 - DNA, 1194 bp, Zea Mays
tttttaaattattgtttatgtaatctaaagtttagaaaaggttgtacctgagacgaaatccgggcggcagcagccatcggaggctgggcggcagccgccagcctcccgctcgcacgggagccacacacggacaccacgctgcgttcactcgcaaccgtggcccgtggcccgtgggtttcgcctgtggtcaccgcgaggccgcatccagtcgcccatgccgccttccgcatcgatgccggcgacgcacacggccgtgtacgtggcggcggtgcccctgcgggcgcccaagggccccgcccagctgctgatgtcggcgggctactcgctgggcatgtgggacctgcagcacttcatggtgctcctccgtcccgacccggcgctggcccaggcgctggtcttcgatttccagccgcgggacccggaggacgtcctcgccgcgctcgcggtgctgtcgcggagagagatccctgaagaacgctgcggagggtcccggacgggcggtgctggctcgtggggcactgctgcgacgccgtcggtgccgccacaaggttcagcgagcggtggacgaccggcctggtggtcggggagcacgactgccgggactacaccaacgatggatgatctaaactgtacggactacggtcatatatcggattctataaactggagacccaacacgcaatgcagaaatttcatggaaacgaggagacgttttgaaagggaaaaaaaatgaggagagaaaacaaagaagctactactcaagacaaggcgatggtgtaacgaagaaatgaggccacttgactagttgactgtgaaagatactagaggtgctacgtgaagcaagaaattagacacgctatgtggagaagcaccgttgactaagtaaacttaggaggtgtttggtttgaagaaatcaatctattctaaatgaggtggtatatcatgagtctattatacaaattttgtggaataaacttattctttatattattactaattattagcccacgtagaatgaaatggtgatggatcgactcaaaccaaacaagaaattgaggagtgataagataatagactaccttattcctcaaatcaaatgcgctgttagatttttggtggatgcttgctgattgtgtaactaagggcctatttgtttcagcttatagattatataatctggattataatataaat

SEQ ID NO: 207058 - DNA, 529 bp, Zea Mays
aagaaacgagtaaaaaagaaggaaacaaattctttcagctacttgctgttcgatttacttccacatctaggatttattgttctttttttccacagcaccccccgggcatgtctcactggaacttttacaaatttgggtttagggtacataaaagcacgtggagtgatacctctgcacctcagtggctttatcggcgaggcttggttgctgagtcatctacaaagacatggatcagctgaccaagctcgaactaccatcgcctccaaaaaaatgaagcatacccaacttaacaaagagctaccatattctatgggttcaaaaaatgaagactgctagcccaccatgaagcactcgaaggtattggttttttgcaagcattagaagagctccatcactttttaatataaaagccttttgtgtacatatgaccaactgttggagcatttctaaaactgtattgacttatgcaacctctagaaacacactgttactgcatattggagtacgctacttaaatgctacttgatat

SEQ ID NO: 207059 - DNA, 558 bp, Zea Mays
gtccttgttcatgctttgtccggttgtctggaaacctgagaacaaatgacgaaggagctgatacagtggtttggttggcgttgcaacctaaggagaagttagcctcgggagccttttacttcgaccgtgctgaagcaccaaaacatttgaagtttgctgggactgcagattcgcacgctcagataaaccctatcgttgatagcattagatccatctgtggtctctctgttaatggttgagctgccaaagcaaaagtgatatacagctccatcgtcaatagcattagattcatctgtggcttctctgttaaaggttgagcttccaaagcaaaagtgaagtgatatattacttgatataatgggtgcatgattcataaaaccgcaaaaaattgaagagtggaaaaaaaaatgcaccagccgggaatcgaacccgggtctgtaccgtggcagggtactattctaccactagaccactggtgcctttgatgctaaagttatgtacgtatttaatttcttttgaatcaacaatcaaacatagatccaacattcttatcacaca

SEQ ID NO: 207060 - DNA, 2292 bp, Zea Mays
atggaggtgcatctgaggaaggtcatgcacagaagccggtttatgcggaagagctccatcatccctgctatcacgaaccgaatcaagagagatctgattcacaatccgctacatctaatcttttctgtggattttcttggagtaacaaaatcaactttatcatcacttagtaaaggatttgcagagctctctactgatgggcaatttcttcagctgagatcaaagcaggtttggtcaaggagaatcactggtgttggtgatgggctagttcaagggactgaagcatttgctcagggtttggctttcggggtttctggtgttttaagaaagccagttgagagtgccagacagtatggtgttataggtattgcacctggcattggccgtgcttttgtgggtttcattgtccaacctttaagtggggctctggattttttttcactgacggttgatggaatcagtgctagttttatgagatgtgttaacattttaagtaacaaatctgttccgcagaggataagagatcctcgtgctatacatcgtgatggtatagtaagagactatgacaaatttgaagctgctggccagaagctagcagatattttgcatgcacggatttatttcgagaaccttctaagtacgcatggtctgattactatgaagaccattttattttaccaagccagaggattgctttagtaactaataagcgggtgatgctgcttcagtgcttggatctagataaaatggacaagaaaccttctaaaatactttgggatgttccttgggaagaagtactttcattggagctagcaaaagctgggtatcagaggccttcacatgtaatcatacatctgaagaattttaggaggtcagagaactttgtaaggcttattaagtgcaacattgacaacgaacgggaacctcaggctctttcactttgctgttcaattcggaaaatgtggagatctcaccaagcagcaatgaaagttataccattgaaggttccatcaggccagcgtcatgtgtattttgtgtcagatgatgataaaaaggaatcccacagtttatctaggcctttgctaagctcgggaggaacctctactgatgttgagcaacagttcataaacaatacagttcactttcagaaaatgtggagcagtgaaccagaaattcagagccgatgcaaactagttgccaagcagattgcggatgacggaagggtgttcagcatatggaggcctctctgccctaatgggtatgtctcaattggtgatattgcgcatgttggcatccatccaccgcattttgctgctgtatacaagaatatcaatgggaactttgcactgcctcttggctatgacctggtttggagaaattgtgctgaggattacaagagccctgtatcaatatggcttccaaggccaccggggggatacgtagctcttgggtgtgttgctgtcccttcattcaaggagcccactcttgactgtgctttctgtgtggatgagagactcgcggaggatgccgcgtatgaggagcaaatcatatgggcctcatcggatgcttacccatggggatgctatatctaccaagttcagagcgcctcaatgcagttcatggcacttcgtgtcccaaaagaacaatctgagctaaggcccaagaagatattggagtcatttctgcagcaagcatcagagactcaaacgtcccgtgcatgaagaagctgcacatgatgcttgtgcgtgcaagagaactcggctgggacaaagggcaagtctcgtgcaagaaagctcgaagaatgccacttctttcggatcactccatttctccgttgtcaaagcatacacagaggacagagccttgcatgccaacactcgggttgacggaagtgttgtatactagaatagtaggttaaaggttgtaaatgtaaagttttgtaacgtttgatatagtttttgtccagctacatttgttaaggcccatgtggacgtgggccatattagttgtggctacatattctactaagaagttctcaggactaatcatactttctctaatttaaggttgttaaggcccatgtggacgtgggccatactagttgtggctatatattctactaagggcccgtttggtaaaacttcagctcctgcttctttagcttcagattctgatcctcgtgaggagctgatcctcctgattttcctagaaaatcagaatcatttttaaaaccgtttggcaagtaaactgattcttgtcttctgagggttggtggcctatggcgattgtctg

SEQ ID NO: 207061 - DNA, 1855 bp, Zea Mays
gtttggcctggcccattttcgttcgccagttgccaccagcggcggttgagcgggcccatcacgtcagtcatcgaccaagtagccggcagccgcgcggcgtccgcgtcactccaatcccctcgccccgcggcgcctccgttcacagcgccatggcggggtggatctcctccaagctcaaagcagccgagaccctcctccaccagatcgatcagcaggcggcggaatccctcggcaagtccccatccgcttccgacctcgccacgctgcactccacaacatctcgctccgccgatgacctccttgacgtgccgctcccgcgcaggccgccgccgtccggcccgcccccctcactcggcctccgtctcgcagcgaagcgccgctccccgccttcccaagggccccgtcgctccgcatcggcggctgcgatgctcgcggtgcaggatcaagccggtggtgaaccaacggtgggggtggtggccgaggtgaaaccggaaacggatggaggggatcgcgaggacggcaagagtgtcgcgtccgagagcgggagcgatgaggactccgatgggtcagggagcgaagattcggaggattccgaggaggagaggcggagggaggaggagaggacgcggcggcgggctgagcggcttgcggccatggccgcacgcgctattgctgagcgcgaagatgctgttgcgaggctcgagggggagaaggcggggcttgagaagctgctcgccgagcgtgagaaggagcaggctcaggaggcttcagagttgcagactagtatgattgaaaccttggaagcagtggagatagagaaacagagacatcacagcactagaatggaagcccttgcacgtttggctagacttgaggttacaaacggtgagcttgcaaagtcacttgccagggaacaatggaatctggaagttcaagtagatcaagtggcgcagcttcgagaggaagttgaattgaagaaacttgctcaagataaatacagaagaaagctaacaaagatacaaaagacaagtgcccctccggttgatgaaaatctttgagaaggttcaagctggaggaagaaattattgatgcagaatacactctgacatgtgacagaattgtgagcttgaaggacaaggcaaggaagattgaagaaagcattgagctgactagaagagacatggttcatcctacagaggtggaaattgagctcaagaagaggcttgatcaactaactgatcggttgattcagaaacaaatgcaggtggagtccctatcttcagagaaggcagctctgttaatgagaatcgaggcagtcacgaggttgcttgacaatagcacctcatcatcagcttcctcaagctcatcaagattggacattgaagctggtgcatggcaacaatcacattcaccaacaatcacattcaccaacaatcacattcgcgacagaatacgggctggacagcagcaactgggatctgcgatccgacagctcgattcgatcttttcagccgggcatatcttcttgaggcggaatccgaaggcgcagtgtcggaaactcgctctggggcaaccttttctttggagacattaaacaagactagcacttgattgctttttcctggcatgttctgatgttatattctggctgtatacatgaggcatcatacctttttctggttgagaaaaatcttagcatataatgcctcgtgcattttgttttggtacctgtccctatccgcaattaaagtgtaacggtggctggttgcatacatgaaagttggaattacttttggacaatggtggctggttttaaacatgagcctcaaattgcttctgaatgtttactttacgc

SEQ ID NO: 207062 - DNA, 1856 bp, Zea Mays
gtcagtcatcgaccaagtagccggcagccgcgcggcgtccgcgtcactccaatcccctcgccccgcggcgcctccgttcacagcgccatggcggggtggatctcctccaagctcaaagcagccgagaccctcctccaccagatcgatcagcaggcggcggaatccctcggcaagtccccatccgcttccgacctcgccacgctgcactccacaacatctcgctccgccgatgacctccttgacgtgccgctcccgcgcaggccgccgccgtccggcccgcccccctcactcggcctccgtctcgcagcgaagcgccgctccccgccttcccaagggccccgtcgctccgcatcggcggctgcgatgctcgcggtgcaggatcaagccggtggtgaaccaacggtgggggtggtggccgaggtgaaaccggaaacggatggaggggatcgcgaggacggcaagagtgtcgcgtccgagagcgggagcgatgaggactccgatgggtcagggagcgaagattcggaggattccgaggaggagaggcggagggaggaggagaggacgcggcggcgggctgagcggcttgcggccatggccgcacgcgctattgctgagcgcgaagatgctgttgcgaggctcgagggggagaaggcggggcttgagaagctgctcgccgagcgtgagaaggagcaggctcaggaggcttcagagttgcagactagtatgattgaaaccttggaagcagtggagatagagaaacagagacatcacagcactagaatggaagcccttgcacgtttggctagacttgaggttacaaacggtgagcttgcaaagtcacttgccagggaacaatggaatctggaagttcaagtagatcaagtggcgcagcttcgagaggaagttgaattgaagaaacttgctcaagataaagaaagctaacaaagatacaaaagacaagtgcccctccggttgatgaaaatctttgagaaggttcaagctggaggaagaaattattgatgcagaatacactctgacatgtgacagaattgtgagcttgaaggacaaggcaaggaagattgaagaaagcattgagctgactagaagagacatggttcatcctacagaggtggaaattgagctcaagaagaggcttgatcaactaactgatcggttgattcagaaacaaatgcaggtggagtccctatcttcagagaaggcagctctgttaatgagaatcgaggcagtcacgaggttgcttgacaatagcacctcatcatcagcttcctcaagctcatcaagattggacattgaagctggtgcatggcaacaatcacattcaccaacaatcacattcaccaacaatcacattcgcgacagaatacgggctggacagcagcaactgggatctgcgatccgacagctcgattcgatcttttcagccgggcatatcttcttgaggcggaatccgaaggcgcaggtttgggccttggtgtacctggtatgcctccacttatgggtactgtacatactaacatcacacccaacagtgtcggaaactcgctctggggcaaccttttctttggagacattaaacaagactagcacttgattgctttttcctggcatgttctgatgttatattctggctgtatacatgaggcatcatacctttttctggttgagaaaaatcttagcatataatgcctcgtgcattttgttttggtacctgtccctatccgcaattaaagtgtaacggtggctggttgcatacatgaaagttggaattacttttggacaatggtggctggttttaaacatgagcctcaaattgcttctgaatgtttactttacgc

SEQ ID NO: 207063 - DNA, 4327 bp, Zea Mays
cgcgcctgcccccgcctcccccgtccgcaccgtgcacccgccttcgccgcccgttgccgagaaatctgcgccggtcaccgagaaatccgccctctcctagccgcccgcagatggaaaccctacgacccctccctcccctcaccgcctccccagcccgcagtctctcctcaacctccctgcctcctcataaatctccttccttccctcaatcgcacgccaggaatctcactcgaaaccctagcgcagccgaaccccactgtcgtcttcttaatcgccatcgtcttcgtcgtgttcctcccagggtcgggcatcatcgagaggcccaagctgacgctcctctcgaaccgcgtgggagagggacgcgtcagaggcaggattgaggacgacagccacgacgagcgatctgtggactatgggagcgtgccatgagatgtacccattggcttttacgccgcctgtaccaccggaggaatcgccagctgtgggctcacccacatggtcgtcacgacgctcggcctcgccaaatgcaacatgcagatatgcatggggtggtgagactcatcacagtgttgggaaaataattgacatcgagagtgatggcctgctcaccattgatattcctaattgggcaacaccatggcaggcagatccatcagacatggaaaagattgagaactctaatgtgagcaattggattagagtcaaagcgatagttccttcacccaaatatggatgggagaatgtgactcgtaatagtattgtgatagttcatagtctataggatgagaaaatgttatgtaattctgaccagcaggtgagggtgcccttgctttcttcgatggactcctcatgttattctgtaaatctcagctttgttattagcactaaatcagatgtttctttcgctacttggagtcgtgaattggtctagcaggtaagcatccaaggaatatttttagttcaactttcagcaaacaatacaatcgttacctatccacttaccaaatggtttactctgcacgtgttattatcttggttcaatcctacgattaggtttggaattttggactgcttggtaaatcctaaattacacttttttgtaaatatgtatcttgatcaatatggattcttgcgacagttgatatccaacgataatagtttaggtgcatgtttaaattaatagaacaaataatataatgaaattgttttgctggatttgcttctcatggttttactctgcaagtttaacctgcaaattttcagtaattttctgtaccttctcgctggggtggagcggagatcggatctgccaggagctgattccttctctcgcaggaacttgatcatgttgtgcctctgatcagagctttggctcttcttaattctcatacttcttctacctcaagttggtaggctcaagactcttgattcactaaagaatatagggttttcacaagggtaagcatgcttatgtcttcttgtttctatcttaatgaatttatttattggttaccctgtgctgattagcacttcacttcagtttagatatttatatattgtggcatttttctaggacttcggttaacatgtttagacattgttcttgtgtttcctagtgggggtgcttagatccagttgagatctatgtccgtgtattggtcgttatttgttttctctaattactcggtggctctgcataatgctgtaggatttaaaattttcaaagtatgctctctgctttaaacatgtaaaaatacactcatgttttatccacaaatttgtaccagttttgtttgattacttacttcgcttatcttgtcatgcttgtgcttgcttggcctgtgatcgcgttgttgtatattagaataatgcaaaggagatgctatgctataaactttgcctatcaatgtattcattcacaaactcgccatcattgcatacatatttggtttggagaaatcgagtgagatcctcaatccagctctaacaattctccttttattcagtcgatgcactggtcaacagtagcttggcgaaattgggctatgagtatgttattatagttctagatcatgatccatagctgaaaggtttttcatatcttctttcatatgattgttgggcaaagtctgcctgggactaccagcgaaactttgttgcaaatagataaaaaccttcccatcttgcaaaagggttgaagcttggcctctacaatgacgcggggacacaaacctgcagccaaaaaatggcagtatcacttgatcatgaagaccaaatgtgaaaattttcatcttgggctaaaaaatgctagtatcacttgatcacaaagagcaagatgtggaaaaaaacatcatgggtaaatctatttatgtttatttcctgacaactgtgacaagtcaacagtgacaaaagtatctgatcgtctcttgttctaagttcctggagtgtgacagagatgtaaacaagaacaatgattccctgagttgtagttggcggggtcagagtcgatgaagaatctatcatcgttaacccatgtccgccagaatgtgacattgaatggagtgactctgtgctagatgacattgatcatgtagtctcaaacatctgagacgatatccagtctatctgagttgtgttgcctgatgtgatgtaggtaatccaacttgctgcagcaggcgaggagcgagtgcccctgctagaagagtgctagctctacgcatacggtcgcttgacaaacatgtgttgttaactgttgtatacaatgttactaattattgtcctttattctcttatgctacttctgtagttgatgctcacattgttctctcatttccgtctaaattttgtatgttatgccaaaagaccatatgttttttgtagttttttttaaaaaaaactagctctctgtttttatgattgtgtcgtcgcaacgccaagccctctgccgcctccactgttcgccctgccaacctaggaaatcataagtggagattgaagttgatcaacttgacactcgaataaaagaatcaacaagtattgcaagtgctgaaagttgtgactgctcaagtccaactgctttatcgcacaagttctggtgaagatacttattctagaatcttcaaaagcatcaacgttagtgttcaagaattcaaagagtaactgaagatggaagactaagatgacatttatggagatctatttttgtaaatgggcttagtacctgtttctgtttggtaaaggaggtaaccggtcaatcctatttactttgtgacaccacatcaatcataaaggaggtaaccgattttcttagactggcattcatatagccagcctaccacacaatccccatcctccacttcaacaaccaatttctaaatggatccatcaaccaatttctaaatcgatgatttttgattgtttgattttggtgtagactctcgatttaaacaatttcaagtgcctgtagaatgtagtttggatgtgaactgaagtagtgatagttgctactgacctgccttcataatttttgcaaatggtctgggatagttcggtgatgctgttcataatcatgtgccttcatattgaggaagcatgcaacctgatacaaaagcatagatgatgggatcatggataagcatttgaagacccttgccccagtctacgtgggaacaaaattcgtcaagcttgatgctgaaatctaatgctccattctttgtggccaaactggcaatcaagacactgccatgtgtaatattgttcaagaagggaattgttgttgaccaattagttgggtttcaagatctcagaagtaaagaagattttctgacaatagcattggaacatattcttattctcaagacgaaagggataatcgatgagaagaagacagataacgacgatgacgatgaagaaagcgaggctaagaataggagggttaggtcctcaactgctcaagactctgactcaaactgaacctgagatgaggattgaggacgcaccgttttttgcactttggattttgtttgtttatttgtttgttctgtgtttgtgttgtattgtactgtaattgatttttgtaaccatgtatcggtaccagacaccacaacaataacatgtacaagagattctttagcatccattgtgtgtaaaagctagggtttgtggctgccttttatttcgtttttcctcagctgtcataggatggtacaccacaacaagaacatgtacaagtatgccatagcttgtctttcttgcttcttaagacattgttctgccttttggcacttatggcatatgactttttcacaaatggattacaaaacatttt

SEQ ID NO: 207064 - DNA, 5286 bp, Zea Mays
gttctgccatctaccccgcgatgtccgcgcctgcccccgcctcccccgtccgcaccgtgcacccgccttcgccgcccgttgccgagaaatctgcgccggtcaccgagaaatccgccctctcctagccgcccgcagatggaaaccctacgacccctccctcccctcaccgcctccccagcccgcagtctctcctcaacctccctgcctcctcataaatctccttccttccctcaatcgcacgccaggaatctcactcgaaaccctagcgcagccgaaccccactgtcgtcttcttaatcgccatcgtcttcgtcgtgttcctcccagggtcgggcatcatcgagaggcccaagctgacgctcctctcgaaccgcgtgggagagggacgcgtcagaggcaggattgaggacgacagccacgacgagcgatctgtggactatgggagcgtgccatgagatgtacccattggcttttacgccgcctgtaccaccggaggaatcgccagctgtgggctcacccacatggtcgtcacgacgctcggcctcgccaaatgcaacatgcagatatgcatggggtggtgagactcatcacagtgttgggaaaataattgacatcgagagtgatggcctgctcaccattgatattcctaattgggcaacaccatggcaggcagatccatcagacatggaaaagattgagaactctaatgtgagcaattggattagagtcaaagcgatagttccttcacccaaatatggatgggagaatgtgactcgtaatagtattgtgatagttcatagtctataggatgagaaaatgttatgtaattctgaccagcagtgtggtggttggtcaccaagtagtgggagcggagatcggatctgcaaggagctgattccttctctcgcaggtgagggtgcccttgctttcttcgatggactcctcatgttattctgtaaatctcagctttgttattagcactaaatcagatgtttctttcgctacttggagtcgtgaattggtctagcagtaattttctgtaccttctcgctggggtggagcggagatcggatctgccaggagctgattccttctctcgcaggaacttgatcatgttgtgcctctgatcagagctttggctcttcttaattctcatacttcttctacctcaagttggtaggctcaagactcttgattcactaaagaatataggtgtaaacccctatcctcataagttcctggttagttttgagcctagaggaatatgaatgctggctacttactgataatgttttcttttgtgtgcaaacatgtcctctgatgcttagggttttcacaagggtaagcatgcttatgtcttcttgtttctatcttaatgaatttatttattggttaccctgtgctgattagcacttcacttcagtttagatatttatatattgtggcatttttctaggacttcggttaacatgtttagacattgttcttgtgtttcctagtgggggtgcttagatccagttgagatctatgtccgtgtattggtcgttatttgttttctctaattactcggtggctctgcataatgctgtaggatttaaaattttcaaagtatgctctctgctttaaacatgtaaaaatacactcatgttttatccacaaatttgtaccagttttgtttgattacttacttcgcttatcttgtcatgcttgtgcttgcttggcctgtgatcgcgttgttgtatattagaataatgcaaaggagatgctatgctataaactttgcctatcaatgtattcattcacaaactcgccatcattgcatacatatttggtttggagaaatcgagtgagatcctcaatccagctctaacaattctccttttattcagtcgatgcactggtcaacagtagcttggcgaaattgggctatgagtatgttattatagttctagatcatgatccatagctgaaaggtttttcatatcttctttcatatgattgttgggcaaagtctgcctgggactaccaggttagaagatcaagtttgcctatagatgcactattctaaccactaaccaccccaataattttcagcgttaatatcagtgcaagaaaaaatactctacttttattttcctcatacaggatgactagactacattttaggattgaaggtctttcactattgataaatttgcatttttattgcacagcgaaactttgttgcaaatagataaaaaccttcccatcttgcaaaagggttgaagcttggcctctacaatgacgcggggacacaaacctgcagccaaaaaatggcagtatcacttgatcatgaagaccaaatgtgaaaattttcatcttgggctaaaaaatgctagtatcacttgatcacaaagagcaagatgtggaaaaaaacatcatgggtaaatctatttatgtttatttcctgacaactgtgacaagtcaacagtgacaaaagtatctgatcgtctcttgttctaagttcctggtattgttccaactcttcttcattctatttaatatctgatcatctatttattgtacgtactgattaaaaatatgatgactataataatgctggtaggagtgtgacagagatgtaaacaagaacaatgattccctgagttgtagttggcggggtcagagtcgatgaagaatctatcatcgttaacccatgtccgccagaatgtgacattgaatggagtgactctgtgctagatgacattgatcatgtagtctcaaacatctgagacgatatccagtctatctgagttgtgttgcctgatgtgatgtaggtaatccaacttgctgcagcaggcgaggagcgagtgcccctgctagaagagtgctagctctacgcatacggtcgcttgacaaacatgtgttgttaactgttgtatacaatgttactaattattgtcctttattctcttatgctacttctgtagttgatgctcacattgttctctcatttccgtctaaattttgtatgttatgccaaaagaccatatgttttttgtagttttttttaaaaaaaactagctctctgtttttatgattgtgtcgtcgcaacgccaagccctctgccgcctccactgttcgccctgccaacctaggtatgcgaatctccaatccatgtgaggattcagagctagactagatgtagcttccggcctatatgattagttgtacttgtattgtaatcgatcagtgcaggcaccgcagatgtgctgccgtatgtggggagcagacagtcaatttacgtctaggtctaaataaaatagtagtgattaaatctttgaatctgtagatcaaaccatctcaagtaattttagttttgttatgaaaatttttagctcagatgagataattgcattttgattattaagatttaacatacatctggttctatgaggaaggaaatcataagtggagattgaagttgatcaacttgacactcgaataaaagaatcaacaagtattgcaagtgctgaaagttgtgactgctcaagtccaactgctttatcgcacaagttctggtgaagatacttattctagaatcttcaaaagcatcaacgttagtgttcaagaattcaaagagtaactgaagatggaagactaagatgacatttatggagatctatttttgtaaatgggcttagtacctgtttctgtttggtaaaggaggtaaccggtcaatcctatttactttgtgacaccacatcaatcataaaggaggtaaccgattttcttagactggcattcatatagccagcctaccacacaatccccatcctccacttcaacaaccaatttctaaatggatccatcaaccaatttctaaatcgatgatttttgattgtttgattttggtgtagactctcgatttaaacaatttcaagtgcctgtagaatgtagtttggatgtgaactgaagtagtgatagttgctactgacctgccttcataatttttgcaaatggtctgggatagttcggtgatgctgttcataatcatgtgccttcatattgaggaagcatgcaacctgatacaaaagcatagatgatgggtaagagtgtttgtgcttatgctcaaatgttagatatgcttttttcaaatatcgacagccatatggacacatatgttaatggctgccaaaaaaactttaaagtccacatgttaactataagtttagacatccgtggtaggacatttatcattttagatagctacaaacgtaacttaactttcaactacctatgtaccagacccatcacatgtctatgttatcattttattcagatcgttcatgatttatagttaacatgttgtcgtggctcaacattccatctggtccagttatggaaggtccatttgattcatgtgtgctcctagattatcatttgcacctgacagtaatatgtgtatgtactacaatgatcatcttctgttgccagtctagcgcatgttatgcttcttgatgttatgacttcacatcaatctatccacccatctactgttagtcatatgccatttttaccaccgtgaattttaccgttgcaagatcatggataagcatttgaagacccttgccccagtctacgtgggaacaaaattcgtcaagcttgatgctgaaatctaatgctccattctttgtggccaaactggcaatcaagacactgccatgtgtaatattgttcaagaagggaattgttgttgaccaattagttgggtttcaagatctcagaagtaaagaagattttctgacaatagcattggaacatattcttattctcaagacgaaagggataatcgatgagaagaagacagataacgacgatgacgatgaagaaagcgaggctaagaataggagggttaggtcctcaactgctcaagactctgactcaaactgaacctgagatgaggattgaggacgcaccgttttttgcactttggattttgtttgtttatttgtttgttctgtgtttgtgttgtattgtactgtaattgatttttgtaaccatgtatcggtaccagacaccacaacaataacatgtacaagagattctttagcatccattgtgtgtaaaagctagggtttgtggctgccttttatttcgtttttcctcagctgtcataggatggtacaccacaacaagaacatgtacaagtatgccatagcttgtctttcttgcttcttaagacattgttctgccttttggcacttatggcatatgactttttcacaaatggattacaaaacatttt

SEQ ID NO: 207065 - DNA, 4288 bp, Zea Mays
caccaaccgtgcacggttctgccatctaccccgcgatgtccgcgcctgcccccgcctcccccgtccgcaccgtgcacccgccttcgccgcccgttgccgagaaatctgcgccggtcaccgagaaatccgccctctcctagccgcccgcagatggaaaccctacgacccctccctcccctcaccgcctccccagcccgcagtctctcctcaacctccctgcctcctcataaatctccttccttccctcaatcgcacgccaggaatctcactcgaaaccctagcgcagccgaaccccactgtcgtcttcttaatcgccatcgtcttcgtcgtgttcctcccagggtcgggcatcatcgagaggcccaagctgacgctcctctcgaaccgcgtgggagagggacgcgtcagaggcaggattgaggacgacagccacgacgagcgatctgtggactatgggagcgtgccatgagatgtacccattggcttttacgccgcctgtaccaccggaggaatcgccagctgtgggctcacccacatggtcgtcacgacgctcggcctcgccaaatgcaacatgcagatatgcatggggtggtgagactcatcacagtgttgggaaaataattgacatcgagagtgatggcctgctcaccattgatattcctaattgggcaacaccatggcaggcagatccatcagacatggaaaagattgagaactctaatgtgagcaattggattagagtcaaagcgatagttccttcacccaaatatggatgggagaatgtgactcgtaatagtattgtgatagttcatagtctataggatgagaaaatgttatgtaattctgaccagcagtgtggtggttggtcaccaagtagtgggagcggagatcggatctgcaaggagctgattccttctctcgcagtaattttctgtaccttctcgctggggtggagcggagatcggatctgccaggagctgattccttctctcgcaggaacttgatcatgttgtgcctctgatcagagctttggctcttcttaattctcatacttcttctacctcaagttggtaggctcaagactcttgattcactaaagaatataggtgtaaacccctatcctcataagttcctggttagttttgagcctagaggaatatgaatgctggctacttactgataatgttttcttttgtgtgcaaacatgtcctctgatgcttagggttttcacaagggtaagcatgcttatgtcttcttgtttctatcttaatgaatttatttattggttaccctgtgctgattagcacttcacttcagtttagatatttatatattgtggcatttttctaggacttcggttaacatgtttagacattgttcttgtgtttcctagtgggggtgcttagatccagttgagatctatgtccgtgtattggtcgttatttgttttctctaattactcggtggctctgcataatgctgtaggatttaaaattttcaaagtatgctctctgctttaaacatgtaaaaatacactcatgttttatccacaaatttgtaccagttttgtttgattacttacttcgcttatcttgtcatgcttgtgcttgcttggcctgtgatcgcgttgttgtatattagaataatgcaaaggagatgctatgctataaactttgcctatcaatgtattcattcacaaactcgccatcattgcatacatatttggtttggagaaatcgagtgagatcctcaatccagctctaacaattctccttttattcagtcgatgcactggtcaacagtagcttggcgaaattgggctatgagtatgttattatagttctagatcatgatccatagctgaaaggtttttcatatcttctttcatatgattgttgggcaaagtctgcctgggactaccaggttagaagatcaagtttgcctatagatgcactattctaaccactaaccaccccaataattttcagcgttaatatcagtgcaagaaaaaatactctacttttattttcctcatacaggatgactagactacattttaggattgaaggtctttcactattgataaatttgcatttttattgcacagcgaaactttgttgcaaatagataaaaaccttcccatcttgcaaaagggttgaagcttggcctctacaatgacgcggggacacaaacctgcagccaaaaaatggcagtatcacttgatcatgaagaccaaatgtgaaaattttcatcttgggctaaaaaatgctagtatcacttgatcacaaagagcaagatgtggaaaaaaacatcatgggtaaatctatttatgtttatttcctgacaactgtgacaagtcaacagtgacaaaagtatctgatcgtctcttgttctaagttcctggagtgtgacagagatgtaaacaagaacaatgattccctgagttgtagttggcggggtcagagtcgatgaagaatctatcatcgttaacccatgtccgccagaatgtgacattgaatggagtgactctgtgctagatgacattgatcatgtagtctcaaacatctgagacgatatccagtctatctgagttgtgttgcctgatgtgatgtaggtaatccaacttgctgcagcaggcgaggagcgagtgcccctgctagaagagtgctagctctacgcatacggtcgcttgacaaacatgtgttgttaactgttgtatacaatgttactaattattgtcctttattctcttatgctacttctgtagttgatgctcacattgttctctcatttccgtctaaattttgtatgttatgccaaaagaccatatgttttttgtagttttttttaaaaaaaactagctctctgtttttatgattgtgtcgtcgcaacgccaagccctctgccgcctccactgttcgccctgccaacctaggaaatcataagtggagattgaagttgatcaacttgacactcgaataaaagaatcaacaagtattgcaagtgctgaaagttgtgactgctcaagtccaactgctttatcgcacaagttctggtgaagatacttattctagaatcttcaaaagcatcaacgttagtgttcaagaattcaaagagtaactgaagatggaagactaagatgacatttatggagatctatttttgtaaatgggcttagtacctgtttctgtttggtaaaggaggtaaccggtcaatcctatttactttgtgacaccacatcaatcataaaggaggtaaccgattttcttagactggcattcatatagccagcctaccacacaatccccatcctccacttcaacaaccaatttctaaatggatccatcaaccaatttctaaatcgatgatttttgattgtttgattttggtgtagactctcgatttaaacaatttcaagtgcctgtagaatgtagtttggatgtgaactgaagtagtgatagttgctactgacctgccttcataatttttgcaaatggtctgggatagttcggtgatgctgttcataatcatgtgccttcatattgaggaagcatgcaacctgatacaaaagcatagatgatgggatcatggataagcatttgaagacccttgccccagtctacgtgggaacaaaattcgtcaagcttgatgctgaaatctaatgctccattctttgtggccaaactggcaatcaagacactgccatgtgtaatattgttcaagaagggaattgttgttgaccaattagttgggtttcaagatctcagaagtaaagaagattttctgacaatagcattggaacatattcttattctcaagacgaaagggataatcgatgagaagaagacagataacgacgatgacgatgaagaaagcgaggctaagaataggagggttaggtcctcaactgctcaagactctgactcaaactgaacctgagatgaggattgaggacgcaccgttttttgcactttggattttgtttgtttatttgtttgttctgtgtttgtgttgtattgtactgtaattgatttttgtaaccatgtatcggtaccagacaccacaacaataacatgtacaagagattctttagcatccattgtgtgtaaaagctagggtttgtggctgccttttatttcgtttttcctcagctgtcataggatggtacaccacaacaagaacatgtacaagtatgccatagcttgtctttcttgcttcttaagacattgttctgccttttggcacttatggcatatgactttttcacaaatggattacaaaacatttt

SEQ ID NO: 207066 - DNA, 2086 bp, Zea Mays
ctgtcttgctcttgcagacatcatccaaggtcgaagatatagtcaggtttgtaaacatttgaggaatatatggacaaccaccttccgtgcgatggatgacataaaggaaactgtgcgaactgccggtgacagtttgtgccgagccgtaagctcattgacaattaggctctgtgatatatcactaacttctacttctgaggcaaacgaaacgatgaacattgtgctgccatacttgctttctgagggcatactcagtaaagtatcaagtgttcaaaaagctgctattagtttggtcatgaagcttgctaagggtgctggtcctgcccttcgtcctcatctgccagaacttgttagttgtatgcttgaatgtttgtcaagtctggaagatcaaaggttgaattatgttgagatgcatgcagggaatgctggcatcaaaacagataagcttgaaactttgcgcatagctgttgctaaagattctccaatgtgggaaactcttgatatctgtataaaagttgttgacaagaattcacttgatctattggttcctcgcctggctcaaatgattagatcagctgttggcttaaatacaagggttggtgttgctagtttcataactctattggtgcagaaggtcatggttgacatcaaaccattcgcagcagtcttaatgaagttattgcatagtgcagttctggaggaaaggagttctgccgctaaaaaggccttcgcgtcctcttgtgctactgttttgaaatacgctagtcctccccaggctcagaagcttatcgaagatactacgtctctgcattcaggtgggaaaaacgatcagttgtctggtgcaattcttattaaagcctacttgagcaatgcatcggatattcttggtggatataatgcggtggttatccctgtaatttttgtgtcgagacaccagtgctttatatgaagaactttgggaggatattcctagtagtgaaagagtaaccctaacactatatttaccagaaattgtatctcttttatgtgatggcatgtcattgtcatcatgggctggtaaaagaaagtcagccaaggctataaagaagctatgtgatgttctaggagaacccctttcagcacactaccagaatattctcaaatcacttctgaaagaattgccaggtcgattttgggagggaaaagatgctattctggatgcattggcttcattgtgtgcttgctgtcatgttgctataactgcagaagactcctgcttgccaagtgttatactaaattgtgtttgtgctgcatgcagtaggaaatcaaaattgtaccgtgaagcagctttcttgtgtttacacaaagtgattacggcattcagagatccaggatttttcaatagtgtgtttccaatgctgttcgaggtttctaaccaatctgccatctcgaagacaaagggctctgctgaactagatgaaagtgaaggtgcttctgtttctctggataaagtgctcaattgtgcaacatcttgcatcagtgttgcttttccacaggatattatcaaccaaaagaagaatgttgtagaattaatattgaattctctcttgcctgaggagagttggcaagttaaactatcatccttcttgtgtatcaaggagttgtgcctcaaatttgacaattctggtgatagtaacacatggcctcaagacacagcttacttggttgaggagctatttcatttggtatcaccgaaattagtagactccataagattagtaaagattgctcaggttcacgttgctgcatcggagtgccttcttgatttgagcaaactgtacagagacttcccgctgtcgaacagaacagaggccaagttcgaggatgaactcacagagctctgcgagtctgaaaaaagcgaacaagcaaaggcgattctgaaggaatgcctggccattcttaaagctctccctggagtaaccatgacgacggattagaaaccagaagagggaacacgcaaagttctcatggtgattgtaaactcgttccgatacatagtaaagttctcttggtgattcgaaactcattcggatgtatgcatgtggta

SEQ ID NO: 207067 - DNA, 2014 bp, Zea Mays
tgcatcctgtcttgctcttgcagacatcatccaaggtcgaagatatagtcaggtttgtaaacatttgaggaatatatggacaaccaccttccgtgcgatggatgacataaaggaaactgtgcgaactgccggtgacagtttgtgccgagccgtaagctcattgacaattaggctctgtgatatatcactaacttctacttctgaggcaaacgaaacgatgaacattgtgctgccatacttgctttctgagggcatactcagtaaagtatcaagtgttcaaaaagctgctattagtttggtcatgaagcttgctaagggtgctggtcctgcccttcgtcctcatctgccagaacttgttagttgtatgcttgaatgtttgtcaagtctggaagatcaaaggttgaattatgttgagatgcatgcagggaatgctggcatcaaaacagataagcttgaaactttgcgcatagctgttgctaaagattctccaatgtgggaaactcttgatatctgtataaaagttgttgacaagaattcacttgatctattggttcctcgcctggctcaaatgattagatcagctgttggcttaaatacaagggttggtgttgctagtttcataactctattggtgcagaaggtcatggttgacatcaaaccattcgcagcagtcttaatgaagttattgcatagtgcagttctggaggaaaggagttctgccgctaaaaaggccttcgcgtcctcttgtgctactgttttgaaatacgctagtcctccccaggctcagaagcttatcgaagatactacgtctctgcattcaggtgggaaaaacgatcagttgtctggtgcaattcttattaaagcctacttgagcaatgcatcggatattcttggtggatataatgcggtggttatccctgtaatttttgtgtcgagaaattgtatctcttttatgtgatggcatgtcattgtcatcatgggctggtaaaagaaagtcagccaaggctataaagaagctatgtgatgttctaggagaacccctttcagcacactaccagaatattctcaaatcacttctgaaagaattgccaggtcgattttgggagggaaaagatgctattctggatgcattggcttcattgtgtgcttgctgtcatgttgctataactgcagaagactcctgcttgccaagtgttatactaaattgtgtttgtgctgcatgcagtaggaaatcaaaattgtaccgtgaagcagctttcttgtgtttacacaaagtgattacggcattcagagatccaggatttttcaatagtgtgtttccaatgctgttcgaggtttctaaccaatctgccatctcgaagacaaagggctctgctgaactagatgaaagtgaaggtgcttctgtttctctggataaagtgctcaattgtgcaacatcttgcatcagtgttgcttttccacaggatattatcaaccaaaagaagaatgttgtagaattaatattgaattctctcttgcctgaggagagttggcaagttaaactatcatccttcttgtgtatcaaggagttgtgcctcaaatttgacaattctggtgatagtaacacatggcctcaagacacagcttacttggttgaggagctatttcatttggtatcaccgaaattagtagactccataagattagtaaagattgctcaggttcacgttgctgcatcggagtgccttcttgatttgagcaaactgtacagagacttcccgctgtcgaacagaacagaggccaagttcgaggatgaactcacagagctctgcgagtctgaaaaaagcgaacaagcaaaggcgattctgaaggaatgcctggccattcttaaagctctccctggagtaaccatgacgacggattagaaaccagaagagggaacacgcaaagttctcatggtgattgtaaactcgttccgatacatagtaaagttctcttggtgattcgaaactcattcggatgtatgcatgtggta

SEQ ID NO: 207068 - DNA, 2111 bp, Zea Mays
cttgcatcctgtcttgctcttgcagacatcatccaaggtcgaagatatagtcaggtttgtaaacatttgaggaatatatggacaaccaccttccgtgcgatggatgacataaaggaaactgtgcgaactgccggtgacagtttgtgccgagccgtaagctcattgacaattaggctctgtgatatatcactaacttctacttctgaggcaaacgaaacgatgaacattgtgctgccatacttgctttctgagggcatactcagtaaagtatcaagtgttcaaaaagctgctattagtttggtcatgaagcttgctaagggtgctggtcctgcccttcgtcctcatctgccagaacttgttagttgtatgcttgaatgtttgtcaagtctggaagatcaaaggttgaattatgttgagatgcatgcagggaatgctggcatcaaaacagataagcttgaaactttgcgcatagctgttgctaaagattctccaatgtgggaaactcttgatatctgtataaaagttgttgacaagaattcacttgatctattggttcctcgcctggctcaaatgattagatcagctgttggcttaaatacaagggttggtgttgctagtttcataactctattggtgcagaaggtcatggttgacatcaaaccattcgcagcagtcttaatgaagttattgcatagtgcagttctggaggaaaggagttctgccgctaaaaaggccttcgcgtcctcttgtgctactgttttgaaatacgctagtcctccccaggctcagaagcttatcgaagatactacgtctctgcattcaggtgggaaaaacgatcagttgtctggtgcaattcttattaaagcctacttgagcaatgcatcggatattcttggtggatataatgcggtggttatccctgtaatttttgtgtcgagatttgatgatgataaagacaccagtgctttatatgaagaactttgggaggatattcctagtagtgaaagagtaaccctaacactatatttaccagaaattgtatctcttttatgtgatggcatgtcattgtcatcatgggctggtaaaagaaagtcagccaaggctataaagaagctatgtgatgttctaggagaacccctttcagcacactaccagaatattctcaaatcacttctgaaagaattgccaggtcgattttgggagggaaaagatgctattctggatgcattggcttcattgtgtgcttgctgtcatgttgctataactgcagaagactcctgcttgccaagtgttatactaaattgtgtttgtgctgcatgcagtaggaaatcaaaattgtaccgtgaagcagctttcttgtgtttacacaaagtgattacggcattcagagatccaggatttttcaatagtgtgtttccaatgctgttcgaggtttctaaccaatctgccatctcgaagacaaagggctctgctgaactagatgaaagtgaaggtgcttctgtttctctggataaagtgctcaattgtgcaacatcttgcatcagtgttgcttttccacaggatattatcaaccaaaagaagaatgttgtagaattaatattgaattctctcttgcctgaggagagttggcaagttaaactatcatccttcttgtgtatcaaggagttgtgcctcaaatttgacaattctggtgatagtaacacatggcctcaagacacagcttacttggttgaggagctatttcatttggtatcaccgaaattagtagactccataagattagtaaagattgctcaggttcacgttgctgcatcggagtgccttcttgatttgagcaaactgtacagagacttcccgctgtcgaacagaacagaggccaagttcgaggatgaactcacagagctctgcgagtctgaaaaaagcgaacaagcaaaggcgattctgaaggaatgcctggccattcttaaagctctccctggagtaaccatgacgacggattagaaaccagaagagggaacacgcaaagttctcatggtgattgtaaactcgttccgatacatagtaaagttctcttggtgattcgaaactcattcggatgtatgcatgtggta

SEQ ID NO: 207069 - DNA, 5337 bp, Zea Mays
tcctcggcgtccaccgccgccgccgcggagcagacagacgcagagaggatggatgccctggatcggatgctcacgcggctggccctcgccgacgacgcgcacctcgcgccggtgctcgcccgcgtcctcccctacgccgtcacctcactggcgtcccccgcgccggccgtccgaaagctcgccagagatatcactgccaatgctggagttatggaagatctatactgaacccacttcctcaacaatggtccgaaacttttgtatcctatatattgagatggcgtttgaacgcctgccgactgaggagaaaggaaacatcgcgcctgatcttttaattaatatatcaaatattccacctcagcatcaagggatcatcttgcgacttgtaacaaaggctattggtgaatgtaacacacataaggtggatgagacgattgcatcaaaatatcgagtaataaccgaatccagtgatggtcttttatttgctgacttctgttttcacacattattgtatcaagcaccacctcaaggcagtggatgcccagcaggactgtcagttgtccaatcagaacgtgtcaccgggaaacaacccctaaaaattgacgtacttgcatcaagaaagctaggaatcttaaatgtcatcgaagctatgaacttcacacctgagattgtctaccctctttatttatctgcttcttcagatagccaagatgcagtttctaagaaaggagacgagttcttaaagcgcaaagcttcaacagtgaatttagaagatcccgaccttatcaagagactgttcacactgttcaacggcactgtgggtgcagaaaatatagctgcagagctgaaagtttctccagcacatgcttcattgcgtatgcggcttatgagtgttttctgccgatcagttgctgcagcaaatgcatttccacacacacttcaatgtatcttcggctgcatctacggaagtggaactacttcaaggctaaagcagttaggaatggagttcactgtctgggttttcaaacatgcagtaactgaccagctaaagttaatcggtccagttattcttagtggaatattgcgctcccttgatggttcttcaactgcagaaacagattctactggtagagataccaaaatatttgcatatcaggctatcggtttgcttgcatctcgcatgccaaatttattcagtgataaaactgacatggctatacgactttttactgctttgagattggaggatcaatctcttcgtttgacaattcaagaggcagctacttcccttgctacatcatataagcgtgcttccacgatagtactgaaggatcttgagtcacttcttctggaaaattgtgaagcggagcaaagtgaggttcgcttttctgctataagatgggcaacaacattgtacgatacacgacattgttcaagccggtacatttgcatgattggggcttcagatgttaaactggacataagggaaatggctctagctggtctaaatcttatgaatgatgggaggcaatcatctgcagggtctgttgatttcagctatcctgatataaaggagatgataaattatatctgttgtcagcgacctcagttgctgcattctgatgagcagacaaatggaaaattgcttttcccttcaaaaacatttgtttcaatgatcaagtttctgatgaagtgttttgagtctagtgataacttgaaacttttgcaagaagatccatctcattctgctgtagcaaaaatgtgtgtcatcttggaacatgccatgtcatatgaagggtctagtgaactgcatgcgctggccttgaagtcattggtggacctttcttctcgtgaaccaaagttggtgtcattgaggtatgcagaacgcataaattggctaagatctcttttgggtcatgttgattctgatgcccgtgaagctgtgtcacgcctgcttggtattgcttcttcagctctttcaacctcttctgcactaaatcttctgtctgagctcacttcaactctcagtcaaaaccgtccatcaagatttgaaaattaccatggtgttctttgtgcgatcgggtacctaacagctggtgctttgaagcaatcttgtataactgaggatatggtaaaaaatgtagttgatattcttgtaaaagtagttacttctgaaggttcggcattagcatctgttgcaatggaatctcttggtcacattggtctgcgttgtgcattgccttccatcaaccaaaactcttctacaggtacactattaagcgttctccgtgagaggctgactaagcttctttctgaaaatgatactaaagctcaacagaaaattcttgtatcattgggccacatatcttggaatgagatgtcctttcctcacctgaatgatgcgttagacttgatttttagtctttcacgttctaaggtagaagatgtactttttgctgcgggggaggctctatctttcatatggggagaagttcctgtgacagcagatgtgatattggagacgaactttgtttccctttcccaggccacaaactaccttactggtgatgcatctctagtctcgagtaactcctatgaaaaaagtggctgtgaagaagcacactcaattgcacgagaagaaattattaaaaagttgttcgaaacactaatttatagcagtagaaaagaagaacgctgtgcaggtactgtctggttggtgtcactgacgatgtactgtggccgacataaaaaaatcctagaactacttccacaaatccaggaagccctttcacatcttcttggtgatccaaatgagcttacacaagatttggcatctcaaggaatgagtattgtgtatgagcttggtgatgcatctatgaaagaagagctggttcatgctctagtgaacacactgactggtgctgcaagaaagaaaaaagccattaagttgatggaggattctgaggtctttcaagaaggcacaattggcaataatcctactggagggaaacttagcacgtacaaggagctgtgcagtcttgccaatgagatggggcaacctgacctgatatacaagttcatggatctagctaattatcaggctgctctcaattccaaaaggggtgctgcttttggattttccaagatagccaaacaagctggcgaggcacttcaaccttatctgaataccttaattcctaggcttgtccggtaccaacatgaccctgataaaaacatccaggcgtgttacggacgttttatgttattgggcctcccaaaggtttgtaaacatttgaggaatatatggacaaccaccttccgtgcgatggatgacataaaggaaactgtgcgaactgccggtgacagtttgtgccgagccgtaagctcattgacaattaggctctgtgatatatcactaacttctacttctgaggcaaacgaaacgatgaacattgtgctgccatacttgctttctgagggcatactcagtaaagtatcaagtgttcaaaaagctgctattagtttggtcatgaagcttgctaagggtgctggtcctgcccttcgtcctcatctgccagaacttgttagttgtatgcttgaatgtttgtcaagtctggaagatcaaaggttgaattatgttgagatgcatgcagggaatgctggcatcaaaacagataagcttgaaactttgcgcatagctgttgctaaagattctccaatgtgggaaactcttgatatctgtataaaagttgttgacaagaattcacttgatctattggttcctcgcctggctcaaatgattagatcagctgttggcttaaatacaagggttggtgttgctagtttcataactctattggtgcagaaggtcatggttgacatcaaaccattcgcagcagtcttaatgaagttattgcatagtgcagttctggaggaaaggagttctgccgctaaaaaggccttcgcgtcctcttgtgctactgttttgaaatacgctagtcctccccaggctcagaagcttatcgaagatactacgtctctgcattcaggtgggaaaaacgatcagttgtctggtgcaattcttattaaagcctacttgagcaatgcatcggatattcttggtggatataatgcggtggttatccctgtaatttttgtgtcgagatttgatgatgataaagacaccagtgctttatatgaagaactttgggaggatattcctagtagtgaaagagtaaccctaacactatatttaccagaaattgtatctcttttatgtgatggcatgtcattgtcatcatgggctggtaaaagaaagtcagccaaggctataaagaagctatgtgatgttctaggagaacccctttcagcacactaccagaatattctcaaatcacttctgaaagaattgccaggtcgattttgggagggaaaagatgctattctggatgcattggcttcattgtgtgcttgctgtcatgttgctataactgcagaagactcctgcttgccaagtgttatactaaattgtgtttgtgctgcatgcagtaggaaatcaaaattgtaccgtgaagcagctttcttgtgtttacacaaagtgattacggcattcagagatccaggatttttcaatagtgtgtttccaatgctgttcgaggtttctaaccaatctgccatctcgaagacaaagggctctgctgaactagatgaaagtgaaggtgcttctgtttctctggataaagtgctcaattgtgcaacatcttgcatcagtgttgcttttccacaggatattatcaaccaaaagaagaatgttgtagaattaatattgaattctctcttgcctgaggagagttggcaagttaaactatcatccttcttgtgtatcaaggagttgtgcctcaaatttgacaattctggtgatagtaacacatggcctcaagacacagcttacttggttgaggagctatttcatttggtatcaccgaaattagtagactccataagattagtaaagattgctcaggttcacgttgctgcatcggagtgccttcttgatttgagcaaactgtacagagacttcccgctgtcgaacagaacagaggccaagttcgaggatgaactcacagagctctgcgagtctgaaaaaagcgaacaagcaaaggcgattctgaaggaatgcctggccattcttaaagctctccctggagtaaccatgacgacggattagaaaccagaagagggaacacgcaaagttctcatggtgattgtaaactcgttccgatacatagtaaagttctcttggtgattcgaaactcattcggatgtatgcatgtggta

SEQ ID NO: 207070 - DNA, 5377 bp, Zea Mays
tcctcggcgtccaccgccgccgccgcggagcagacagacgcagagaggatggatgccctggatcggatgctcacgcggctggccctcgccgacgacgcgcacctcgcgccggtgctcgcccgcgtcctcccctacgccgtcacctcactggcgtcccccgcgccggccgtccgaaagctcgttatggaaattcttagtcacattaacaaaagggtgaaacacaggccagagatatcactgccaatgctggagttatggaagatctatactgaacccacttcctcaacaatggtccgaaacttttgtatcctatatattgagatggcgtttgaacgcctgccgactgaggagaaaggaaacatcgcgcctgatcttttaattaatatatcaaatattccacctcagcatcaagggatcatcttgcgacttgtaacaaaggctattggtgaatgtaacacacataaggtggatgagacgattgcatcaaaatatcgagtaataaccgaatccagtgatggtcttttatttgctgacttctgttttcacacattattgtatcaagcaccacctcaaggcagtggatgcccagcaggactgtcagttgtccaatcagaacgtgtcaccgggaaacaacccctaaaaattgacgtacttgcatcaagaaagctaggaatcttaaatgtcatcgaagctatgaacttcacacctgagattgtctaccctctttatttatctgcttcttcagatagccaagatgcagtttctaagaaaggagacgagttcttaaagcgcaaagcttcaacagtgaatttagaagatcccgaccttatcaagagactgttcacactgttcaacggcactgtgggtgcagaaaatatagctgcagagctgaaagtttctccagcacatgcttcattgcgtatgcggcttatgagtgttttctgccgatcagttgctgcagcaaatgcatttccacacacacttcaatgtatcttcggctgcatctacggaagtggaactacttcaaggctaaagcagttaggaatggagttcactgtctgggttttcaaacattaactgaccagctaaagttaatcggtccagttattcttagtggaatattgcgctcccttgatggttcttcaactgcagaaacagattctactggtagagataccaaaatatttgcatatcaggctatcggtttgcttgcatctcgcatgccaaatttattcagtgataaaactgacatggctatacgactttttactgctttgagattggaggatcaatctcttcgtttgacaattcaagaggcagctacttcccttgctacatcatataagcgtgcttccacgatagtactgaaggatcttgagtcacttcttctggaaaattgtgaagcggagcaaagtgaggttcgcttttctgctataagatgggcaacaacattgtacgatacacgacattgttcaagccggtacatttgcatgattggggcttcagatgttaaactggacataagggaaatggctctagctggtctaaatcttatgaatgatgggaggcaatcatctgcagggtctgttgatttcagctatcctgatataaaggagatgataaattatatctgttgtcagcgacctcagttgctgcattctgatgagcagacaaatggaaaattgcttttcccttcaaaaacatttgtttcaatgatcaagtttctgatgaagtgttttgagtctagtgataacttgaaacttttgcaagaagatccatctcattctgctgtagcaaaaatgtgtgtcatcttggaacatgccatgtcatatgaagggtctagtgaactgcatgcgctggccttgaagtcattggtggacctttcttctcgtgaaccaaagttggtgtcattgaggtatgcagaacgcataaattggctaagatctcttttgggtcatgttgattctgatgcccgtgaagctgtgtcacgcctgcttggtattgcttcttcagctctttcaacctcttctgcactaaatcttctgtctgagctcacttcaactctcagtcaaaaccgtccatcaagatttgaaaattaccatggtgttctttgtgcgatcgggtacctaacagctggtgctttgaagcaatcttgtataactgaggatatggtaaaaaatgtagttgatattcttgtaaaagtagttacttctgaaggttcggcattagcatctgttgcaatggaatctcttggtcacattggtctgcgttgtgcattgccttccatcaaccaaaactcttctacaggtacactattaagcgttctccgtgagaggctgactaagcttctttctgaaaatgatactaaagctcaacagaaaattcttgtatcattgggccacatatcttggaatgagatgtcctttcctcacctgaatgatgcgttagacttgatttttagtctttcacgttctaaggtagaagatgtactttttgctgcgggggaggctctatctttcatatggggagaagttcctgtgacagcagatgtgatattggagacgaactttgtttccctttcccaggccacaaactaccttactggtgatgcatctctagtctcgagtaactcctatgaaaaaagtggctgtgaagaagcacactcaattgcacgagaagaaattattaaaaagttgttcgaaacactaatttatagcagtagaaaagaagaacgctgtgcaggtactgtctggttggtgtcactgacgatgtactgtggccgacataaaaaaatcctagaactacttccacaaatccaggaagccctttcacatcttcttggtgatccaaatgagcttacacaagatttggcatctcaaggaatgagtattgtgtatgagcttggtgatgcatctatgaaagaagagctggttcatgctctagtgaacacactgactggtgctgcaagaaagaaaaaagccattaagttgatggaggattctgaggtctttcaagaaggcacaattggcaataatcctactggagggaaacttagcacgtacaaggagctgtgcagtcttgccaatgagatggggcaacctgacctgatatacaagttcatggatctagctaattatcaggctgctctcaattccaaaaggggtgctgcttttggattttccaagatagccaaacaagctggcgaggcacttcaaccttatctgaataccttaattcctaggcttgtccggtaccaacatgaccctgataaaaacatccaggcgtgttacggacgttttatgttattgggcctcccaaaggtttgtaaacatttgaggaatatatggacaaccaccttccgtgcgatggatgacataaaggaaactgtgcgaactgccggtgacagtttgtgccgagccgtaagctcattgacaattaggctctgtgatatatcactaacttctacttctgaggcaaacgaaacgatgaacattgtgctgccatacttgctttctgagggcatactcagtaaagtatcaagtgttcaaaaagctgctattagtttggtcatgaagcttgctaagggtgctggtcctgcccttcgtcctcatctgccagaacttgttagttgtatgcttgaatgtttgtcaagtctggaagatcaaaggttgaattatgttgagatgcatgcagggaatgctggcatcaaaacagataagcttgaaactttgcgcatagctgttgctaaagattctccaatgtgggaaactcttgatatctgtataaaagttgttgacaagaattcacttgatctattggttcctcgcctggctcaaatgattagatcagctgttggcttaaatacaagggttggtgttgctagtttcataactctattggtgcagaaggtcatggttgacatcaaaccattcgcagcagtcttaatgaagttattgcatagtgcagttctggaggaaaggagttctgccgctaaaaaggccttcgcgtcctcttgtgctactgttttgaaatacgctagtcctccccaggctcagaagcttatcgaagatactacgtctctgcattcaggtgggaaaaacgatcagttgtctggtgcaattcttattaaagcctacttgagcaatgcatcggatattcttggtggatataatgcggtggttatccctgtaatttttgtgtcgagatttgatgatgataaagacaccagtgctttatatgaagaactttgggaggatattcctagtagtgaaagagtaaccctaacactatatttaccagaaattgtatctcttttatgtgatggcatgtcattgtcatcatgggctggtaaaagaaagtcagccaaggctataaagaagctatgtgatgttctaggagaacccctttcagcacactaccagaatattctcaaatcacttctgaaagaattgccaggtcgattttgggagggaaaagatgctattctggatgcattggcttcattgtgtgcttgctgtcatgttgctataactgcagaagactcctgcttgccaagtgttatactaaattgtgtttgtgctgcatgcagtaggaaatcaaaattgtaccgtgaagcagctttcttgtgtttacacaaagtgattacggcattcagagatccaggatttttcaatagtgtgtttccaatgctgttcgaggtttctaaccaatctgccatctcgaagacaaagggctctgctgaactagatgaaagtgaaggtgcttctgtttctctggataaagtgctcaattgtgcaacatcttgcatcagtgttgcttttccacaggatattatcaaccaaaagaagaatgttgtagaattaatattgaattctctcttgcctgaggagagttggcaagttaaactatcatccttcttgtgtatcaaggagttgtgcctcaaatttgacaattctggtgatagtaacacatggcctcaagacacagcttacttggttgaggagctatttcatttggtatcaccgaaattagtagactccataagattagtaaagattgctcaggttcacgttgctgcatcggagtgccttcttgatttgagcaaactgtacagagacttcccgctgtcgaacagaacagaggccaagttcgaggatgaactcacagagctctgcgagtctgaaaaaagcgaacaagcaaaggcgattctgaaggaatgcctggccattcttaaagctctccctggagtaaccatgacgacggattagaaaccagaagagggaacacgcaaagttctcatggtgattgtaaactcgttccgatacatagtaaagttctcttggtgattcgaaactcattcggatgtatgcatgtggta

SEQ ID NO: 207071 - DNA, 3353 bp, Zea Mays
ctcggtttccaacggaagttcgctcaacggtcggagagggtcaagtcggtggatttgcaccccacggagccatggatcctgtcgagtctgtactcggggagtgtctgcatctgggattatcaagcacaggcaatggtgaaatcatttgaagtttcagaactgccagtgaggtcggcaaaatttatttcaaggaaacaatgggttgtagctggtgcagacgacatgttcattcgtgtctacaactacaataccatggacaaagtcaaagtttttgaggctcatactgattacattagatgtgttgcagtccatccaactctaccatatgtgctgtcatcatctgatgacatgttaataaaactgtgggactgggataaagggtggatgtgcactcaaatttttgagggacattcacactatgtgatgcaggttactttcaacccaaaggatattaacacttttgcaagtgcatctcttgatcgcactacaaagatatggagtttaggttctccagatccaaacttcacacttgatggacatcaaaagggtgtcaattgtgttgactacttcactggtggtgacaggccctatttgattactggttctgatgactccactgcaaaggtctgggattaccagacgaaaagctgtgttcagacacttgaagggcatacacataacatttctgctgtttgtttccatcctgagctccctataatcattactggatccgaagatggtacagttcgtatatggcattcaacaacttacagacttgagaacacactaaactatggccttgagagagtctgggctgttggatacatgaagggatcaagaaggatggtgattggttatgacgagggggccattatgataaaaatgggccgtgaagtacctatagcaagtatggataccggtgggaaaatcatttgggcgaaacataatgaaatacaaactgtaaatattaagacagtcggtgcaggctttgaggtcacagacggagagagattaccgttggctgtaaaagagttaggaagctgtgatttgtacccacagagcttgaagcataatcctaatggacggttcgttgttgtatgtggagatggtgagtacataatttatactgccctggcctggaggaataggtcatttggatctgcactggaatttgtttggtcatcagaaggagaatatgcaattagggaaagtacatcaagaataaagattttcagtaaatcatttcaggagaagaaaactatccgcccttcattttcagcagagcgtatttttggtggggtattgttggcaatgtgttctagtgatttcatctgcttttatgactgggttgattgtagactaatacgccgaatcgatgtgaatgttaagaacgtttactgggctgatagtggtgacctagttgcaatagcaagtgatacatcattctacatcctcaagtacaatagagatgttgttgcttcttatctagaaggtggaaagcctgtggatgaaggtgtcgaagatgcttttgagctgcttcacgaggtcaatgagcgagtgagaactggaatttgggttggagactgctttatctataacaactcgttgtggcgcctaaattattgtgttggtggtgaggtcactacaatgtatcatttggatcgccctatgtacctattgggatatcttgcgaaccaaagtcgagtttatcttattgacaaggagtttaatatcattgggtacacattacttctgagtttgattgagtacaagacccttgtgatgcgtggggatttggaacatgcaaatgaaattttatcatccataccaaaggcacaatacaatagtgttgctcattttttggaatctagaggtatgttggaagaggctcttgagatagccacggatgctgactacaagtttgacctagctgtgcagcttggaaaattagatgttgcaaaggctatcgtcatagaagcacagagtgaatctaaatggaagcagttgggtgaactcgccatgtccacaggcaagctagagatggcggaggaatgccttcttcaagcgaaggatttaagtggcttgttgctattgtactcatctcttggagatgctgaaggaattgaaaagcttgcttctttggcaaaagaacatggaaaaaacaatgttgctttcctctgccttttcatgcttggtaaagtggaagattgcatacagttgcttgtagacagtagccgtatacctgaagctgcactaatggcgcgatcgtatcttcctagcaaagtaccagaaatagtagcaatttggagaaacgacctcagtaaaattaatccaaaagctgcagagtctctggcagatccttctgaatatccaaatttatttgaagactggcaggttgctctaactgtagaaaaaagcgttgcttctcagagggatcattatcctcctgctgaccaatacttgaatcatgctgagaagtcaggcatgattcttgtggaagctttcaaaaggatgcaggtcattgagcatgaggaacctgaagatgcagctgaggaaaatggagaacctgatcaacaggcatcggaagagaaggaaatgcataacacagatgatgctgatgaacatgaagagacagtttcagtaaatgggaacgagggtgaggaacagcaggtgctaactgaacatgaataggggccgagggaagcacaacgcattggctgcaaatgttattttttcccgagggtaacaaatgtggcccccagttttaccctgaagcaccggaaactggtgatgcttgtggccattggaggccacctgatgcttgtccgatctttctgagtgaaccccaagcttgacatattgatgcttgctacacttttggtgtcgatatgcttcttctgccaacaacataggcaattctttcttctcggatcatctgcggacccgatttctatgcgctcgaaccaatgaactgggtggggactgtggagccattttgtgatgaatagttcgaataatcagtatagaggtacgttgtaagatatgccagattaccatagccatcgaattctcctaggagatgacagtttttgttagccattcattgtaatgatgttacttgataaggaaggttacgtgtagtatatgattgcggttgcgggccgagggttttgcccatgttatacttatatatagtggtatcaatccatcggatcggaggctctcgtctactgatgcctaatcaatgccgatgactgcgagaattcaatgcctagatatgcagtgtaacagtgtctcgctgcacacctattcatcgtttcaaaccatggtccatggaatttattttgatgctg

SEQ ID NO: 207072 - DNA, 1458 bp, Zea Mays
atcactttcacctaaaagccctaacagtgccacctctgcggcgcgacttttcgcctctacggctgttgatattcctaccctctgttccacctccaagttggctccgcagatctcccctttttaggacaaacaatccatccaccaccgccctacacaccctccttcctaaaaatagtagccggcgccatgcaaatgcgattccccacagctccccgttcctgatggagctcctccgcagatcaatggacctatgagacgacgagcgacgccagtcagcaaccaggtcgtccaggtaccgcaggaactcccagcggccacccctactagcaaccactccagtctccagctgagctgagctgagcaacaaaggttcagctccattccaacgcgcggccgctgcctcggctgccaccgccgagatcagccgccatctccaccaaaggttaatcgatggacctgcccccaaaccccgagagcccgggaggcggtggtgatggcggcggaggaggcggagccggtggatcgagcggcggggcgtcttcgtcggcgccgggcggcggcacgccgcagacgccgagccggtacgaggcgcagaacctggcgcagtgcagcggcgcgcacgtgctggagttcctgcggtacctggaccagttcggcaagaccaaggtccacacggcggcgtgccccttcttcggccacccgagcccgcccgcgccgtgcccctgcccgctgcgccaggcgtggggcagcctcgacgcgctggtgggccgcctccgcgccgccttcgaggagaacggaggccgcccggagtccaaccccttcgcggcgcgcgccgtccgcctctacctccgcgaggtccgcgagcaccaggcccgcgcgcgcggcgtcagctacgagaagaagaagcgcaagaagccgcagccagctgatcacgccagcgggagcggaggacaaggccctcaccacccgccgcctccggcaccgccgcccgccggcgcggcgtgctgaggcctgaggaacagtactacgacacacgcaccccatttggtatgccggccggactgagcatattttatgtaggtttcgatcgatttgccggtgcatgcatgcatggtttatttgctactaccgttttgctcgcgctgctggtgctgcttcttcttcgcttagactctctctaccgatcgtgtgccgtgctacattgttatttcttcttctccgtctctctctctctctctcctgctacacgcttcagttcctagctaccgcttattttcgtttcaagcagtttaatttgcttgtagaagcaaatcttatcattggatcattgaattgaagcctatatatatatgcttttcattcagtactgctcattgtagagatgaacgaagatggacttgcatacttgtgtatcggttcattgtacatacgtacgtgtcctcgattcatagtacagag

SEQ ID NO: 207073 - DNA, 1927 bp, Zea Mays
cctgcgactgcgagctgcgtagtccgtcgcctaccggctatcatcagcacgcaccgccgccgcctctcatctcatcgccgcgctgcttccccgcccgcccccggattggcgctgccgcacccagatcttccccacccaaatcgactccgccatcgtccggatccacgcagagccgtcgcggatcgacgtgctgccgccacagattgcgcgctgtcgtacggatcgagagacacccaccgcaagccttccgcgctggcgccgttcgggaagtaaggaggctacggagagggcacaagctggggggtgtcgaactccgtggagaacgcgcgggcggtggatgcctagctctggtagtctggtgggagggtgaggaaaatctagtggctgacccacgggcacggctgtcccgattcgccggccatgaagtgccgctctgattcgtcaggcggtggcgacgaccacccgggccccagcacccgctgccacgggcgtcggtggtggctcgcccgtgggcgaaccgagtaagaagcagcggacggaggagccggtcgcaagctccagcatggcgggcgagtgctcgtcttcgttcttgcaggctccaccgccgctggcggagcagttgccacaggacgcaagagtgggcgagcagccgccgccaggttcggaggccggaggtgacgagcaggccagggtgccggatctcggggaggacctggtgttcgaggtgctgatgcgagcggaggcccggacgctggcggccgcggcgtgcgtgagccgcgggtggcgactgctggcgcgggacgagcggctgtgggaggcggcgtgcgtgcgggagtgggcctacactggattctccgagcagatgcttcgcagcgtcgtgctttcgcttggcggcttccggcggctacacgagatgtacattcgtccggtccagcagcgtgctgctggagcgccgcccgggcagcagaggcggcagttgccggtgaggatgggccgtgaccaggtccaagtctcactctctctgctctcgacttcgttctttctgaagatgcctaatgctcctccacctcctcctaaggacaaggatagagatagagataagaatggaggtggccaatcatttaactcaaaaatttcccttgaaattcgagttgattctgagaagtatgaagagctgattgagttcatggagaaggtggctaagacagttgattctgaggagcactacgttctgtcaattgcttacaagattgtcatggaacccaatgtgcttcatggtgcatcatatcctccattgagtagggggaagaaggccgtgtcaacgtggactgtgtcactctcattgaggactaccataacaagattgaagttgaactcagcaagatctgtgatggaatcctcaagctccttgattcccaccgtttccgcctcattaacagctgcagagtccaaggtcttctacctcaagatgaagggtgattactacgggtaccttgcggagtttgaaactggatctaggagaaaagatgcagctagaataccatggtggcacacaaacctgctcagataatttgcttctccttcatttcacagttctcattaaattttgttggctaggacattgacctttttatacgtacaatttcattcaatgtgatgtgttgctaattcttttcctgctaaatctttcaggatattgctctggaggaattggcccccacccatcctattaggctttggctggtgctgaacttctcaactcgcctgaccatgcgtccatgcttgcagtctcgccaaataggtttgatttttgcacccattacatggactgtgtagtgttattttcttctttttttgcaatccttatgatccgaatgtgagctctgtgaaaaatatgaactaaggttattatgcatttcacagttca

SEQ ID NO: 207074 - DNA, 1810 bp, Zea Mays
cctgcgactgcgagctgcgtagtccgtcgcctaccggctatcatcagcacgcaccgccgccgcctctcatctcatcgccgcgctgcttccccgcccgcccccggattggcgctgccgcacccagatcttccccacccaaatcgactccgccatcgtccggatccacgcagagccgtcgcggatcgacgtgctgccgccacagattgcgcgctgtcgtacggatcgagagacacccaccgcaagccttccgcgctggcgccgttcgggaagtaaggaggctacggagagggcacaagctggggggtgtcgaactccgtggagaacgcgcgggcggtggatgcctagctctggtagtctggtgggagggtgaggaaaatctagtggctgacccacgggcacggctgtcccgattcgccggccatgaagtgccgctctgattcgtcaggcggtggcgacgaccacccgggccccagcacccgctgccacgggcgtcggtggtggctcgcccgtgggcgaaccgagtaagaagcagcggacggaggagccggtcgcaagctccagcatggcgggcgagtgctcgtcttcgttcttgcaggctccaccgccgctggcggagcagttgccacaggacgcaagagtgggcgagcagccgccgccaggttcggaggccggaggtgacgagcaggccagggtgccggatctcggggaggacctggtgttcgaggtgctgatgcgagcggaggcccggacgctggcggccgcggcgtgcgtgagccgcgggtggcgactgctggcgcgggacgagcggctgtgggaggcggcgtgcgtgcgggagtgggcctacactggattctccgagcagatgcttcgcagcgtcgtgctttcgcttggcggcttccggcggctacacgagatgtacattcgtccggtccagcagcgtgctgctggagcgccgcccgggcagcagaggcggcagttgccggtgaggatgggccgtgaccaggtccaagtctcactctctctgctctcgacttcgttctttctgaagatgcctaatgctcctccacctcctcctaaggacaaggatagagatagagataagaatggaggtggccaatcatttaactcaaaaatttcccttgaaattcgagttgattctgagaagtatgaagagctgattgagttcatggagaaggtggctaagacagttgattctgaggagcactacgttctgtcaattgcttacaagattgtcatggaacccaatgtgcttcatggtgcatcatatcctccattgagtagggggaagaaggccgtgtcaacgtggactgtgtcactctcattgaggactaccataacaagattgaagttgaactcagcaagatctgtgatggaatcctcaagctccttgattcccaccgtttccgcctcattaacagctgcagagtccaaggtcttctacctcaagatgaagggtgattactacggtatctttttagttgaattcatgtgtattaggtaccttgcggagtttgaaactggatctaggagaaaagatgcagctagaataccatggatattgctctggaggaattggcccccacccatcctattaggctttggctggtgctgaacttctcaactcgcctgaccatgcgtccatgcttgcagtctcgccaaataggtttgatttttgcacccattacatggactgtgtagtgttattttcttctttttttgcaatccttatgatccgaatgtgagctctgtgaaaaatatgaactaaggttattatgcatttcacagttca

SEQ ID NO: 207075 - DNA, 1113 bp, Zea Mays
ctaccggctatcatcagcacgcaccgccgccgcctctcatctcatcgccgcgctgcttccccgcccgcccccggattggcgctgccgcacccagatcttccccacccaaatcgactccgccatcgtccggatccacgcagagccgtcgcggatcgacgtgctgccgccacagattgcgcgctgtcgtacggatcgagagacacccaccgcaagccttccgcgctggcgccgttcgggaagtaaggaggctacggagagggcacaagctggggggtgtcgaactccgtggagaacgcgcgggcggtggatgcctagctctggtagtctggtgggagggtgaggaaaatctagtatgaagagctgattgagttcatggagaaggtggctaagacagttgattctgaggagcactacgttctgtcaattgcttacaagattgtcatggaacccaatgtgcttcatggtgcatcatatcctccattgagtagggggaagaaggccgtgtcaacgtggactgtgtcactctcattgaggactaccataacaagattgaagttgaactcagcaagatctgtgatggaatcctcaagctccttgattcccaccgtttccgcctcattaacagctgcagagtccaaggtcttctacctcaagatgaagggtgattactacgggtaccttgcggagtttgaaactggatctaggagaaaagatgcagctagaataccatggtggcacacaaacctgctcagataatttgcttctccttcatttcacagttctcattaaattttgttggctaggacattgacctttttatacgtacaatttcattcaatgtgatgtgttgctaattcttttcctgctaaatctttcaggatattgctctggaggaattggcccccacccatcctattaggctttggctggtgctgaacttctcaactcgcctgaccatgcgtccatgcttgcagtctcgccaaataggtttgatttttgcacccattacatggactgtgtagtgttattttcttctttttttgcaatccttatgatccgaatgtgagctctgtgaaaaatatgaactaaggttattatgcatttcacagttca

SEQ ID NO: 207076 - DNA, 1157 bp, Zea Mays
agctagatttgttgcgatgagaggctcaggtccatagaaatgtccataaattcagagaagtgcagcagtgcacacttctttcaatcaagactggtgggtgcagcgaagattgttcttactgccctcagtcatcaagatacgacactggattgaaggctcaaaaattgatgaacaaagatgctgtcttagaagcagcaaaaaaggcaaaagaggctggaagcacccgtttttgcatgggagctgcatggagagaaaccattggaaggaaaacaaacttcaaccagattcttgaatatgtcaaggaaataaggggtatgggcatggaggtctgttgcacactgggcatgatagagaaacaacaagctgaagaactcaagaaggctggacttacagcatataatcataacctagatacatcaagagagtattaccccaacattattaccacacgatcatatgatgataggctgcagactcttcagcatgtgcgtgaagctggaataagcatctgctcaggtggaatcattggtcttggtgaagcagaggaggaccgggtagggttgttgcatacacttgccaccttgcctacacacccagagagtgtccctattaatgcattggttgctgtaaaaggaacacctctcgaggaccagaagcctgtagagatatgggaaatgatccgcatgatcgccactgctcggatcgtgatgccaagggcaatggtgaggctttcagcgggccgagtacggttctccatgccagagcaagctctctgcttccttgctggggccaactccatctttgccggcgagaaacttctcacaaccgcgaacaacgactttgacgcggaccaggcgatgttcaatatccttggcttaatccccaaggccccaagctttggagaggaagaggcggcggcagcggcggtggcggctcctgtgtgcaccgagaggtctgagcaagctgcttctatgtagaatggcaaaactagaactactgttattatagtttgatttgatctggtccctctatgaggtgtgtgtgtgtgtgcagaagagaatagagcaaagtgtgtgtgtgcagaagagaattgagcaacagagacagataagattacgggagagaacgcaggactgtgagagaatattcttctacgt

SEQ ID NO: 207077 - DNA, 4652 bp, Zea Mays
ctctcttcgcctcggtgtccatctccaagcgcctcgcctctcctgtccttgtcttgcccttcgtcgcctcggcgcggccgccatccgtcgctcgggcgggggcctcggcgcgctcgtgttttacgtcacttccttctctatatactacgtttcgatttcgaggcgggtcggcttcttcttcaccggttgatttgttccgctgctttgcgcctccgtgctctcgcagatcccttggggccgtctcgcctccgcgcgacgccggcagcgagctgagtttggtttcgccgggttgctcggtttgcggtttattcttcccgcgattttagtttttgcgtcgatcctgtttcgtcctcgccttctcagcgtgtgggttgcaggattttgggtccgatccggtcttaggcgttcgtcatggcgtcgtgtggcgaggagatggaggcaggtcagtcttctgtcagatccggcggttcattggttatcgagagattagttgaagggtgtaggtttgcttatggttcattcctcgttttggttcattcctcgtttttcgttttgatgtcaccatattggtgtgaagattgccaccggacttttactataaggttgttgatccttcattggagatgctgctggctggatctgcaggggcaacaaagttttggaagtagattgaggcgttgactggactgatgttcatagtatcgggagaagatcgttcggatatatatatttacctaaatcgctcatctgttagttcatactcattttttgtccgctgcaattcttaattgcttaaattggggctggtggttttctccagcaactcgattgaatggatggatgggtcggaggcgagtttgatcctgcttctccttgtgcaatcaggagttcggaactgtttagagttccttgcgtttgttcactaaccatcctctctcctgtcttccttcaaaaattggcattataagcttgattacccttcattggaaattctgcttgctggatctgcaggggcagaagagttttggaactagattgaggcgttaactggactgatgttcatagtatcgggagaagatcgttcggatatatctacctaaatcgctcttctactattggttcatatttaatttctgtccgctgcaatttttagttaattatattggggctgatggttttctccagcaacaagattattatatggatggatggatggatggtgttcaagcgccttgcctgtcctgtcttgccctttgtcccttcgtcgcctcgggcctcggcgtgctcgcattttccattacttcgtttcgattttgagccgggtatcatcttcacctgttgttttgttccgctgctttgcgcctccgtgctcccgcagatccctttgggccgtttcgcctccgcgcgacgctgggagcgagctgagtatggtttggctgggttgttcagtttgcggtgtattcttcctgcaattctagttttcgtgttgattcggtatcgtcctcgacttctcagcgtgtgggttgcaggattgggtccgatcggtgttgtgagagttcgtcatgatggcgtgtggcgaggagatacaggcaggtcagtcttctgtcagatccgacgttaattggttttgttgattggacatggattgatgatttctcaggctcaaatgtatccgggtgtggtaccatcagaacctctcgtagcctgcacaccaactggattcggcccgttcttattttaattgctgatctcgcttgtgtcctttttggtgttagtcgtcctgacttcagaagcagaagaaagggtccagcgctggttacggagatattagttgaagggttgaggttttcttatggttcattcattgtttttcgtttgatgtcgtcatattggtgtgaagatcgcaaccggacttactataagcttgtttgcacttcattggaaatgctgctggctggatctgcgggggcaacagagttttggaagttgattgaggtgttgactggaccggtgtatcaggaaaagatcgttgggatatacataccaaaattgcttttgtattggggcaacatagttttcgaagtagattgtggcattgactggattgatgccatagaccatagtaccgggagaagattgttaggatacatctacctagtcgtaaatcgctcttctattggtttatggtttatactcattttctgccggctacaattcttaaatgttttaaattggggttggtgggtttctccagcaacttgattatatggatggatgggtgggtgggttggaggcgagttcgaccctgcttctgcttctgcaatcagaagatttgaactgttcagagttacttgtttgtgttcactaactatcctctctgccaatcttctttgaaaattggctttcctcaaaggtttcccttcgttagtaaatctgcagttttaggagacaccactagagttcgtcctcatagatacaaaaggacattgctggttatggagaggtcagttgaaggctggaggtttgactatgttcgttgtttttttatatgttatatatggctgttctgatgtcacttaatggtgggtgaagtttgccaccggactaatttgaagtttgattgcccttaattagaaaaatgtggttagctggatcaggtgatgttttggaggaatagaggtagatttaagcattttggaggtggattgaagctttgactggactccaagttcattgcatctggagaacatcgtttggctctgcctctcttttattgatgcacacaagctgagatagaatttccaacaattggtgttgtctccagagcccatccttgttccactggccatttggttcgccttggatttgaaggttcattaagtatatccttgagccaaaatagaaaaaaaaaatcatagaagagctctttggtatccagagaaaaccctccgagtagtgtgcaactgtgcattaatgtgaagtttgataacttggactgacatgttgttttcatgctctgcggtagtttgcgctaactactctgactattccagttcccttgttttgtttgagacatcttaatattcttcaatctaaccagagttcacctaaaacttttgctcatatcagccatttattttggatccagttgtctgatttaagttgatggatgtttggttggatttctgcagttggagctaaggtgcgggttgctagttagacatgagttctagacatttcccactatggagtcttccttccagtgataaataattctttgcgctaactttatttgaagctgtccttaacctatatgcctcatatgatggtgcaggttcactattattgttgatttcgggtttaaggatattctgaaaacaatggttcctaatagaagattaactatggcatgttttggtttgagtccggccattccatgatttttattagagctgatcttgtggcaattgagcatcttctgcctaggccaaattggatggattcctagttttattggcaaacataactgtggcatgttttgagtccgatcatgcaatgatttttattggagcatcttctgccaaatagatggaagactcactagttttgttggacgaaattaactggaagcttgtgatgttttacaattggcacacgttgaatgttcagtcctgtgactaaataaaatactctagatacctgctcctgctcgtactaggtttacttattgattgttgcagcgaagttatttactgttttttacgtagcgtctttgttgtagaatacttcgtttggcacaaaaaccggttacgttgtttgtttctttttataatgctgagaacatgatattttttttgttgggtattatatgtgttctgattatttgtttgtttgtttgtttgcggtttaacactgcctttgccggtcccaagcccggatgcgaaaatgtggagggaactgcaggttgcttagtcgcacaatctccttcacattttttcaagagagatctatttttctaaggctccgtttggatcattggaattgaatttcattctaataatagtaatttaggcatatcaattaagaaattttggatttatacaaaatatatttgtatactattattaacaagatataagagatatttatgtgttacatttttacaatagaggagtgagacgaagagtgtcatgtaagttaaagagtagaaacaaattttactaatacataaaaccatttcttatcctctatcccatgaatttgagatagacttatatatgaactttggaaagtggtggaatgtcagattccaaactaaataagttactttattgagtgaattctaatttctctaaaatgaagggatccaaacgccccgtaaaagaaaatgaaaactaacccttagttccactttataccatagcaatctgctggcgaagtgttcagtagcttgttctatttattcaatctgctggccacctgttcagtagatggttgaggtttagtgttgagactttattccaagacaagtgctctgccactgaatgaacgcatcataatgaacttgtccaaagtgtccggacaatcgaagcacatcctcgtcattgtccctgtcgggcgtatcatttcatcgattgaaaagtgtgaactga

SEQ ID NO: 207078 - DNA, 1795 bp, Zea Mays
ctccaccaatctcatcctcaacccggacggcggtcacggcgcacgcgagcagggttgctcacgaatcgcaggatcgcgggcagacggcggaccgaaagaagaatgtcgcacgtggccatgtctcggccgcgccccgctcctccgtcacagcctcatagtcacaggctcccagcctcccgcgtccggagtccggatccggacacgcgctcgaggccacccgcgctgtcccgcctccggcagcgatggcggccgccgcgcgccccgcgtccgcccacctcctcctcctcgccccgctcccttctcctccccgcctttcgcatctcatccacacccgcagactctacgcactcgcccccgcccgccgccctgcggccgcgcgcgcgcgccgcgaatcctctcctccctccgcgccctcccctcctgccccggctgactcgctcgattgcgtcggaactggctcggatgtcgagtgcttcgtcgacgccggcgccgaagacgccgctcccctccttcccgcgctctccgcaggcgcgtcaaaggacgatgggaagagcgagggcgacgcggcggtttcggcttcccctacggggagggagctcttggagtgggcatctctggtgtcgcccttcttcttctggggcacggctatggtggccatgaagggggtcataccccgcacgggtcccttcttcgtcgccgcgatacgcctgctccccgcgggcgcactgctagttgccttcgccgccgcgcgcggcaggaagcagccctccggctgggaggcctggctcgccatcgctgcgttcggactcatcgacgcggcctgcttccagggctttctcgcggagggactgcagaagacatcggctgggctcgggagcgtcatcattgactcgcagccattgacggttgctatccttgcatcactgctctttggagagtcgattggcgcgataggagttggaggactcgtgttgggcgtcgtggggctcttgcttctggaggttccagcactgtcagttgaaggaaatgacacaacaatctggggaagcggggaatcgttgatgttcctctcagctcaaagcatggcagtcggaactatcatggtccgctgggtgtcaaagtactctgatccaattatggcaacaggatggcacatgattattggtgggcttcctttgctagtgatatctgttcttaatcatgatcctgctctgagtggccatattcaagatcttacatggagcgacatattagcacttggttatacatctatatttggcagtgctgtcagctacggtgtatacttttacaatgctactaggggtagcttaaccacacttagttctctcactttcttgacccccatgtttgcatccgttttcgggtacctgtacctgggtgagaccttctcaacagtacagattggtggtgcgcttctcacactggttgccatctacatggttaactacaaaagcattataggtacttagggcaatatgagctactgaatgttttatagaactggtggcggattacaggactggaggattagtctagaccagaagtctagtacaggcaaaagggattctactgagttggttaggtggtctgagtaatacttctcaggtcttgaatttgaatttcagtggaagtgaatttcagtctaaggttaaaaaaaggtcactcgttggttcctttagttgtgtacacacgagatagactgatctatgtggttgaattcttgtgtaggggttgaaagggttcaaagcacgagtaaatatatagcctataggag

SEQ ID NO: 207079 - DNA, 1574 bp, Zea Mays
gatgcctccaccaatctcatcctcaacccggacggcggtcacggcgcacgcgagcagggttgctcacgaatcgcaggatcgcgggcagacggcggaccgaaagaagaatgtcgcacgtggccatgtctcggccgcgccccgctcctccgtcacagcctcatagtcacaggctcccagcctcccgcgtccggagtccggatccggacacgcgctcgaggccacccgcgctgtcccgcctccggcagcgatggcggccgccgcgcgccccgcgtccgcccacctcctcctcctcgccccgctcccttctcctccccgcctttcgcatctcatccacacccgcagactctacgcactcgcccccgcccgccgccctgcggccgcgcgcgcgcgccgcgaatcctctcctccctccgcgccctcccctcctgccccggctgactcgctcgattgcgtcggaactggctcggatgtcgagtgcttcgtcgacgccggcgccgaagacgccgctcccctccttcccgcgctctccgcaggcgcgtcaaaggacgatgggaagagcgagggcgacgcggcggtttcggcttcccctacggggagggagctcttggagtgggcatctctggtgtcgcccttcttcttctggggcacggctatggtggccatgaagggggtcataccccgcacgggtcccttcttcgtcgccgcgatacgcctgctccccgcgggcgcactgctagttgccttcgccgccgcgcgcggcaggaagcagccctccggctgggaggcctggctcgccatcgctgcgttcggactcatcgacgcggcctgcttccagggctttctcgcggagggactgcagaagacatcggctgggctcgggagcgtcatcattgactcgcagccattgacggttgctatccttgcatcactgctctttggagagtcgattggcgcgataggagttggaggactcgtgttgggcgtcgtggggctcttgcttctggaggttccagcactgtcagttgaaggaaatgacacaacaatctggggaagcggggaatcgttgatgttcctctcagctcaaagcatggcagtcggaactatcatggtccgctgggtgtcaaagtactctgatccaattatggcaacaggatggcacatgattattggtgggcttcctttgctagtgatatctgttcttaatcatgatcctgctctgagtggccatattcaagatcttacatggagcgacatattagcacttggttatacatctatatttggcagtgctgtcagctacggtgtatacttttacaatgctactaggggtagcttaaccacacttagttctctcactttcttgacccccatgtttgcatccgttttcgggtacctgtacctgggtgagaccttctcaacagtacagattggtggtgcgcttctcacactggttgccatctacatggttaactacaaaagcattataggtatccaccattactagcagtgtttcaaaggcatcacctagtcgtccatgcgtgcccagcactatgcctagtcaccttttaaacaca

SEQ ID NO: 207080 - DNA, 2526 bp, Zea Mays
gtttttttttaggaagaaagtccactttctttctttacttcaatttttgtccatcggctgtggagtgtggactagtgttgtgagtggaatatgctacatggtccttggagagaggcgggagcacccacagtggttttgcacatagatgatgccaatgttgattcagaagcaattgcaattgcgcttgcatatctttatgggcaagcccccaagcttaatgataacaatgcattccgggttcttgcagctgcatcatttctggatcttcaggacttgtgcacgatatgtacagattttattatttctgagctttggacatcgaactttttacaatatcagttgtttgctgagagtcaagattatggtagccatggagagcgtgtcaggaatgcttgctggggttatctttgtcaaagtgccacactggaattgcgagaggttctaccaaagctttcttcacagactttgcatgccctccttacatctgatgaattgtgggtacctaacgaggagaaaaggtttgaactagcattgtttactctacttgcaaaggttactacgtgtgagatacaagttagtgggaatgaaacaagcttaccaagtgctgatcgatccatgaggaaggggaaggctccaatgaacgaatctggggaggaactgttaatggactctaaactgcagaacttgaagttgcatgataactcggggaatgaaattccccataacattattgctatttcagatatgaatggtgaagctcctaagagaatggagaatgattgttctactggaggaccatctggagaaagcacttcatatcaatttaatgaaaataactggctttctagtgagcaaactgcaaataattatttctcaagaactttcagtagtggtgttgttcctactgagtggggaaggcccaatgcaccactttggggtggtagggttataggacggcggcaagttagatgcattagaggaagttcttgcctatctactgatgaatacaacacttttatgaatatatttgagaggggttctcttctctactgcaatatgtcctttgatgcgctgctaagtgtgcgaaagcaactcgaagaatttggattcccttgcaaagctgtcaatgatggtctatggctacagatgcttctgtgtcacagggtgcaagcgatagttgctgacacttgcaggaactgttgccttacgaataattcttgtgcttgcaagcaagcatatgtgagctcacatacacaccactacaggcaggaacatgaccggagcagtgtttccggcaccataggtaatgtctaccttgcggatgcccagggcgatgggaatggtgtacttgggcctgtccgtgttaacgtaagaggagcagttgatggccttgccggtattgggagagggaactcaaatgtgcctggtgcagcctgggctcctacacgttacgtcttctcacgtgtcccttacgggctcggttcaagaaatgcccagcaatttgccaatgatgaatcagaacctagaattgaccgcaatggagatatttcagcagatggtctgactgcattggttaaccttagccaagaaaacagtgctgcccatccacaggctgaaagtctatttgagacagggatgcagacaagatatcacagtgttgcatctgtttccactcccggtggttcttctgtccagatgcaggagtcaaaggagcatgactgggaaactgcagaggatgcaactatatcattagacatgaaaacacctcttagccattttcctcctttccgctttggggttgagttcgatgatgtgcacaggcttgctgatggtcatgtgaaacattcgactgaagtgttttatgcaggctctctatggaaggtgagtgtccaggcattcaatgatgaggatcctcatgggcgacgcactcttggactttttctccaccggcgcaaggctgagttgttagatcccttgaggaaggctcacttgtacgtcgacccccgggaaaaggtcactgcgcgctatcagctcatctgtccatcaaagagggaggtcatggtatttggatgcctgaagcaggctgggacgctgctgccgaaagccccaaagggctggggttggcgcactgctatactgtttgatgagcttgcagatcttctccagggtggtgccctgcgaattgctgcagtggtccagctcgtctaaacttgagttgtagaaaacaactgcttgcttgcaaggatggtgacaccacggcagtttgtgtagttggtacctgcaagaactcaatccgtcatgtattcgttctctgtaattgtgtattactgtatagtggttcgttgtttgatgctcactccgtcctaaaatatagttcttttcagcctattttttctgtctaagttcatttaaatgataataaatataaatatatatgcaaactatatttatgtattatttaatgaatgtgtaattagtctaaaaggaattatattttgtgacggaaagaatatatttatgtattat

SEQ ID NO: 207081 - DNA, 572 bp, Zea Mays
tttgaaaaaggaacggcccatgttcagggagaaggctccgactgggctaggaggcgctaggctatcgccgcggccgccgttctctcacctgctgcatcgctgcttccgcctccgccctacaaggctacaccagatgcccagattttcgtccggttcttctccggcaacgagcagccaccaggtgtcttggtatttgcaaacagtgacaaaaggttctgcttcgctgtagagtcatgtctgcaaagatacgcgtagtgatgaagtcttttatgagccaaagcaaccaggtctcagggcttatgccattcacaaagaagattggactacctgaatcacgagccctgtacaccgtgttgcggtcacctcatatcgataagaagtccagggaacaattctcgatgcatgtcaagaaacagtttgtggaacagacagccaaaccacacgaacttcacaggaagttcttctggttaaaacgcctgcggatacctggggctcagtatgaaatccaaatttctttcaagacacgtctcgatatggcgagcctaagacaaatacttggacattccccttac

SEQ ID NO: 207082 - DNA, 1747 bp, Zea Mays
aacagctaccgactgggctattatttctccccgcgtgctctctctcgccgactaggctattgccgccgccgccctacaccagatgcccagttcttcgtcagccccttctccggcaacgagcacctaacagaggctgcagtatattctgtgagaatggcatggggtcaaggtgctaagaggtccatactagggcttctctttcgttctcagcaccaaactgctcgggcatactcttcttcagcattccagactcaccaattgagcactcatgttccccaagatggagtgtttattaggagattcggctctgaggtgtcttcttcagagcaaatgaaccttattaagcaactcagacaaagaacgagtgctccaatcaaagatgtcaaggcctctctagttacctgcaactgggatattgaggctgcacagaaggacctaaggaagagaggtgttgctcttgctgccaaaaagtcttcacgcactgctgctgaaggtttgctagctatcgcacaagatgacaaaagggctgctgtagttgagcttaactgtgaaactgatttcgtagcaagaaatgatgttttccagtacctggcttcatcattggcaaagatggctttatctgctcagggtcctggtgaattgttcatgccttttggtcctgagcttttagagaacatgcctatcaatctagatcaccctaagctcagtgtggaaacaactgtccaaagtgccgttacagaagttgctgcaatggttggggagaatgtgaaactcagaagaggcttcatgctttccacaactgcacatggtgttgtttcatcttatatgcatacctgccctcagccagcttcaggtatgggtcgtatagctggattggtcacactagaaacagaagacagcagtactcttcttgattctgtcaaaagtgttgggtcatctattgcgatgcatattgttgcggcaaagccattattcttatcaaaagaactggtttctgcttcggctttagaaaatgagcgtgaaatacttcgaactcaggcccaaagttcagggaaatcccaaatggctatggataagatggtggaaggacgattgaggaagtactttgaggaagttgtgctcatggagcaaaaatatgttttaaatgacagcactaacattaagaccgtgctgaatgacttgtcgaaagaggttggttctaaggtaacaatcggtaacttcatcagaatggaggttggcgaagggattgagagaactgaagccgctgatggtttagaggttgctggtggcgctatgtagattccaggcagagatggttcgaacgagatcattaggatctatatgaaggtgtgggctaggacggagataatgtttaggcaggcactagcgttctgggacctgcgaggctgcctagttgatttgtcagttcctagcttgtttggttacagttttggttgaaccctctctgattgaattacagttcgtgtggacgtataaaaaatcgaaatagagtgggaattgccccttgaactttttgcactgagtctggagtgaattagtgttagtgcaaagtagttgttttagctgtcatttttgtattaattaaactttgctagaatgacttgtgagtttgtaggataccttttgcaggctattcacccatcttttgccatctaggtactatcgccatgctaagggtatttggtttctagggactaatatttaatttctttattttattttattt

SEQ ID NO: 207083 - DNA, 2777 bp, Zea Mays
tttggctgccactttagctgaatcttaggatggttgttaggacatttagggagaaagacattccttgtgatgttgtctggatggatattgactatatggatggttttaggtgcttcacgtttgatagtatccgattccctgatccaatatcaatggtagatgatctccattccattggttgcaaagcaatctggatgcttgacccagggatcaagaaggaggagggttactttgtttatgatagtggctcaaaaagcgatgtttggattcaaaaggcagatggcagtccattcgttggggaggtgtggcctggtgattgtgttttccctgactatacatctgaaaaaacacgagcttggtgggctagtttggtaaaggacttcatctctattggtgttgatggaatatggaatgatatgaatgaacctgctgttttcaaaactaccacgaagacaatgcctgaaagcaatattcataggggagatgctgatattggtggtgttcaaaatcattcatactatcacaatgtctacggaatgctaatggcaagatctacttataaaggaatggaaatgggcaatgcagctaaacgaccatttgttcttacacgagctggttttattggaagtcagcgttatgctgcaacatggactggtgataatctttcaaattgggagcatctgcacatgagtctaccaatggttcttcagttgggtctcagtggtcaaccattgtcaggtcctgatattggtggttttgctggaaatgctactccaaaactttttggaagatggatgggtgtgggtgcattgtttccattttcacgtggccatacagaaactggaagcattgaccacgaaccatggtcctttggtaaagagtgtgaggaagtctgtcgccttgcgctactaagacggtaccggctactgccacatatctacactcttttttaccactcacatacaaagggtattccagttgctactccagttttctttgctgatacacaagaccctgaactgaggaaagttgagacttcctttctccttggaccactcttagtttgtgcaagcactttacctaataaaggagctcatgaatatgcacataagttaccgaagggcatatggttgtcttttgattttgcggattcacaccctgatctgccggtgctgtatctacaaggtggagcaattcttcctgtaggtcttcctattaagcatgttagtgaagcaagtttggaggatgacctgtcactaattatcgcattgaatgaaaatggtaaagctgaaggtgttctctttgaagatgcaggagatggatatgcattcacacagggagactatcttttgacatattatattgctgaactccactcatcagtggttactgtcaaaatcttaaaatctgaagggtcatggaagagaccaaaacgaaatctgaaaataaatatattgcttggtggaggtgctatgataagtacagatggtgttgatggtgaagtaatacaccttacaatgccttctgaatctgtagtgtcaagcttagttgcaaccagcgaatttgagcacaagaaacgaatggagatgattcagcctatacctgatatagaagagccatcggggcaggaaggtgctgagctatcaaaaatacctgttgatttgaaaagtggagactggttccttaagattgtaccatggattggaggccgtattatatcgatggcccatattccttctgattcccagtggcttcacagcagaattgagataaatggttatgaagaatacagtggggctgaatataggtctgctggttgcacagaagagtacaaagtcatcaggaggcaccttgaacaatctggagaggaggaatctatttgtatggaaggagacattggtggtggtctggttctccagcgccagatatccattttgaaggacaacccaaagattgttcagatcgactccagcattcaggcaagaagtgtaggagctggttctggtgggttttcaaggttggtctgtttacgagttcatcctacattcaccctgctgcacccaactgaggtagtagttgctttcacggccatcaatggttcaaagcaagagatctccccggaggcaggagaaataacattcgagggagacctcaaacccaacggagaatggatgctagtggacaagtgtgtcgggctgagcttggtgaaccggtttaatcccagggaggttagcaaatgctttgtgcactggggaactggtgatgtgaacatggagctctggtcagaggaaagaccggtgtctaatgagacgccgttgaggatttgccaccagtatgaggtgcagcaaacaacctaaacacctgcccgaagagcagaaataaaaataccaatttggaggatacttcagttgcttgcacttgttttacggtctctgtattgacggtcgcgcaccataacttccatggtattttggagtcgtgtcgttagtcattaccctcttggaggactttgggtctgctgaaaacatggttactcagcaatatctgctactgttcacgactgacattcaaagggttactcagcaatatatggataaaatttgtgttaaagataagttgtgtcgtgtgggttgagttatgtgtgttgtgttgtgctgtaccttcttctatctattaatggaaagatacgtagatctcctgcgtattcgagaaaaaaaactatatggataaaattttatgaaacatcgtaagtgtgaaagaaaaaattaagaatgacg

SEQ ID NO: 207084 - DNA, 3889 bp, Zea Mays
ccctcgggatccccggtcaccaaatcagccctaaacaatcccgaatccacgcccgcacggccggccgcgctgtcctttgtacaagaggagatgggatggtcgccacggcccccgcccatcacccgcagcaccgcatcactccgcctcgtcccccacttctcgcacttccgcttcagcttccaccgtgcccaagagtcacgaggcggcggcgggtcacgccgacgtactctcaggtgctgcggtgggactgcccctgctgctgccgcgggggcggcggaggggaggatggccgcggcgacggcggcggacatggtgtgggtgagggtgcttgaggatggcgtgttccggttcgacgcgtcggaggcggcgcgcgccgccgcggggcccagcctctcgttcgcggacccgcggcggcgggaggcgccgcatgacggggccgacatgcccgccgttgtcccggtatgcgaggtcgcggcggggggatcccagaaggtcgtgataaagcttcctcctgggacatctttctatggtactggagaagcgagtggcccacttgaacggactgggaaacgagttttcacatggaatacagatgcatggggttttgggccaggaaccacttcgttgtaccagtcacacccttgggttttggctgtcctccctgatggaaaagcattgggtgtccttgctgataccactcggcgttgtgagattgatttgcgacaagaatcaactataaagttctctgccttatctgcctaccctgtcatcacttttgggccatttaatactccagctgatgtcatgacatctttgtcgcatgcaattggtactgtgtccatgccgccaaaatggtcacttggctatcatcaatgtcgttggagctatgattcttctgagaaagtactcaaggttgttaggacatttagggagaaagacattccttgtgatgttgtctggatggatattgactatatggatggttttaggtgcttcacgtttgatagtatccgattccctgatccaatatcaatggtagatgatctccattccattggttgcaaagcaatctggatgcttgacccagggatcaagaaggaggagggttactttgtttatgatagtggctcaaaaagcgatgtttggattcaaaaggcagatggcagtccattcgttggggaggtgtggcctggtgattgtgttttccctgactatacatctgaaaaaacacgagcttggtgggctagtttggtaaaggacttcatctctattggtgttgatggaatatggaatgatatgaatgaacctgctgttttcaaaactaccacgaagacaatgcctgaaagcaatattcataggggagatgctgatattggtggtgttcaaaatcattcatactatcacaatgtctacggaatgctaatggcaagatctacttataaaggaatggaaatgggcaatgcagctaaacgaccatttgttcttacacgagctggttttattggaagtcagcgttatgctgcaacatggactggtgataatctttcaaattgggagcatctgcacatgagtctaccaatggttcttcagttgggtctcagtggtcaaccattgtcaggtcctgatattggtggttttgctggaaatgctactccaaaactttttggaagatggatgggtgtgggtgcattgtttccattttcacgtggccatacagaaactggaagcattgaccacgaaccatggtcctttggtaaagagtgtgaggaagtctgtcgccttgcgctactaagacggtaccggctactgccacatatctacactcttttttaccactcacatacaaagggtattccagttgctactccagttttctttgctggtaattaattccctcaccttgtatcacccaattgtaagttggctcagatgctggtagtttgtaggaagaacacagatgtatcgcaagttgctgcctcattttttttgtgatccaagttttgtataagatatttacagccttacagagactgtctggtgaggttatataatatatgatattccccagttgcagtttgttaacaatactatcttgcattcctcaattcttttagatacacaagaccctgaactgaggaaagttgagacttcctttctccttggaccactcttagtttgtgcaagcactttacctaataaaggagctcatgaatatgcacataagttaccgaagggcatatggttgtcttttgattttgcggattcacaccctgatctgccggtgctgtatctacaaggtggagcaattcttcctgtaggtcttcctattaagcatgttagtgaagcaagtttggaggatgacctgtcactaattatcgcattgaatgaaaatggtaaagctgaaggtgttctctttgaagatgcaggagatggatatgcattcacacagggagactatcttttgacatattatattgctgaactccactcatcagtggttactgtcaaaatcttaaaatctgaagggtcatggaagagaccaaaacgaaatctgaaaataaatatattgcttggtggaggtgctatgataagtacagatggtgttgatggtgaagtaatacaccttacaatgccttctgaatctgtagtgtcaagcttagttgcaaccagcgaatttgagcacaagaaacgaatggagatgattcagcctatacctgatatagaagagccatcggggcaggaaggtgctgagctatcaaaaatacctgttgatttgaaaagtggagactggttccttaagattgtaccatggattggaggccgtattatatcgatggcccatattccttctgattcccagtggcttcacagcagaattgagataaatggttatgaagaatacagtggggctgaatataggtctgctggttgcacagaagagtacaaagtcatcaggaggcaccttgaacaatctggagaggaggaatctatttgtatggaaggagacattggtggtggtctggttctccagcgccagatatccattttgaaggacaacccaaagattgttcagatcgactccagcattcaggcaagaagtgtaggagctggttctggtgggttttcaaggttggtctgtttacgagttcatcctacattcaccctgctgcacccaactgaggtagtagttgctttcacggccatcaatggttcaaagcaagagatctccccggaggcaggagaaataacattcgagggagacctcaaacccaacggagaatggatgctagtggacaagtgtgtcgggctgagcttggtgaaccggtttaatcccagggaggttagcaaatgctttgtgcactggggaactggtgatgtgaacatggagctctggtcagaggaaagaccggtgtctaatgagacgccgttgaggatttgccaccagtatgaggtgcagcaaacaacctaaacacctgcccgaagagcagaaataaaaataccaatttggaggatacttcagttgcttgcacttgttttacggtctctgtattgacggtcgcgcaccataacttccatggtattttggagtcgtgtcgttagtcattaccctcttggaggactttgggtctgctgaaaacatggttactcagcaatatctgctactgttcacgactgacattcaaagggttactcagcaatatatggataaaatttgtgttaaagataagttgtgtcgtgtgggttgagttatgtgtgttgtgttgtgctgtaccttcttctatctattaatggaaagatacgtagatctcctgcgtattcgagaaaaaaaactatatggataaaattttatgaaacatcgtaagtgtgaaagaaaaaattaagaatgacg

SEQ ID NO: 207085 - DNA, 3561 bp, Zea Mays
ccctcgggatccccggtcaccaaatcagccctaaacaatcccgaatccacgcccgcacggccggccgcgctgtcctttgtacaagaggagatgggatggtcgccacggcccccgcccatcacccgcagcaccgcatcactccgcctcgtcccccacttctcgcacttccgcttcagcttccaccgtgcccaagagtcacgaggcggcggcgggtcacgccgacgtactctcaggtgctgcggtgggactgcccctgctgctgccgcgggggcggcggaggggaggatggccgcggcgacggcggcggacatggtgtgggtgagggtgcttgaggatggcgtgttccggttcgacgcgtcggaggcggcgcgcgccgccgcggggcccagcctctcgttcgcggacccgcggcggcgggaggcgccgcatgacggggccgacatgcccgccgttgtcccggtatgcgaggtcgcggcggggggatcccagaaggtcgtgataaagcttcctcctgggacatctttctatggtactggagaagcgagtggcccacttgaacggactgggaaacgagttttcacatggaatacagatgcatggggttttgggccaggaaccacttcgttgtaccagtcacacccttgggttttggctgtcctccctgatggaaaagcattgggtgtccttgctgataccactcggcgttgtgagattgatttgcgacaagaatcaactataaagttctctgccttatctgcctaccctgtcatcacttttgggccatttaatactccagctgatgtcatgacatctttgtcgcatgcaattggtactgtgtccatgccgccaaaatggtcacttggctatcatcaatgtcgttggagctatgattcttctgagaaagtactcaaggttgttaggacatttagggagaaagacattccttgtgatgttgtctggatggatattgactatatggatggttttaggtgcttcacgtttgatagtatccgattccctgatccaatatcaatggtagatgatctccattccattggttgcaaagcaatctggatgcttgacccagggatcaagaaggaggagggttactttgtttatgatagtggctcaaaaagcgatgtttggattcaaaaggcagatggcagtccattcgttggggaggtgtggcctggtgattgtgttttccctgactatacatctgaaaaaacacgagcttggtgggctagtttggtaaaggacttcatctctattggtgttgatggaatatggaatgatatgaatgaacctgctgttttcaaaactaccacgaagacaatgcctgaaagcaatattcataggggagatgctgatattggtggtgttcaaaatcattcatactatcacaatgtctacggaatgctaatggcaagatctacttataaaggaatggaaatgggcaatgcagctaaacgaccatttgttcttacacgagctggttttattggaagtcagcgttatgctgcaacatggactggtgataatctttcaaattgggagcatctgcacatgagtctaccaatggttcttcagttgggtctcagtggtcaaccattgtcaggtcctgatattggtggttttgctggaaatgctactccaaaactttttggaagatggatgggtgtgggtgcattgtttccattttcacgtggccatacagaaactggaagcattgaccacgaaccatggtcctttggtaaagagtgtgaggaagtctgtcgccttgcgctactaagacggtaccggctactgccacatatctacactcttttttaccactcacatacaaagggtattccagttgctactccagttttctttgctgatacacaagaccctgaactgaggaaagttgagacttcctttctccttggaccactcttagtttgtgcaagcactttacctaataaaggagctcatgaatatgcacataagttaccgaagggcatatggttgtcttttgattttgcggattcacaccctgatctgccggtgctgtatctacaaggtaaagctgaaggtgttctctttgaagatgcaggagatggatatgcattcacacagggagactatcttttgacatattatattgctgaactccactcatcagtggttactgtcaaaatcttaaaatctgaagggtcatggaagagaccaaaacgaaatctgaaaataaatatattgcttggtggaggtgctatgataagtacagatggtgttgatggtgaagtaatacaccttacaatgccttctgaatctgtagtgtcaagcttagttgcaaccagcgaatttgagcacaagaaacgaatggagatgattcagcctatacctgatatagaagagccatcggggcaggaaggtgctgagctatcaaaaatacctgttgatttgaaaagtggagactggttccttaagattgtaccatggattggaggccgtattatatcgatggcccatattccttctgattcccagtggcttcacagcagaattgagataaatggttatgaagaatacagtggggctgaatataggtctgctggttgcacagaagagtacaaagtcatcaggaggcaccttgaacaatctggagaggaggaatctatttgtatggaaggagacattggtggtggtctggttctccagcgccagatatccattttgaaggacaacccaaagattgttcagatcgactccagcattcaggcaagaagtgtaggagctggttctggtgggttttcaaggttggtctgtttacgagttcatcctacattcaccctgctgcacccaactgaggtagtagttgctttcacggccatcaatggttcaaagcaagagatctccccggaggcaggagaaataacattcgagggagacctcaaacccaacggagaatggatgctagtggacaagtgtgtcgggctgagcttggtgaaccggtttaatcccagggaggttagcaaatgctttgtgcactggggaactggtgatgtgaacatggagctctggtcagaggaaagaccggtgtctaatgagacgccgttgaggatttgccaccagtatgaggtgcagcaaacaacctaaacacctgcccgaagagcagaaataaaaataccaatttggaggatacttcagttgcttgcacttgttttacggtctctgtattgacggtcgcgcaccataacttccatggtattttggagtcgtgtcgttagtcattaccctcttggaggactttgggtctgctgaaaacatggttactcagcaatatctgctactgttcacgactgacattcaaagggttactcagcaatatatggataaaatttgtgttaaagataagttgtgtcgtgtgggttgagttatgtgtgttgtgttgtgctgtaccttcttctatctattaatggaaagatacgtagatctcctgcgtattcgagaaaaaaaactatatggataaaattttatgaaacatcgtaagtgtgaaagaaaaaattaagaatgacg

SEQ ID NO: 207086 - DNA, 3915 bp, Zea Mays
gtaaaaatgactctaccttttatatgctttttacggtaaaccgtttaaaaaaatgtttgatagagcttgagctgtagctttttttttccagataaaagcgagagccaaattccagccaaatcggtgtagaaccaaataccccctaatcaaccatggcccttcgcattaagagctaatttggtgattagggatccctaggggatccatggggaagtaattccctcgcaattcaattttgaatagcaagaggatttcttcccctcgggatccccggtcaccaaatcagccctaaacaatcccgaatccacgcccgcacggccggccgcgctgtcctttgtacaagaggagatgggatggtcgccacggcccccgcccatcacccgcagcaccgcatcactccgcctcgtcccccacttctcgcacttccgcttcagcttccaccgtgcccaagagtcacgaggcggcggcgggtcacgccgacgtactctcaggtgctgcggtgggactgcccctgctgctgccgcgggggcggcggaggggaggatggccgcggcgacggcggcggacatggtgtgggtgagggtgcttgaggatggcgtgttccggttcgacgcgtcggaggcggcgcgcgccgccgcggggcccagcctctcgttcgcggacccgcggcggcgggaggcgccgcatgacggggccgacatgcccgccgttgtcccggtatgcgaggtcgcggcggggggatcccagaaggtcgtgataaagcttcctcctgggacatctttctatggtactggagaagcgagtggcccacttgaacggactgggaaacgagttttcacatggaatacagatgcatggggttttgggccaggaaccacttcgttgtaccagtcacacccttgggttttggctgtcctccctgatggaaaagcattgggtgtccttgctgataccactcggcgttgtgagattgatttgcgacaagaatcaactataaagttctctgccttatctgcctaccctgtcatcacttttgggccatttaatactccagctgatgtcatgacatctttgtcgcatgcaattggtactgtgtccatgccgccaaaatggtcacttggctatcatcaatgtcgttggagctatgattcttctgagaaagtactcaaggttgttaggacatttagggagaaagacattccttgtgatgttgtctggatggatattgactatatggatggttttaggtgcttcacgtttgatagtatccgattccctgatccaatatcaatggtagatgatctccattccattggttgcaaagcaatctggatgcttgacccagggatcaagaaggaggagggttactttgtttatgatagtggctcaaaaagcgatgtttggattcaaaaggcagatggcagtccattcgttggggaggtgtggcctggtgattgtgttttccctgactatacatctgaaaaaacacgagcttggtgggctagtttggtaaaggacttcatctctattggtgttgatggaatatggaatgatatgaatgaacctgctgttttcaaaactaccacgaagacaatgcctgaaagcaatattcataggggagatgctgatattggtggtgttcaaaatcattcatactatcacaatgtctacggaatgctaatggcaagatctacttataaaggaatggaaatgggcaatgcagctaaacgaccatttgttcttacacgagctggttttattggaagtcagcgttatgctgcaacatggactggtgataatctttcaaattgggagcatctgcacatgagtctaccaatggttcttcagttgggtctcagtggtcaaccattgtcaggtcctgatattggtggttttgctggaaatgctactccaaaactttttggaagatggatgggtgtgggtgcattgtttccattttcacgtggccatacagaaactggaagcattgaccacgaaccatggtcctttggtaaagagtgtgaggaagtctgtcgccttgcgctactaagacggtaccggctactgccacatatctacactcttttttaccactcacatacaaagggtattccagttgctactccagttttctttgctgatacacaagaccctgaactgaggaaagttgagacttcctttctccttggaccactcttagtttgtgcaagcactttacctaataaaggagctcatgaatatgcacataagttaccgaagggcatatggttgtcttttgattttgcggattcacaccctgatctgccggtgctgtatctacaaggtggagcaattcttcctgtaggtcttcctattaagcatgttagtgaagcaagtttggaggatgacctgtcactaattatcgcattgaatgaaaatggtaaagctgaaggtgttctctttgaagatgcaggagatggatatgcattcacacagggagactatcttttgacatattatattgctgaactccactcatcagtggttactgtcaaaatcttaaaatctgaagggtcatggaagagaccaaaacgaaatctgaaaataaatatattgcttggtggaggtgctatgataagtacagatggtgttgatggtgaagtaatacaccttacaatgccttctgaatctgtagtgtcaagcttagttgcaaccagcgaatttgagcacaagaaacgaatggagatgattcagcctatacctgatatagaagagccatcggggcaggaaggtgctgagctatcaaaaatacctgttgatttgaaaagtggagactggttccttaagattgtaccatggattggaggccgtattatatcgatggcccatattccttctgattcccagtggcttcacagcagaattgagataaatggttatgaagaatacagtggggctgaatataggtctgctggttgcacagaagagtacaaagtcatcaggaggcaccttgaacaatctggagaggaggaatctatttgtatggaaggagacattggtggtggtctggttctccagcgccagatatccattttgaaggacaacccaaagattgttcagatcgactccagcattcaggcaagaagtgtaggagctggttctggtgggttttcaaggttggtctgtttacgagttcatcctacattcaccctgctgcacccaactgaggtagtagttgctttcacggccatcaatggttcaaagcaagagatctccccggaggcaggagaaataacattcgagggagacctcaaacccaacggagaatggatgctagtggacaagtgtgtcgggctgagcttggtgaaccggtttaatcccagggaggttagcaaatgctttgtgcactggggaactggtgatgtgaacatggagctctggtcagaggaaagaccggtgtctaatgagacgccgttgaggatttgccaccagtatgaggtgcagcaaacaacctaaacacctgcccgaagagcagaaataaaaataccaatttggaggatacttcagttgcttgcacttgttttacggtctctgtattgacggtcgcgcaccataacttccatggtattttggagtcgtgtcgttagtcattaccctcttggaggactttgggtctgctgaaaacatggttactcagcaatatctgctactgttcacgactgacattcaaagggttactcagcaatatatggataaaatttgtgttaaagataagttgtgtcgtgtgggttgagttatgtgtgttgtgttgtgctgtaccttcttctatctattaatggaaagatacgtagatctcctgcgtattcgagaaaaaaaactatatggataaaattttatgaaacatcgtaagtgtgaaagaaaaaattaagaatgacg

SEQ ID NO: 207087 - DNA, 3031 bp, Zea Mays
aagcatcccacatccagcaagagtccacctcactgcctccgcccgcccctccgccacggcgcccacccaccgccactcccctaaaaccctcaccaccgccacggcgccacccccgctttctagtaccattccctaagcgccgccgctcgcccgcggcggtaccccgtcctcgcgatgtcgtcgacctccggcgctctgccgcagcctcgccgcgggcgtcccggtccctggcccccggcgccgcccccgcagccgcaggcgcagccgctctcctgggctaagcgcacaggtttccagtcccgcgtctccggcgagtcactgccttcgtcttccgcccacaactccggtcaggcccccctccctcgccctgctgaggccccttccgatctggagtcgggcccgccggcccggcccagctccaccctcccggcccctccggccgccgcgggaaatggcgagcggcagcatcccccaccgccgcctcctcaggcgaggacgaggaggagggactccgatagcggaaggccgaatgggcagatagccgcgccttcgcttccgcagctacaggaggaggaggaggcgccggagcggccggctcatgtgaagtacgagctccgtgacactccaggaatatttcctctggtggtatacggattccagcattatatttccatggtcggttcaatcatcctgattcctctcgtgatggtccctgctatgggtggctcggctgatgacatggcggcagtggtatccacagtgttgctcgtcaccggggtgactacattgctgcacatgtttgttggaacgagactgccacttgtgcagggtccatcctttgtatacctggctcctgcgcttgcgatcatcaactcaccagaattatttgggatcaatgataataattttaaacacataatgaagcacctgcagggagctataataattggaggtgcattccaagtgtttttgggatacacaggcctcatgtcactatttcttaggttgataaatccagttgttgtctcgccaacagtggcagctgttgggctttcatttttcagttatggtttcacgaaaattgggacatgtatagagatgggaattctgcagttattgatggtggttatttttgcactttacctccggaaaataaagctatttgggtacagagtgtttcttatttatgcggttcctcttggattaggaatcacatgggctgttgctttcgttctcacagcaactggagtttatagctacaaaggttgtgatgcaaatattcctgcctcaaataatgtatcagccttttgtcggaagcatgtattgaggatgagatcttgccgtgtagacacttcgcatgccttaagatcttcaccctggttcagatttccctatccattgcagtggggaactccagttttttcctggaaaatgggccttgtgatgtgtgttgtatcagttattgcttctgttgattctgtaagttgatgactcctctgaagtttgatcctaactacaatattttgcacggtgtctttaagtttcataataaatttgcactgcattatgtggattggatctgccccagtagcacactaccttcatttgtaaactcctttatcaacttggcataggccttcttcttgggcacatgttttgctctgctaatggttcctggaaattagctagcttagtaacgacagtgtcttcttataattaaaagttcagaagcaaccatttgactccagtatacttattgttcaagtttgtctctcctaacaatatgtttgtgccttttcaacttaaggtcggttcctaccatgcatcgtctttgtttgtggctacccggccaccaacctctggagttgttagcagaggcattggtgttgagggtgtatctacagtcttggctggcctttgggggacaggagttggttctgcaacaataacagagaatgtacacacaattgctgtgactaaaatgggtagtcgacgagcagttggattcggtgctattttacttatactgctttctattgttggaaaagtcggtgcattcattgcttctattcctgatgttatggttgctgctctcctttgcttcatgtgggctatgctctgtgctcttggcttgtccaatcttcgttacagtgctactggaagctccagaaacagtattatagttgggctggctttattcttgtccctatcagttccttcttacttccagcagtacggtgtacatcctagcgcaaactcatcagtgccaacttactttcaaccatacgttgttgcatctcatggacctgttcacactggatcgggcggggtgaactatgtcctcaacacgatactttcactcaacatggccattgcgtttctggttgctctggtacttgacaacacagtccctggtggtcgtcaagagcggggattgtatgtatggtcagaagcagaggcagcgatgagagaatcgactttcatgaaagactatgaacttcctttcaagatcggacgcccgttcaggtgggtgaagtgtgttggtctataacacaattttgggtagtttgtagctgtggcaaactttgaagatctcaagctttcatgaatcatgactgatcgtttctcgacaaggctggtgtataggttatttagcatgtcttgattctgatgtatctaattttcagatacgtttgagactgctgtatatcatcgctgacggtcctattatttagatggttttagggatatcaatttgtacaggtccagttaaaaaaaaactgagctaccacacctgaactcatatctggtttgaagtcaatagttatcccgaaaccgcactttcataaagtacagccgtgcagaatttgcatctcatacagccgtgcagaattttcataaagtcggctttgcaaatgatcgttgtcacctctgaggctgtgacctgtcaataggaatgcaagttccagacttccaggggttttggataagttttgggtcatcaattgaagatttgctaaaataaacaaaa

SEQ ID NO: 207088 - DNA, 1341 bp, Zea Mays
cccgagttctccgatttttcaaactcccccaactgacggccacctcgaacggaaggggatcccccttaattatgagacaattattgctgaaattattttttttcggaatccaatgaggtagtatttgtgtgattgtgtccaggccctatacataagccgccatttgcagtccggacgcagccccgttcagtcccagcccaggccgacgacggcagagagcgagccgccgccgccgccgcaccctcgtgccaggttacacggtgtgaaaatgtcaggaagggctttgaaagatctcaatgtttctcagtcagcagacctggagaacggaaaagacaattctgtgaaatcctgcatcaccaagcctgtgttgaatggcaacaaatgtgccaacaaggaagaaaaggctccgtctgcttgccacgacgctgtgactaatggaaatgcggctgccattgcagatgtggagtacattgattctgaaaatctagtagatctcccagatgtcgatgcagctctaagtaccttagctaaaagattggattcaaaggactgggttatgacatgtgaagctctcaacaatgttcgtcagttggcaatgtatcacaaggaacgattgcaggagcttctggagcctctagtccctcttatcgtgaaatctgtgaagaacccaagaagtgctgtatgcaaaactgcactaatgacttgtgctgacatctttaaggcctatggtgacttaatggttcactcaatcgatccactgctgcagaggcagctcttatatcgatgacaagttggatctcccctttactactcttgccaagaatgctgccttacctcaagaacaagaatccacggatccgagcaaaagcatcagtgtgtttcagcaagagtgtaccacgccttgatgtggtgggaatcaaagaatatggtatggataagctcatccaaattgcggcaacccaacttagcgaccagcttcctgaatcaagggaggctgctcgcaacctggcactggaactgcaagcattctatgagaagtctcaggcctcaacttctgacgaacacgaggtcgaggcctctgcctcgccagatgctgaatcatgggaggctttctgccagtccaagctctccgcattaagtgcccaagccattcttcgtgtgacctctactactacaaaagacatgtccctgtgggtatgatgaatatggaaactaggaggaggattggtggagaaggcgccggatgtggatgctgaggtctgaggatgatggttcagctattgcctattgcgaactttctttgtgtccaggtgtcactggatgttagaaagcctcaaagcc

SEQ ID NO: 207089 - DNA, 1569 bp, Zea Mays
ctccgtaggagtcgcgtttcgactagagttacacggtgtgaaaatgtcaggaagggctttgaaagatctcaatgtttctcagtcagcagacctggagaacggaaaagacaattctgtgaaatcctgcatcaccaagcctgtgttgaatggcaacaaatgtgccaacaaggaagaaaaggctccgtctgcttgccacgacgctgtgactaatggaaatgcggctgccattgcagatgtggagtacattgattctgaaaatctagtagatctcccagatgtcgatgcagctctaagtaccttagctaaaagattggattcaaaggactgggttatgacatgtgaagctctcaacaatgttcgtcagttggcaatgtatcacaaggaacgattgcaggagcttctggagcctctagtccctcttatcgtgaaatctgtgaagaacccaagaagtgctgtatgcaaaactgcactaatgacttgtgctgacatctttaaggcctatggtgacttaatggttcactcaatcgatccactgctagtacaactgtttctgaaggcttcacaagataagcgttttgtctgtgaagctgcagaggcagctcttatatcgatgacaagttggatctcccctttactactcttgccaagaatgctgccttacctcaagaacaagaatccacggatccgagcaaaagcatcagtgtgtttcagcaagagtgtaccacgccttgatgtggtgggaatcaaagaatatggtatggataagctcatccaaattgcggcaacccaacttagcgaccagcttcctgaatcaagggaggctgctcgcaacctggcactggaactgcaagcattctatgagaagtctcaggcctcaacttctgacgaacacgaggtcgaggcctctgcctcgccagatgctgaatcatgggaggctttctgccagtccaagctctccgcattaagtgcccaagccattcttcgtgtgacctctactactacaaaagagtgcgtcacctctgccccaaaagaagggttggctgtgggttgctagcacaagccacaggggagatattgcgatttttcaccctgttcgctgttttgctgtacatgcttttggtttgtcctgcggtgcacccagtcgtgaaaaggttaatcattggttcaggagttcaggtgtgaccacggtgttaatattggtgtgggatatatatccattatagttggttgtacaatcatttggttccactacttggtattggagtgtagattttttttccatggttcagtgttatacacaacagtccttattttttgtttttgatgctggtcctgttattttgaaggaaatgacatattttgtgtttcggaccttgatgttgcttcctgtatccgttaatcacctgcagcatgtccctgtgggtatgatgaatatggaaactaggaggaggattggtggagaaggcgccggatgtggatgctgaggtctgaggatgatggttcagctattgcctattgcgaactttctttgtgtccaggtgtcactggatgttagaaagcctcaaagcc

SEQ ID NO: 207090 - DNA, 1114 bp, Zea Mays
aagccagacatctcatgccacgcctctctatcatcattattcaagacaccggaaatgttaccgcataattttacttaaataaatattgtgtgcctttggaaataaaggaatggttattataagaagaccgaaaacccggtccatctctgtgtggccggtatgcttttaaaaaagaactgctacaaagaattgagtgagaggaaacaatcaggcctgatttgataaacaacccccacacgtattggtgaaatgcggcagaggagagatcaggacaccgggcgtgcaaccatgcagggagcaaagacggaaggcagggcggggcgctgtagctgacattcattggagtgctccattcattgaggcagcatgcctaagataaagacaagccgtgtcaagtatcctgaaggatgggagcttattgaaccaacaatccgtgagttggatgccaaaatgagagaagctgaaaatgatccacatgatgggaagagaaagtgtgaagctctctggcctattttccgcatttctcatcaaaggagccgctacatatacgatctttactacagaaggaaggagatatcacaggagctttatgagttctgcctagaccagggttatgcagaccgtaacctgattgcaaagtggaaaaagccaggttacgagcgcctttgttgcctccggtgcatacaaacacgtgaccacaacttcgcaacgacatgcgtctgccgcgtccccaagcatctgagggaggaacaggtgatagaatgtgtccactgcggctgcaggggttgtgccagcggtgactaatcttgtcatcatgttgttgggctcacggctcatcatcgcaacgttaaccagatgaggtgccctgctgtgagcatggatccgctgcggtgattagcatgagtttattgggtaactagtggggagtactaaatttcctcacgtttggacgtttcaactgttatgtactacgctttctcgtgtctcagatgcttgcgttaaattagtggcgcttttgcattttatatgagtctgttaattggttattgttatgggttctaacaaaaaaatttctacgatttactacgtttttttttcaaaaaatcagaaaaaa

SEQ ID NO: 207091 - DNA, 885 bp, Zea Mays
ttttaattaaacttgagatactttaactctgtgaaaatgttagaacgaattataatctggaacagcgtgctgtcaccaaattgtcaaacgaacacagggcctaatgcactcgctcgactttatttgacccgaatccaacagcggcactgtttattatctgcgggtcttaattagtgtgaatatactgcacggatcggtacccgaaggtggagtcatacggcgtctgcaactggtgcctcagggcggacgggggcgtggcttctacttctaactcgccgagatccgccggcaaagcggttgtccagcgcccggctcctcacggcggtgacaaaatcggcagcggaacatcacccaaggctgccgctcgtggcgacttcgcgtcttccaacctgagcaagcctatcaagaagcagccgcagcagcatgcgcagaggctgttgctgcggcggtcggcgtcggacctcggcagtcgcgtcgttcgtaccgaccacgacgcgccgccttcgcccggcgttactacgcgtggcaggccgagggtccggaggtacaagctcctggaagaggtgatcactagctagctaactagccgtacccggggcgtgtgtgttgtgtattaggtgtaaaattaaatatacgtgcgtttaatttgtgtatatatatctacttagctacatctaggggtagacacggcatctcttgcggtgctgccatgcatgcatggagatcgagcagtgtgtacgtatgtactacgtgctgatcatctcaggcgttaattcatcaccatgcatcagggtgctcgcgtcgtgttgtacttgtacatgaggaataatgtagtgcttgctaccgcgcagttcgatcatgcgagatgtgcagctttgatcgatg

SEQ ID NO: 207092 - DNA, 4773 bp, Zea Mays
ccccactccctgcccacctccacttgctccacgtcacggcgagcgcttcccctcccccctggttatctatcgcatcctccgcggccctcctccctcccactcctgtcctctcctctcctctccccgccatttggctccgaaccctcacaacagtgcatcgtctctcctgtccccgccatttggttcggaactctcgcggcctcaactcctcctcgtcatcgtaacacccacgcttagagttcgtgagggtcgcccccaggggatctcgagacgtccgtttccaagagtggaccggctcgcaggcgctgctgttaccttgggtggagctcggacctgcggatcagttggattctcaagggagacggtggtttctgatttcctttctctaagcataccaaatcctttgtctcgagtcgggagcaactggttttgggcgtcgcggagcacatggcttaagaataatttcttccagcccggcgacaaattcgcagttggattcagcatatgcattttttatgctgacataggatgtgctcaaccatccgtggactccctctagttgcacaaaccacctcagtgctctctctttcttcgaatcgggctaataatgggcagtgcttgccaagctggcacagacgggccttcccgcaaggatgtgttagggatagggaatgccgccttagagaatggccaccatcaggctgaagctgacgcagatgaatggagggaaaaggaagaggacttggccaacaacgggcacagtgcgccaccgccaggcatgcagcaggtggatgagcataaggaggaacaaagacaaagcattcactgggagaggttcctacctgtgaagacactgagagtcttgctggtggagaatgatgactctactcgtcaggtggtcagtgccctgctccgtaagtgctgctatgaagttattcctgctgaaaatggtttgcatgcatggcgatatcttgaagatctgcagaacaacatcgaccttgtattgactgaggttttcatgccttgtctatctggtatcggtctgcttagcaaaatcacaagtcacaaaatttgcaaagacattcctgtgattatgatgtctacgaatgattctatgagtatggtgtttaagtgtttgtcgaagggagcagttgatttcttggtaaaaccactacgtaagaatgagcttaagaacctttggcagcatgtttggaggcgatgccacagttccagtggaagtgaaagtggcatccagacacagaagtgtgccaaactaaatactggcgacgagtatgagaacggcagtgacagcaatcatgatgatgaagaaaatgatgacggcgacgatgacgacttcagtgttggactcaatgctagggatggaagtgacaatggcagtggtactcaaagctcatggacaaagcgtgctgtggagattgacagcccacaacctatatctcccgatcaactagttgatccacctgatagtacatgtgcacaagtaattcaccctagatcagagatatgcagtaacaagtggttaccgacagcaaacaaaaggaatgtcaagaaacagaaggagaataaagatgaatctatgggaagatacttaggaataggtgctcctaggaactcaagtgcagaatatcaatcatctctcaatgatgtatctgttaatccaatagaaaaaggacatgagaatcacatgtccaaatgcaaatctaaaaaggaaacaatggcagaagatgattgtacaaacatgcctagtgcaacaaatgctgaaactgctgatttgattagctcaatagccagaaacacagaaggccaacaagcagtacaagccgttgacgcaccagatggcccttccaaaatggctaatggaaatgataagaatcatgattctcatatcgaagtgacaccccatgagttgggtttgaagagatcgagaacaaatggagctacagcggaaatccatgatgagcgaaatattctgaaaagatcagatcagtcagccttcaccaggtaccatacatctgtggcttccaatcaaggtggagcaagatatggggaaagctcttcaccacaagataacagttctgaggccatgaaaacggactctacatgcaagatgaagtcaaattcagatgctgctccaataaagcagggctccaatggcagtagcaataacgatgtgggatccagtacaaagaatgttgctgcaaggccttcgggtgacagggagagagtagcgtcaccattagccatcaaatctacccagcatgcctcagcatttcatactatacagaatcaaacgtcaccagctaatctgattggggaagacaaagctgatgaaggaatttccaatacagtgaaaatgagccacccaacagaggttccacaaggctgcgtccagcatcatcatcatgtgcattattacctccatgttatgacacagaaacagccatcaacagaccgtggatcatcagatgttcactgtggttcgtcaaatgtgtttgatcctcctgttgaaggacatgctgcaaactacagtgtgaatgggggtgtctcagttggtcataatgggtgcaatgggcagaatggaagtagcgctgtccccaatattgcaagaccaaacatagagagtattaatggtaccatgagccaaaatattgccggaggtggcattgtaagtgggagtgggagtggcaatgacatgtatcagaatcggttcctgcaacgagaagctgcattgaacaaattcagactgaagcggaaagatcggaactttggtaaaaaggtagcctgttttcagttacatgcctgttgtagctatgacttgaaatcagtaatagttatttgagggttgaagggccttccacttaatatataaaagtaagggtagggattcaaatggtttgcacaattataatcagaaaaaagatagaagtgattattaataatctctacctttggaggatataaaaatgcttatgctacttccagctatgccttttgtctttttttagaaaaacttccagttatgacttaattgttaatattgacaataccagtgtaggaatactgaaattagtcttgaaagtaagacattagttgctgctgtttgcgtgatggcccctagcttgaggatactttgccgctactcttgcggatgctttgccgctccatgtcatctctagcggacgctctgctgtcgtgctgctggatgtttgtctcgtctcctctcaggggatgctctgccactgcagtgtcttcgtctttattggcaacctggagttgatgtgcttttccttctgcaggttcagtcggttagattttaggtggagagtccttcttactgcattttctttctctggttctttgggtcggtttaggttgctaaccacttctgtgcttttgtaatatgggcgacggggtctctcagtagctttgtcataaaacaattctacttccccttaatatagtacatgtgactctgacatgttatcgaacaaaaaaaaacattgctcgctctaaattttatgagatctggcatgatttcaaactattcttcttttcaaaatcctgttttctgactgcagtttttacaagattttatggtcttgccgcttcatttttctgactgtttgcattggaccgataccttctgatggccttgtccgcctattttcaggttcgctaccaaagcaggaagaggcttgctgagcagcggccacgggtccgaggacagtttgtgcgacaatctgagcaagaagatcaaacagcgcaaggttcagaaagatgacacgtaatttctaatacaacgtatcatcttcttcggcagatctgagaattaggcggttcttcctattgcgcatcttcgtcgacagatctgagaattaagtggtccttcccattgctgatagtagcccactgattcccaacgttagagtacacaataaataagactctagttgtcaatttctgtggttgactgcagatgatcaccctagcgctatggagtcaacaatgtaatatttatatactatgttcgtgccttggcgccttggcggtttgcaatcttcagtttcctttctgagagattcttggccaagtgccttgaggaggagcaaactagcagcgtcgccattgctatattaatagctggaatcatgtagtagtagttcatccattcattcgaagatcgtgttccaaatcaacacaagtaggggtttgcttctcctctttccaagaaaagtggttgtagcgtgagatgcaaataggtctcttgtgctagatcaagctcaataaactttaggccgtgttaggcagctgatctacttcaccaatgtggcaaggcattcgtcgtattctgttgacagaaacaaggtgttcactgcacgggcatgccgcacgactcctcgcagatcaaaagagggaacacggcatgcttttaccaaaattattttcgaataacattgtgaggaacagacaataattaacttcccaaaacgtctcgctatactggatttttcgatgttggattcgtaatcagatccttttgacaataattttcgtacatcaggcatgtcaacagtaactgaagaatatgttagagccacatgtctcaaaagaaaaaaaaaacagagataatctcttcagtggttcagacatttcggaagagatatacgctcttcaacaaaacaaccccatgatactgtaactaatctaacacaatttttcctctttccatgtgtatatgaagttgggttcttt

SEQ ID NO: 207093 - DNA, 4715 bp, Zea Mays
cccacctccacttgctccacgtcacggcgagcgcttcccctcccccctggttatctatcgcatcctccgcggccctcctccctcccactcctgtcctctcctctcctctccccgccatttggctccgaaccctcacaacagtgcatcgtctctcctgtccccgccatttggttcggaactctcgcggcctcaactcctcctcgtcatcgtaacacccacgcttagagttcgtgagggtcgcccccaggggatctcgagacgtccgtttccaagagtggaccggctcgcaggcgctgctgttaccttgggtggagctcggacctgcggatcagttggattctcaagggagacggagtcgggagcaactggttttgggcgtcgcggagcacatggcttaagaataatttcttccagcccggcgacaaattcgcagttggattcagcatatgcattttttatgctgacataggatgtgctcaaccatccgtggactccctctagttgcacaaaccacctcagtgctctctctttcttcgaatcgggctaataatgggcagtgcttgccaagctggcacagacgggccttcccgcaaggatgtgttagggatagggaatgccgccttagagaatggccaccatcaggctgaagctgacgcagatgaatggagggaaaaggaagaggacttggccaacaacgggcacagtgcgccaccgccaggcatgcagcaggtggatgagcataaggaggaacaaagacaaagcattcactgggagaggttcctacctgtgaagacactgagagtcttgctggtggagaatgatgactctactcgtcaggtggtcagtgccctgctccgtaagtgctgctatgaagttattcctgctgaaaatggtttgcatgcatggcgatatcttgaagatctgcagaacaacatcgaccttgtattgactgaggttttcatgccttgtctatctggtatcggtctgcttagcaaaatcacaagtcacaaaatttgcaaagacattcctgtgattatgatgtctacgaatgattctatgagtatggtgtttaagtgtttgtcgaagggagcagttgatttcttggtaaaaccactacgtaagaatgagcttaagaacctttggcagcatgtttggaggcgatgccacagttccagtggaagtgaaagtggcatccagacacagaagtgtgccaaactaaatactggcgacgagtatgagaacggcagtgacagcaatcatgatgatgaagaaaatgatgacggcgacgatgacgacttcagtgttggactcaatgctagggatggaagtgacaatggcagtggtactcaaagctcatggacaaagcgtgctgtggagattgacagcccacaacctatatctcccgatcaactagttgatccacctgatagtacatgtgcacaagtaattcaccctagatcagagatatgcagtaacaagtggttaccgacagcaaacaaaaggaatgtcaagaaacagaaggagaataaagatgaatctatgggaagatacttaggaataggtgctcctaggaactcaagtgcagaatatcaatcatctctcaatgatgtatctgttaatccaatagaaaaaggacatgagaatcacatgtccaaatgcaaatctaaaaaggaaacaatggcagaagatgattgtacaaacatgcctagtgcaacaaatgctgaaactgctgatttgattagctcaatagccagaaacacagaaggccaacaagcagtacaagccgttgacgcaccagatggcccttccaaaatggctaatggaaatgataagaatcatgattctcatatcgaagtgacaccccatgagttgggtttgaagagatcgagaacaaatggagctacagcggaaatccatgatgagcgaaatattctgaaaagatcagatcagtcagccttcaccaggtaccatacatctgtggcttccaatcaaggtggagcaagatatggggaaagctcttcaccacaagataacagttctgaggccatgaaaacggactctacatgcaagatgaagtcaaattcagatgctgctccaataaagcagggctccaatggcagtagcaataacgatgtgggatccagtacaaagaatgttgctgcaaggccttcgggtgacagggagagagtagcgtcaccattagccatcaaatctacccagcatgcctcagcatttcatactatacagaatcaaacgtcaccagctaatctgattggggaagacaaagctgatgaaggaatttccaatacagtgaaaatgagccacccaacagaggttccacaaggctgcgtccagcatcatcatcatgtgcattattacctccatgttatgacacagaaacagccatcaacagaccgtggatcatcagatgttcactgtggttcgtcaaatgtgtttgatcctcctgttgaaggacatgctgcaaactacagtgtgaatgggggtgtctcagttggtcataatgggtgcaatgggcagaatggaagtagcgctgtccccaatattgcaagaccaaacatagagagtattaatggtaccatgagccaaaatattgccggaggtggcattgtaagtgggagtgggagtggcaatgacatgtatcagaatcggttcctgcaacgagaagctgcattgaacaaattcagactgaagcggaaagatcggaactttggtaaaaaggtagcctgttttcagttacatgcctgttgtagctatgacttgaaatcagtaatagttatttgagggttgaagggccttccacttaatatataaaagtaagggtagggattcaaatggtttgcacaattataatcagaaaaaagatagaagtgattattaataatctctacctttggaggatataaaaatgcttatgctacttccagctatgccttttgtctttttttagaaaaacttccagttatgacttaattgttaatattgacaataccagtgtaggaatactgaaattagtcttgaaagtaagacattagttgctgctgtttgcgtgatggcccctagcttgaggatactttgccgctactcttgcggatgctttgccgctccatgtcatctctagcggacgctctgctgtcgtgctgctggatgtttgtctcgtctcctctcaggggatgctctgccactgcagtgtcttcgtctttattggcaacctggagttgatgtgcttttccttctgcaggttcagtcggttagattttaggtggagagtccttcttactgcattttctttctctggttctttgggtcggtttaggttgctaaccacttctgtgcttttgtaatatgggcgacggggtctctcagtagctttgtcataaaacaattctacttccccttaatatagtacatgtgactctgacatgttatcgaacaaaaaaaaacattgctcgctctaaattttatgagatctggcatgatttcaaactattcttcttttcaaaatcctgttttctgactgcagtttttacaagattttatggtcttgccgcttcatttttctgactgtttgcattggaccgataccttctgatggccttgtccgcctattttcaggttcgctaccaaagcaggaagaggcttgctgagcagcggccacgggtccgaggacagtttgtgcgacaatctgagcaagaagatcaaacagcgcaaggttcagaaagatgacacgtaatttctaatacaacgtatcatcttcttcggcagatctgagaattaggcggttcttcctattgcgcatcttcgtcgacagatctgagaattaagtggtccttcccattgctgatagtagcccactgattcccaacgttagagtacacaataaataagactctagttgtcaatttctgtggttgactgcagatgatcaccctagcgctatggagtcaacaatgtaatatttatatactatgttcgtgccttggcgccttggcggtttgcaatcttcagtttcctttctgagagattcttggccaagtgccttgaggaggagcaaactagcagcgtcgccattgctatattaatagctggaatcatgtagtagtagttcatccattcattcgaagatcgtgttccaaatcaacacaagtaggggtttgcttctcctctttccaagaaaagtggttgtagcgtgagatgcaaataggtctcttgtgctagatcaagctcaataaactttaggccgtgttaggcagctgatctacttcaccaatgtggcaaggcattcgtcgtattctgttgacagaaacaaggtgttcactgcacgggcatgccgcacgactcctcgcagatcaaaagagggaacacggcatgcttttaccaaaattattttcgaataacattgtgaggaacagacaataattaacttcccaaaacgtctcgctatactggatttttcgatgttggattcgtaatcagatccttttgacaataattttcgtacatcaggcatgtcaacagtaactgaagaatatgttagagccacatgtctcaaaagaaaaaaaaaacagagataatctcttcagtggttcagacatttcggaagagatatacgctcttcaacaaaacaaccccatgatactgtaactaatctaacacaatttttcctctttccatgtgtatatgaagttgggttcttt

SEQ ID NO: 207094 - DNA, 4685 bp, Zea Mays
cgcatcctccgcggccctcctccctcccactcctgtcctctcctctcctctccccgccatttggctccgaaccctcacaacagtgcatcgtctctcctgtccccgccatttggttcggaactctcgcggcctcaactcctcctcgtcatcgtaacacccacgcttagagttcgtgagggtcgcccccaggggatctcgagacgtccgtttccaagagtggaccggctcgcaggcgctgctgttaccttgggtggagctcggacctgcggatcagttggattctcaagggagacggtggtttctgatttcctttctctaagcataccaaatcctttgtctcgagtcgggagcaactggttttgggcgtcgcggagcacatggcttaagaataatttcttccagcccggcgacaaattcgcagttggattcagcatatgcattttttatgctgacataggatgtgctcaaccatccgtggactccctctagttgcacaaaccacctcagtgctctctctttcttcgaatcgggctaataatgggcagtgcttgccaagctggcacagacgggccttcccgcaaggatgtgttagggatagggaatgccgccttagagaatggccaccatcaggctgaagctgacgcagatgaatggagggaaaaggaagaggacttggccaacaacgggcacagtgcgccaccgccaggcatgcagcaggtggatgagcataaggaggaacaaagacaaagcattcactgggagaggttcctacctgtgaagacactgagagtcttgctggtggagaatgatgactctactcgtcaggtggtcagtgccctgctccttattcctgctgaaaatggtttgcatgcatggcgatatcttgaagatctgcagaacaacatcgaccttgtattgactgaggttttcatgccttgtctatctggtatcggtctgcttagcaaaatcacaagtcacaaaatttgcaaagacattcctgtgattatgatgtctacgaatgattctatgagtatggtgtttaagtgtttgtcgaagggagcagttgatttcttggtaaaaccactacgtaagaatgagcttaagaacctttggcagcatgtttggaggcgatgccacagttccagtggaagtgaaagtggcatccagacacagaagtgtgccaaactaaatactggcgacgagtatgagaacggcagtgacagcaatcatgatgatgaagaaaatgatgacggcgacgatgacgacttcagtgttggactcaatgctagggatggaagtgacaatggcagtggtactcaaagctcatggacaaagcgtgctgtggagattgacagcccacaacctatatctcccgatcaactagttgatccacctgatagtacatgtgcacaagtaattcaccctagatcagagatatgcagtaacaagtggttaccgacagcaaacaaaaggaatgtcaagaaacagaaggagaataaagatgaatctatgggaagatacttaggaataggtgctcctaggaactcaagtgcagaatatcaatcatctctcaatgatgtatctgttaatccaatagaaaaaggacatgagaatcacatgtccaaatgcaaatctaaaaaggaaacaatggcagaagatgattgtacaaacatgcctagtgcaacaaatgctgaaactgctgatttgattagctcaatagccagaaacacagaaggccaacaagcagtacaagccgttgacgcaccagatggcccttccaaaatggctaatggaaatgataagaatcatgattctcatatcgaagtgacaccccatgagttgggtttgaagagatcgagaacaaatggagctacagcggaaatccatgatgagcgaaatattctgaaaagatcagatcagtcagccttcaccaggtaccatacatctgtggcttccaatcaaggtggagcaagatatggggaaagctcttcaccacaagataacagttctgaggccatgaaaacggactctacatgcaagatgaagtcaaattcagatgctgctccaataaagcagggctccaatggcagtagcaataacgatgtgggatccagtacaaagaatgttgctgcaaggccttcgggtgacagggagagagtagcgtcaccattagccatcaaatctacccagcatgcctcagcatttcatactatacagaatcaaacgtcaccagctaatctgattggggaagacaaagctgatgaaggaatttccaatacagtgaaaatgagccacccaacagaggttccacaaggctgcgtccagcatcatcatcatgtgcattattacctccatgttatgacacagaaacagccatcaacagaccgtggatcatcagatgttcactgtggttcgtcaaatgtgtttgatcctcctgttgaaggacatgctgcaaactacagtgtgaatgggggtgtctcagttggtcataatgggtgcaatgggcagaatggaagtagcgctgtccccaatattgcaagaccaaacatagagagtattaatggtaccatgagccaaaatattgccggaggtggcattgtaagtgggagtgggagtggcaatgacatgtatcagaatcggttcctgcaacgagaagctgcattgaacaaattcagactgaagcggaaagatcggaactttggtaaaaaggtagcctgttttcagttacatgcctgttgtagctatgacttgaaatcagtaatagttatttgagggttgaagggccttccacttaatatataaaagtaagggtagggattcaaatggtttgcacaattataatcagaaaaaagatagaagtgattattaataatctctacctttggaggatataaaaatgcttatgctacttccagctatgccttttgtctttttttagaaaaacttccagttatgacttaattgttaatattgacaataccagtgtaggaatactgaaattagtcttgaaagtaagacattagttgctgctgtttgcgtgatggcccctagcttgaggatactttgccgctactcttgcggatgctttgccgctccatgtcatctctagcggacgctctgctgtcgtgctgctggatgtttgtctcgtctcctctcaggggatgctctgccactgcagtgtcttcgtctttattggcaacctggagttgatgtgcttttccttctgcaggttcagtcggttagattttaggtggagagtccttcttactgcattttctttctctggttctttgggtcggtttaggttgctaaccacttctgtgcttttgtaatatgggcgacggggtctctcagtagctttgtcataaaacaattctacttccccttaatatagtacatgtgactctgacatgttatcgaacaaaaaaaaacattgctcgctctaaattttatgagatctggcatgatttcaaactattcttcttttcaaaatcctgttttctgactgcagtttttacaagattttatggtcttgccgcttcatttttctgactgtttgcattggaccgataccttctgatggccttgtccgcctattttcaggttcgctaccaaagcaggaagaggcttgctgagcagcggccacgggtccgaggacagtttgtgcgacaatctgagcaagaagatcaaacagcgcaaggttcagaaagatgacacgtaatttctaatacaacgtatcatcttcttcggcagatctgagaattaggcggttcttcctattgcgcatcttcgtcgacagatctgagaattaagtggtccttcccattgctgatagtagcccactgattcccaacgttagagtacacaataaataagactctagttgtcaatttctgtggttgactgcagatgatcaccctagcgctatggagtcaacaatgtaatatttatatactatgttcgtgccttggcgccttggcggtttgcaatcttcagtttcctttctgagagattcttggccaagtgccttgaggaggagcaaactagcagcgtcgccattgctatattaatagctggaatcatgtagtagtagttcatccattcattcgaagatcgtgttccaaatcaacacaagtaggggtttgcttctcctctttccaagaaaagtggttgtagcgtgagatgcaaataggtctcttgtgctagatcaagctcaataaactttaggccgtgttaggcagctgatctacttcaccaatgtggcaaggcattcgtcgtattctgttgacagaaacaaggtgttcactgcacgggcatgccgcacgactcctcgcagatcaaaagagggaacacggcatgcttttaccaaaattattttcgaataacattgtgaggaacagacaataattaacttcccaaaacgtctcgctatactggatttttcgatgttggattcgtaatcagatccttttgacaataattttcgtacatcaggcatgtcaacagtaactgaagaatatgttagagccacatgtctcaaaagaaaaaaaaaacagagataatctcttcagtggttcagacatttcggaagagatatacgctcttcaacaaaacaaccccatgatactgtaactaatctaacacaatttttcctctttccatgtgtatatgaagttgggttcttt

SEQ ID NO: 207095 - DNA, 4672 bp, Zea Mays
ccactcctgtcctctcctctcctctccccgccatttggctccgaaccctcacaacagtgcatcgtctctcctgtccccgccatttggttcggaactctcgcggcctcaactcctcctcgtcatcgtaacacccacgcttagagttcgtgagggtcgcccccaggggatctcgagacgtccgtttccaagagtggaccggctcgcaggcgctgctgttaccttgggtggagctcggacctgcggatcagttggattctcaagggagacggtggtttctgatttcctttctctaagcataccaaatcctttgtctcgagtcgggagcaactggttttgggcgtcgcggagcacatggcttaagaataatttcttccagcccggcgacaaattcgcagttggattcagcatatgcattttttatgctgacataggatgtgctcaaccatccgtggactccctctagttgcacaaaccacctcagtgctctctctttcttcgaatcgggctaataatgggcagtgcttgccaagctggcacagacgggccttcccgcaaggatgtgttagggatagggaatgccgccttagagaatggccaccatcaggctgaagctgacgcagatgaatggagggaaaaggaagaggacttggccaacaacgggcacagtgcgccaccgccaggcatgcagcaggtggatgagcataaggaggaacaaagacaaagcattcactgggagaggttcctacctgtgaagacactgagagtcttgctggtggagaatgatgactctactcgtcaggtggtcagtgccctgctccgtaagtgctgctatgaagttattcctgctgaaaatggtttgcatgcatggcgatatcttgaagatctgcagaacaacatcgaccttgtattgactgaggttttcatgccttgtctatctggtatcggtctgcttagcaaaatcacaagtcacaaaatttgcaaagacattcctgtgattatgatgtctacgaatgattctatgagtatggtgtttaagtgtttgtcgaagggagcagttgatttcttggtaaaaccactacgtaagaatgagcttaagaacctttggcagcatgtttggaggcgatgccacagttggaagtgaaagtggcatccagacacagaagtgtgccaaactaaatactggcgacgagtatgagaacggcagtgacagcaatcatgatgatgaagaaaatgatgacggcgacgatgacgacttcagtgttggactcaatgctagggatggaagtgacaatggcagtggtactcaaagctcatggacaaagcgtgctgtggagattgacagcccacaacctatatctcccgatcaactagttgatccacctgatagtacatgtgcacaagtaattcaccctagatcagagatatgcagtaacaagtggttaccgacagcaaacaaaaggaatgtcaagaaacagaaggagaataaagatgaatctatgggaagatacttaggaataggtgctcctaggaactcaagtgcagaatatcaatcatctctcaatgatgtatctgttaatccaatagaaaaaggacatgagaatcacatgtccaaatgcaaatctaaaaaggaaacaatggcagaagatgattgtacaaacatgcctagtgcaacaaatgctgaaactgctgatttgattagctcaatagccagaaacacagaaggccaacaagcagtacaagccgttgacgcaccagatggcccttccaaaatggctaatggaaatgataagaatcatgattctcatatcgaagtgacaccccatgagttgggtttgaagagatcgagaacaaatggagctacagcggaaatccatgatgagcgaaatattctgaaaagatcagatcagtcagccttcaccaggtaccatacatctgtggcttccaatcaaggtggagcaagatatggggaaagctcttcaccacaagataacagttctgaggccatgaaaacggactctacatgcaagatgaagtcaaattcagatgctgctccaataaagcagggctccaatggcagtagcaataacgatgtgggatccagtacaaagaatgttgctgcaaggccttcgggtgacagggagagagtagcgtcaccattagccatcaaatctacccagcatgcctcagcatttcatactatacagaatcaaacgtcaccagctaatctgattggggaagacaaagctgatgaaggaatttccaatacagtgaaaatgagccacccaacagaggttccacaaggctgcgtccagcatcatcatcatgtgcattattacctccatgttatgacacagaaacagccatcaacagaccgtggatcatcagatgttcactgtggttcgtcaaatgtgtttgatcctcctgttgaaggacatgctgcaaactacagtgtgaatgggggtgtctcagttggtcataatgggtgcaatgggcagaatggaagtagcgctgtccccaatattgcaagaccaaacatagagagtattaatggtaccatgagccaaaatattgccggaggtggcattgtaagtgggagtgggagtggcaatgacatgtatcagaatcggttcctgcaacgagaagctgcattgaacaaattcagactgaagcggaaagatcggaactttggtaaaaaggtagcctgttttcagttacatgcctgttgtagctatgacttgaaatcagtaatagttatttgagggttgaagggccttccacttaatatataaaagtaagggtagggattcaaatggtttgcacaattataatcagaaaaaagatagaagtgattattaataatctctacctttggaggatataaaaatgcttatgctacttccagctatgccttttgtctttttttagaaaaacttccagttatgacttaattgttaatattgacaataccagtgtaggaatactgaaattagtcttgaaagtaagacattagttgctgctgtttgcgtgatggcccctagcttgaggatactttgccgctactcttgcggatgctttgccgctccatgtcatctctagcggacgctctgctgtcgtgctgctggatgtttgtctcgtctcctctcaggggatgctctgccactgcagtgtcttcgtctttattggcaacctggagttgatgtgcttttccttctgcaggttcagtcggttagattttaggtggagagtccttcttactgcattttctttctctggttctttgggtcggtttaggttgctaaccacttctgtgcttttgtaatatgggcgacggggtctctcagtagctttgtcataaaacaattctacttccccttaatatagtacatgtgactctgacatgttatcgaacaaaaaaaaacattgctcgctctaaattttatgagatctggcatgatttcaaactattcttcttttcaaaatcctgttttctgactgcagtttttacaagattttatggtcttgccgcttcatttttctgactgtttgcattggaccgataccttctgatggccttgtccgcctattttcaggttcgctaccaaagcaggaagaggcttgctgagcagcggccacgggtccgaggacagtttgtgcgacaatctgagcaagaagatcaaacagcgcaaggttcagaaagatgacacgtaatttctaatacaacgtatcatcttcttcggcagatctgagaattaggcggttcttcctattgcgcatcttcgtcgacagatctgagaattaagtggtccttcccattgctgatagtagcccactgattcccaacgttagagtacacaataaataagactctagttgtcaatttctgtggttgactgcagatgatcaccctagcgctatggagtcaacaatgtaatatttatatactatgttcgtgccttggcgccttggcggtttgcaatcttcagtttcctttctgagagattcttggccaagtgccttgaggaggagcaaactagcagcgtcgccattgctatattaatagctggaatcatgtagtagtagttcatccattcattcgaagatcgtgttccaaatcaacacaagtaggggtttgcttctcctctttccaagaaaagtggttgtagcgtgagatgcaaataggtctcttgtgctagatcaagctcaataaactttaggccgtgttaggcagctgatctacttcaccaatgtggcaaggcattcgtcgtattctgttgacagaaacaaggtgttcactgcacgggcatgccgcacgactcctcgcagatcaaaagagggaacacggcatgcttttaccaaaattattttcgaataacattgtgaggaacagacaataattaacttcccaaaacgtctcgctatactggatttttcgatgttggattcgtaatcagatccttttgacaataattttcgtacatcaggcatgtcaacagtaactgaagaatatgttagagccacatgtctcaaaagaaaaaaaaaacagagataatctcttcagtggttcagacatttcggaagagatatacgctcttcaacaaaacaaccccatgatactgtaactaatctaacacaatttttcctctttccatgtgtatatgaagttgggttcttt

SEQ ID NO: 207096 - DNA, 3069 bp, Zea Mays
cagctccatagcatcttagttattcctgctgaaaatggtttgcatgcatggcgatatcttgaagatctgcagaacaacatcgaccttgtattgactgaggttttcatgccttgtctatctggtatcggtctgcttagcaaaatcacaagtcacaaaatttgcaaagacattcctgtgattagtaagtagatttcctcaactaccctaatgcacgtgaaattttatcttgttaattgttgggtttaaatacttttagctgctacactgatgtgttttgcatgcagtgatgtctacgaatgattctatgagtatggtgtttaagtgtttgtcgaagggagcagttgatttcttggtaaaaccactacgtaagaatgagcttaagaacctttggcagcatgtttggaggcgatgccacagttccagtggaagtgaaagtggcatccagacacagaagtgtgccaaactaaatactggcgacgagtatgagaacggcagtgacagcaatcatgatgatgaagaaaatgatgacggcgacgatgacgacttcagtgttggactcaatgctagggatggaagtgacaatggcagtggtactcaaagctcatggacaaagcgtgctgtggagattgacagcccacaacctatatctcccgatcaactagttgatccacctgatagtacatgtgcacaagtaattcaccctagatcagagatatgcagtaacaagtggttaccgacagcaaacaaaaggaatgtcaagaaacagaaggagaataaagatgaatctatgggaagatacttaggaataggtgctcctaggaactcaagtgcagaatatcaatcatctctcaatgatgtatctgttaatccaatagaaaaaggacatgagaatcacatgtccaaatgcaaatctaaaaaggaaacaatggcagaagatgattgtacaaacatgcctagtgcaacaaatgctgaaactgctgatttgattagctcaatagccagaaacacagaaggccaacaagcagtacaagccgttgacgcaccagatggcccttccaaaatggctaatggaaatgataagaatcatgattctcatatcgaagtgacaccccatgagttgggtttgaagagatcgagaacaaatggagctacagcggaaatccatgatgagcgaaatattctgaaaagatcagatcagtcagccttcaccaggtaccatacatctgtggcttccaatcaaggtggagcaagatatggggaaagctcttcaccacaagataacagttctgaggccatgaaaacggactctacatgcaagatgaagtcaaattcagatgctgctccaataaagcagggctccaatggcagtagcaataacgatgtgggatccagtacaaagaatgttgctgcaaggccttcgggtgacagggagagagtagcgtcaccattagccatcaaatctacccagcatgcctcagcatttcatactatacagaatcaaacgtcaccagctaatctgattggggaagacaaagctgatgaaggaatttccaatacagtgaaaatgagccacccaacagaggttccacaaggctgcgtccagcatcatcatcatgtgcattattacctccatgttatgacacagaaacagccatcaacagaccgtggatcatcagatgttcactgtggttcgtcaaatgtgtttgatcctcctgttgaaggacatgctgcaaactacagtgtgaatgggggtgtctcagttggtcataatgggtgcaatgggcagaatggaagtagcgctgtccccaatattgcaagaccaaacatagagagtattaatggtaccatgagccaaaatattgccggaggtggcattgtaagtgggagtgggagtggcaatgacatgtatcagaatcggttcctgcaacgagaagctgcattgaacaaattcagactgaagcggaaagatcggaactttggtaaaaaggttcgctaccaaagcaggaagaggcttgctgagcagcggccacgggtccgaggacagtttgtgcgacaatctgagcaagaagatcaaacagcgcaaggttcagaaagatgacacgtaatttctaatacaacgtatcatcttcttcggcagatctgagaattaggcggttcttcctattgcgcatcttcgtcgacagatctgagaattaagtggtccttcccattgctgatagtagcccactgattcccaacgttagagtacacaataaataagactctagttgtcaatttctgtggttgactgcagatgatcaccctagcgctatggagtcaacaatgtaatatttatatactatgttcgtgccttggcgccttggcggtttgcaatcttcagtttcctttctgagagattcttggccaagtgccttgaggaggagcaaactagcagcgtcgccattgctatattaatagctggaatcatgtagtagtagttcatccattcattcgaagatcgtgttccaaatcaacacaagtaggggtttgcttctcctctttccaagaaaagtggttgtagcgtgagatgcaaataggtctcttgtgctagatcaagctcaataaactttaggccgtgttaggcagctgatctacttcaccaatgtggcaaggcattcgtcgtattctgttgacagaaacaaggtgttcactgcacgggcatgccgcacgactcctcgcagatcaaaagagggaacacggcatgcttttaccaaaattattttcgaataacattgtgaggaacagacaataattaacttcccaaaacgtctcgctatactggatttttcgatgttggattcgtaatcagatccttttgacaataattttcgtacatcaggcatgtcaacagtaactgaagaatatgttagagccacatgtctcaaaagaaaaaaaaaacagagataatctcttcagtggttcagacatttcggaagagatatacgctcttcaacaaaacaaccccatgatactgtaactaatctaacacaatttttcctctttccatgtgtatatgaagttgggttcttt

SEQ ID NO: 207097 - DNA, 913 bp, Zea Mays
ctcactatatatcccccgcaccctcgtggtctcccctctctctccatctcctgtctctttctctttctacaaagtcgcttgcgaacagccggtgctgcctgctgccgctgtgttggagagaaagaaagcgagcgagcgaggagggaggagggagagggaccgcaaatccctcggtcgctttcgacggcctggatctcccgcacgcgggatcgtacgaccggcacgctgctgtcgctttccaccgcatagtaaattgccaaggctgttgtaatgggggcaaatggtcatcatgaacctcgcagaggatgtaatggcaccgtctgcaatggtagtataagaccactcgattactttggtgatgtagatccatggacggcttgggcatacaagcctcgaacgatctcgctcttgctgacgggaacatgccttttaatttgggcaagtggtgctctcgatccagaaaggagctcatctgctgatcgtgtttggtcagtcaagaggggtgtatttgcgatgattgctgtttttttggcttactcttttcttcaggcaccttcaactggactcattagaccacatcctgccatttggaggcttgttcatgggatgacagttgtttaccttgtcgccctcactttcttgctttttcagggctgttttcaccccctcctgcttaagatcgaaaccaggccaggagttatgcaatactgtgtttccaccatgtgaagccaatctcagtcccaaattttccgttcatatctttaatcttgtgttatcttgtattattacttaatgtctcatcctcataaagtagaacagtattgcagcaagtcagagttcagtcgcaagattttaaagagtagagcaggaaaacttagtatggcatttcatattttcattaactttgttttgc

SEQ ID NO: 207098 - DNA, 2085 bp, Zea Mays
ctcactatatatcccccgcaccctcgtggtctcccctctctctccatctcctgtctctttctctttctacaaagtcgcttgcgaacagccggtgctgcctgctgccgctgtgttggagagaaagaaagcgagcgagcgaggagggaggagggagagggaccgcaaatccctcggtcgctttcgacggcctggatctcccgcacgcgggatcgtacgaccggcacgctgctgtcgctttccaccgcatagtaaattgccaaggctgttgtaatgggggcaaatggtcatcatgaacctcgcagaggatgtaatggcaccgtctgcaatggtagtataagaccactcgattactttggtgatgtagatccatggacggcttgggcatacaagcctcgaacgatctcgctcttgctgacgggaacatgccttttaatttgggcaagtggtgctctcgatccagaaaggagctcatctgctgatcgtgtttggtcagtcaagaggggtgtatttgcgatgattgctgtttttttggcttactcttttcttcaggcaccttcaactggactcattagaccacatcctgccatttggaggcttgttcatgggatgacagttgtttaccttgtcgccctcactttcttgctttttcagactcgtgatgatgctaggcaattcatgaagtatcttcatcctgatcttggtgtcgaattgcctgaaagatcttatggaactgattgtcgcatatatgtccctgatcatccaaaaagcaggtttaacaatgtttatttttttctaggagatcatttttgatgaatttgttatagctcatatccttggatggtggggtaaggctataatgatacgaaaccaaccacttttgtgggtcttgtcaattggttttgagttaatggagctcacttttcgtcatatgttgccaaatttcaatgagtgctggtgggatagcattgtcctagacatattgatatgcaattggtttggtatttgggctggaatgaaaaccgtgcagtacttcgatgggaggacatacgaatgggttggtttgagccgccaacccaacattatcagtaaggtaaaaaggatgctgggacagttcacaccagcacagtgggacaaggacgagtggcaacctacgctgggtccttggagattcatccaggtgctgagcctttgtgttgttttcatggctgtcgaactgaacacgttcttcctcaagttctgcctgtggattcctccgcggaaccctttggtcgtgtatcggttggtcctttggtggttaatcgcgataccgaccatccgggagtacaatacctacttgcaagacagcaaaccatttaaaaaggtgggatccttctgctggctttccctggctatatgcattgtagagctcctgatctgcatcaagtttgggcatggtctgtttccgaggtcaatgccttcgtggttggttacgttctggtcagcagtcgccttgcttcttgcgctctttgtgtggacatggaaataccgaacagtgaaaaggaaaagggtataattgttacaaaggaatgtttattttgcctccattctttacccaattcggtgttaccgtgtacataaaaaatctattcaaattgtgtacatgtagcagtagtagtcagttttggtgatctgaagaggattatccatggtaatttttttttgccttgtttgtcttcctattttccgtcagcaaagtattttgaccggctcttagatgtggattttaattttttcagttctcaatcccaaaccgttgaaaaatgtttctggatggcccaggcaaccatatgtgcaggttacaccacactgacactgccttgggcacgggaatttgcattgtgatgtgtgaagataggggtagccgggtaggcctgtcttgctggtgaatgtactcttgtcaggctgggacactctagtctaggttggtactccatagtcttcccggcttccagcaggcctgtgcaaatattttggccccatttgtttacttgagtcacatttgttacttgagtcacatgactaaagtttagtcactcaggtgccccg

SEQ ID NO: 207099 - DNA, 2031 bp, Zea Mays
cacgcacgtgtaacgtgttgttggtttggttgccgttcctccctcacggtcacgggcggagagcgccgaagcggcgacgaaggcaggcagacgccgcggccgcggcccgagtttttaatacgaaaccgccaccaagctgcttgcttacggcctagtttcacctcccccattcccttggaattggatttgctcccgaatccggcgaggaagcgaccggcactccacgccacgccgcggcgcccaaggaagggaagcttggggccctaggcctcgtctccatccccgccgcagccggcgcgaggcggcgcggcacgagcacgacggtcaccatcagccaccgcgcgatcccgggggacggccaggccagattccacaacgttttactcttattaaactccccaacttcgtctaaggaagcaagtgatttcattatgaaagactggtctattttctccaaacttgatcacaatggaggttaccttcccaggttcccaatggactctccaatatctcatgatattgggttacgattggtatcgcaagtcggaaacttagttgagtgttcatttcaacatccaaggcatatatgtgctacggggagtggagctgttcaggaagcattcagctgtttcaacaagtttgctggagctttctatttctggttttctagagcatcgaatcctaagttattccaaaggctatcagcagctgcaggctcaagttcaagagcttgtcggtcacacataaagcaagtgacctcttgcttgcagcatttacctggactggagtttggttcacaattaagagaagatcatgctgtacaagtgcttttagcaaggcttgcaagcgcaacttttggacgcctgtggacagaggtggaggagcggcatgcctgcaacatccttatgctggctgctgctactgtaattccaccatttgaaaacatatcaccaaagatgctggctgcgtcaatggcactaagaaaagatcgtggaaacatagagcctactgaacagtcttattcagaggaaaaccgtccaggttgtgcgtgtgttgctgtgccaagagtactcttaccagaagatgcaacggaaccaacaactggcatcaagttccccactgtactcgaagacaattccaatctgactacagaggtccttgttggaatgggttttagaagcatgcgaataatgagggtcaaaaatctgaatctttatgcctttggattataagctgggtccaaagtacgcttatattccagatgctgagttaaaggatcacccagatttctatgaagatcttctgagggaaaatattgatatgactgttaggctagtagtaagctacaatggtctcagcattggcacagttcgagatgcatttgagaagtctcttggcttccggttgcaaaagatgaatcctaatactgattatggttgcttgaagacttttggttcttgttttagtgaagacattcgtatacctgctggtacaaagattgacttccggcaaacatctgatggccagctaataactgaaattgatggcaaacaaattggcactgtccagagcaaagatctttgcagagccttcttcgatatgtatattggtgaccccccagtttcagtggagactaaacaagacattgcgcaaaatgtggctggactcataagaagatgctagggaaacgggaaaactaaatcgaagaacctggaattatttcattcatctatacaaggagaggacatataaacagaaaggaagccaggagaggatcgattgtatttatagtggtagactgtctttgtaagctataaacataaagcatatgcttggcaaaggcctccatgcctttcatatggtttggcatctttgccatttcctggctggctggcgtgctgtatcatgtcgacaaatatatgatacagtaaaaagttgtacaacaagagcatgtttctgtgccccaagtgaaaaatgacggggttcagctttgttcatacagatgattgatggttctcccttttgttttac

SEQ ID NO: 207100 - DNA, 2016 bp, Zea Mays
gccgttcctccctcacggtcacgggcggagagcgccgaagcggcgacgaaggcaggcagacgccgcggccgcggcccgagtttttaatacgaaaccgccaccaagctgcttgcttacggcctagtttcacctcccccattcccttggaattggatttgctcccgaatccggcgaggaagcgaccggcactccacgccacgccgcggcgcccaaggaagggaagcttggggccctaggcctcgtctccatccccgccgcagccggcgcgaggcggcgcggcacgagcacgacggtcaccatcagccaccgcgcgatcccgggggacggccaggccagattccacaacgttttactcttattaaactccccaacttcgtctaaggaagcaagtgatttcattatgaaagactggtctattttctccaaacttgatcacaatggaggttaccttcccaggttcccaatggactctccaatatctcatgatattgggttacgattggtatcgcaagtcggaaacttagttgagtgttcatttcaacatccaaggcatatatgtgctacggggagtggagctgttcaggaagcattcagctgtttcaacaagtttgctggagctttctatttctggttttctagagcatcgaatcctaagttattccaaaggctatcagcagctgcaggctcaagttcaagagcttgtcggtcacacataaagcaagtgacctcttgcttgcagcatttacctggactggagtttggttcacaattaagagaagatcatgctgtacaagtgcttttagcaaggcttgcaagcgcaacttttggacgcctgtggacagaggtggaggagcggcatgcctgcaacatccttatgctggctgctgctactgtaattccaccatttgaaaacatatgctggctgcgtcaatggcactaagaaaagatcgtggaaacatagagcctactgaacagtcttattcagaggaaaaccgtccaggttgtgcgtgtgttgctgtgccaagagtactcttaccagaagatgcaacggaaccaacaactggcatcaagttccccactgtactcgaagacaattccaatctgactacagaggtccttgttggaatgggttttagaagcatgcgaataatgagggtcaaaaatctgaatctttatgcctttggattatatatacaacctgattctgtctgcaagaagctgggtccaaagtacgcttatattccagatgctgagttaaaggatcacccagatttctatgaagatcttctgagggaaaatattgatatgactgttaggctagtagtaagctacaatggtctcagcattggcacagttcgagatgcatttgagaagtctcttggcttccggttgcaaaagatgaatcctaatactgattatggttgcttgaagacttttggttcttgttttagtgaagacattcgtatacctgctggtacaaagattgacttccggcaaacatctgatggccagctaataactgaaattgatggcaaacaaattggcactgtccagagcaaagatctttgcagagccttcttcgatatgtatattggtgaccccccagtttcagtggagactaaacaagacattgcgcaaaatgtggctggactcataagaagatgctagggaaacgggaaaactaaatcgaagaacctggaattatttcattcatctatacaaggagaggacatataaacagaaaggaagccaggagaggatcgattgtatttatagtggtagactgtctttgtaagctataaacataaagcatatgcttggcaaaggcctccatgcctttcatatggtttggcatctttgccatttcctggctggctggcgtgctgtatcatgtcgacaaatatatgatacagtaaaaagttgtacaacaagagcatgtttctgtgccccaagtgaaaaatgacggggttcagctttgttcatacagatgattgatggttctcccttttgttttac

SEQ ID NO: 207101 - DNA, 2088 bp, Zea Mays
accgagcctcccagtcccagtccgcgcgcccggcgcctccctcgagcgcctctgtcctccgtcggccgtcgcactgtgcccccgtccgcctccggcctccgccaacccgcgtccgcccacgactaggcggctctgggcaggtccttccacaaagatgtgaaggattaaagctcatgtgaaagattctaagactacaattggtatcaagcggttgctttcttatttctcatacgctcaaccatgctcctgcatgctaaggattcagttaggaagatgcattcagttgctaagaactactttgtgtctgatcttactcatcctccaagatccttgaacagagcttccagacatgttgttccattcaagacccgtttctttactcattgctcacttgagagccgttcagttgaccaagagattgtgattgctatgggaagcaatgtaggcgatagagtcagtacattcaacagggcattgcagctgatgaaaagctcagacgtgaacatcactaggcatgcctgtctctatgagaccgcccctgcttatttgactgatcagccgcggtttcttaactctgccattcggggcacaactaggctcaggccacatgagcttcttaaactgctaaaggaaattgagaaggatattggccgcactggcggaataaggtgcatctagtgacaacggtatcgaaacaagttggcactctctctcaaagtgtagtggaggtttctttgagttatggaataaccttgggggtgaatctataattggaacagaaagcattaaaagggtattacctgttggggatcgtttgttggattggtgtgagaggactcttgtcatgggggtccttaatttgacaccagacagctttagtgatggaggtaagtttctagaagtgggagctgccatttctcaggctaagtcattaatctcagaaggtgcagatatcattgatattggtgctcaatctaccaggccctttgcaaaaagattatctccaaatgaggagcttgagaggttggttcctgttctggatgagattacaaaaatccctgagatggagggcaagttactctcagtggatacattctatgcagaagttgccagtgaagctgtgaaaagaggagctcacatgatcaacgatgtatccagtggacagcttgatccaagaattcttaaagtggcagctgaactgggagttccatatgttgcaatgcacatgaggggagatccgtcaactatgcaaagcgaacaaaatgtacactatgataatgtctgcaaggaagttgctttggagctatacacacaggtgagagaagcagagttatctgggattccattgtggaggctggttcttgatcctggcattggcttctccaagaaatctggacataaccttgaagtaattatgggattggaatccattaggagggagatgggtaaaatgagtataggtgcttcacatgtgccaatattactgggaccttcaaggaaaagctttttgggtgaaatatgcaatcgtgccaatccagttgagagagatgttgctactgttgcagccgtgacagctgggattttgaatggtgctaacattgtaagaatccataatgctggatatggtgtagacgctgcaaaggtttgtgatgcattgcgtaagcgtaagggaagttgcagaaactgaactatctgatcaaactgataccacgctccagttttatacaagaaaaaggtgatgtcgaaaaatgtgatttgtgaagtatcgttgttgtaatgaaccagagataatgctttttcttgtgtcaccaaggaataaagtcaagaagctgcgactcaagttgcattggtcctattcagatgattttgctgaacttattttttgcctatttagtgggtgtttggtttctagggactaatttttagtccctttattttatttaattttagttcctaaattgtcaaatctgtattttgcaatttagggacaaagtgaataaaatgaagggcctaaattgtcaaatctgtattttgcaatttatgggggtgtttgaatgcactagagctaataattagttagctaaaaat

SEQ ID NO: 207102 - DNA, 2130 bp, Zea Mays
cttgagctgacaagctctcttgctgtcttgcataagcttgtagcacctttttgtttggggagatgtgaaggattaaagctcatgtgaaagattctaagactacaattggtatcaagcggttgctttcttatttctcatacgctcaaccatgctcctgcatgctaaggattcagttaggaagatgcattcagttgctaagaactactttgtgtctgatcttactcatcctccaagatccttgaacagagcttccagacatgttgttccattcaagacccgtttctttactcattgctcacttgagagccgttcagttgaccaagagattgtgattgctatgggaagcaatgtaggcgatagagtcagtacattcaacagggcattgcagctgatgaaaagctcagacgtgaacatcactaggcatgcctgtctctatgagaccgcccctgcttatttgactgatcagccgcggtttcttaactctgccattcggggcacaactaggctcaggccacatgagcttcttaaactgctaaaggaaattgagaaggatattggccgcactggcggaataaggtacggcccaagacctatcgatctagacatacttctttatggtaactcccagatccatagtgagactctaattgtgccacatgagcgcatccatgagaggtcatttgttttagcacctcttgttgaccttctaggtgcatctagtgacaacggtatcgaaacaagttggcactctctctcaaagtgtagtggaggtttctttgagttatggaataaccttgggggtgaatctataattggaacagaaagcattaaaagggtattacctgttggggatcgtttgttggattggtgtgagaggactcttgtcatgggggtccttaatttgacaccagacagctttagtgatggaggtaagtttctagaagtgggagctgccatttctcaggctaagtcattaatctcagaaggtgcagatatcattgatattggtgctcaatctaccaggccctttgcaaaaagattatctccaaatgaggagcttgagaggttggttcctgttctggatgagattacaaaaatccctgagatggagggcaagttactctcagtggatacattctatgcagaagttgccagtgaagctgtgaaaagaggagctcacatgatcaacgatgtatccagtggacagcttgatccaagaattcttaaagtggcagctgaactgggagttccatatgttgcaatgcacatgaggggagatccgtcaactatgcaaagcgaacaaaatgtacactatgataatgtctgcaaggaagttgctttggagctatacacacaggtgagagaagcagagttatctgggattccattgtggaggctggttcttgatcctggcattggcttctccaagaaatctggacataaccttgaagtaattatgggattggaatccattaggagggagatgggtaaaatgagtataggtgcttcacatgtgccaatattactgggaccttcaaggaaaagctttttgggtgaaatatgcaatcgtgccaatccagttgagagagatgttgctactgttgcagccgtgacagctgggattttgaatggtgctaacattgtaagaatccataatgctggatatggtgtagacgctgcaaaggtttgtgatgcattgcgtaagcgtaagggaagttgcagaaactgaactatctgatcaaactgataccacgctccagttttatacaagaaaaaggtgatgtcgaaaaatgtgatttgtgaagtatcgttgttgtaatgaaccagagataatgctttttcttgtgtcaccaaggaataaagtcaagaagctgcgactcaagttgcattggtcctattcagatgattttgctgaacttattttttgcctatttagtgggtgtttggtttctagggactaatttttagtccctttattttatttaattttagttcctaaattgtcaaatctgtattttgcaatttagggacaaagtgaataaaatgaagggcctaaattgtcaaatctgtattttgcaatttatgggggtgtttgaatgcactagagctaataattagttagctaaaaat

SEQ ID NO: 207103 - DNA, 2744 bp, Zea Mays
atctttgtccacaccgcagccgccgcccgctcgctcgcctccgctccggcagcgagctctatctcccgcgacgagcagcagctgccaccgacgcacgcagaccgggcaataaatattggtattggtagtgtgatatctataagaagtcaagatggtgaagttcacagctgaagagctccgcgctatcatggacaaaaagaacaacattcgtaacatgtctgtcattgctcatgtggaccatggcaagtctacgcttacagattcccttgtggcagctgctgggattattgcccaggaagttgctggtgatgttcgcatgactgatactcgggcagatgaagcagagcgtggcattacaatcaaatctactggtatctctctttactatgagatgactgacgagtcactgaagaactacaagggtgtctgtgtgcaaactgaaactgtgcttcgccaagcccttggtgagaggattaggccagttctcacggtgaacaagatggacaggtgcttccttgagcttcaggttgagggtgaggaagcgtatcagactttctcccgtgtcattgagaatgccaatgtcatcatggcaacatatgaagataagctccttggtgatgtccaagtatacccagagaaggggacagttgctttttctgctggtctgcacggatgggccttcaccctcactaacttcgcaaagatgtatgcatctaagtttggagttgatgaaactaagatgatggagaggctatggggtgagaacttctttgaccctgccacaaagaagtggaccaccaagaacacaggttctcctacctgcaagagaggatttgttcagttctgctatgagccaatcaagcaaatcatcaagacctgcatgaatgaccagaaggagaaattgtggcccatgctgcaaaagctcaatgttaccatgaaggctgatgagaaggagttgattggcaaagctttgatgaagcgtgttatgcaaacgtggcttccagctagcactgctctgcttgagatgatgatattccaccttccttccccagcaaaggctcaaaagtatcgtgtggagaacttgtacgagggaccccttgatgatgtgtatgcaactgctatcagaaactgtgatccagagggtcctcttatgctgtatgtttcaaagatgattcctgcatctgacaagggcaggttctttgccttcggtcgtgtcttctcagggaaggttgctactggtatgaaggttcggatcatgggtcccaactatgtccccgggcagaagaaggatctgtatgtcaagagtgtccagcgtactgttatctggatgggaaagaagcaagagtcggttgaggatgttccgtgtggtaacactgttgctatggttggtctggatcagttcatcacgaagaatgctacactcactaatgagaaggagactgacgcttgcccaatcagagcaatgaagttctccgtctctcctgttgtgcgtgttgctgttcagtgcaaggttgcctctgaccttcccaagctagtcgaaggtttgaagcgtctagcaaagtccgatcctatggttctctgtacaatggaagaatctggtgagcatatcattgctggagctggtgagcttcatcttgagatttgcctgaaggatctgcaggaggacttcatgggtggtgctgaaattattgtttcccctcccgtcgtctccttccgtgaaacggttcttgagaagtcctgccgtactgtcatgagcaagtctcccaacaagcacaaccgtctgtacatggaagcgcgccccttggaggagggtctcgctgaggccatcgatgacggccgtattggcccacgtgatgatccgaagatatgtgcaagggagtgcagtatctcaatgaaatcaaggattctgttgtggctggtttccagtgggcatcaaaggagggtgcactggctgaggagaacatgcgtggaatttgctttgaggtatgtgatgtcgttcttcatgctgatgctatccacaggggtggtggtcaggtcattcccactgccaggagggtcatctatgcctctcagctcacggccaagccaaggctgctggagccagtctacctggtggagatccaggccccagaaaatgcacttggtggtatctacggtgttctgaaccagaagagaggtcatgtctttgaggagatgcagaggccgggtaccccgctctacaacatcaaggctttcctccctgtcatcgagtcctttggtttctccagccaactgagggccgcaacctctggtcaggcgttcccccagtgtgtctttgaccattgggacatgatgggctcagatcctttggaggccggctcccaggctgctcagctggtgctggatatccgcaagaggaagggtctcaaggaacagatgacccctctttctgagtttgaggacaagctctaaaatttttggctgttggtgatactgtttcatctgccgtgccctgccgcgcttagagtctgagactattttgttatctgctgtgatgtttcagatgaaacagagttgatgtctggtttagtaaatggttatattcttagtgtattgctcttttgtattgtcttgtcttattaagacctgtttgtggaaaatgaagtggcattcaaacaggtgccaagaggttccattaccctgccaataggtcgaaccggtgcctgcttcaaacctttgttgaacatggcaatgtttatagcgcg

SEQ ID NO: 207104 - DNA, 3891 bp, Zea Mays
aaatccaggtcaaacccaggtgattagttttccagtcccactcactcaaacctctccgtcctcctcctcctccgggccgggctgcaacctgcgacgctggcgccggtcggcacgaggtgttccacgagtcgctgcgccccccaccggccaccacggcgcgtgccgggagcagcgcagcggcggcggccataatgggcgccgccgccgcggccttcgactccgagtgcaagaggttcgttaagtaccgtaccgtactcttctcttctccacttgaaatccacgatgcatgaggcaggcggcaggacagacgcgcgccatcgtcgtgccgcgcgccacgtgctccgcgctagtctagcgtcgaacgaaaaatggccttctttttttctttccctcccttctttcggtctcctgctcgccgtccccaatctgcgctgccgattcttcttcttcttcttcttcaccaattcaattcatcttcgtcgcctggggcacacccctcgggcgccgcggcagcagggggtgcggtgcagttagcgccagcgcgcgtggctccaaccggacttgccgcgatccgttgcaatcctgattcccttcctctccagaattcatcctcccatgtgcgtggatctcggggcccgcgcgggctagggtttagtatggctttggtcaatccatggcgtgcgctgccgaggtcgtcctgtcgcttcttctttaatgcgcgctgatccccatggactccgagtccccacgggacgcttatggattcacggtgcggccgcagcatctgcagcgtttccgcgagtacgccaagatttacaaggaagaggaggaggagagggcgcacagatggagggacttcttggacaggttggctgagtcagcgaatgtgcccaccacacccagtgtttctccatatgcagctaccgacgatggtgcctcaggtgcaggacaaacacaagggaataacggcatcggaatacattgtgatgatgaagaagtgggatctgagaacgcagaagataacaacaaatttgaaagcccgaaggaagctgatgcaagtggcgaatcaagggaaccaaatggtaagccaggagatctgaaagatgtaactaagttggacaaagtgcaagaggagactggtagcagctctacgcaagcaatcaaagacttagagggcttgatggaagcaagcggggactttgaagaactaagagatttgaatggaatcccagaagaattggaagaagagaataatggcaacttggaaaagctggtagaactcttcttggataaggggttgttggatgaactgaagcccataaaagttgagtcccagtggcgggtgcgtgcagcgcttagcatcattgacaaaatgatgagctctcgggtagtgaagggtggtaatggtgcaaacgatattcatcgaaaggatggaccacagcttacttctattgaagaggaaggaatgactgcagaagtgagtcacgacggatatccagctgaggttgaggagtcttgtgttgcagagaaggtggaacttggacaggagacaactgatgattctacaggtactgctttggatagagacaatgatgggtcgtattttctttggagggaggagcttgagagcttggttcgtggaggtgtgccaatggctcttagaggagagatatggcaagcatttgcaggtgttagtgctcggaggattactgggtactacaacaatttgcttgatgacaggactgcgatattggatgaaaaggatcccgtggacccagtggtcaatgaacagagaagtgcaccgagaaaagctacacagcctgagaagtggaaaggacagatagaaaaggatttgccacgaacatttccaggacaccctgcattagatgaggatgggaggaatgctttgaggcggttattaaccgcatatgcaaggcataatccatcagttgggtattgccaggccatgaacttttttgctgggttatttttgttattcatgcctgaagaaaatgcattttgggctttagtaggggttattgatgattattttgatggatactacactgaagaaatgattgaatcacaggttgaccaactcgtccttgaggaggttgtacgagaaaggttccctaaattggccaaacatatggatttcttggaagttcaagtgggatgggtgactggaccatggttcctttctattttcgtcaatatgcttccatgggaaagtgtactccgtgtttgggatgtcatcctttttgaaggaaatcgtagaatgttgttcaggacgacgcttgctttgctggatttatatgggcctgcacttgtgaccacaaaagatgccggagatgcaattacactactgcaatctcttgctgggtctacttttgacagcagccagcttgtattgacagcttgtatgggctttcaatcagttggagaaatgggattgcaagagttaaggaaaaaacacaggccagaaattttaactgcaatggaagaaagatcgaaagaccgtggctcctggaaagataagaaggggttagcaaccaaactttacagctttaaacatgatccttcattcgtgtgctcaccagttaagtccaaggaggggctagatggttcaaaggtgaatggagagactgggccagcaaatcttaagacctaccttagtactagttctatactggatactgatttggatcagggtgttgatcttcaagatcaggtgtcatggctaaagattgaactatgcaagctgctcgaggagaaaagatcagctgatctcaggggcgaggaattggaaactgctttgatggagatggtcaagcatgacaacagacgtatgttgagtgctaaggttgagaagctggaagcagaggtatatgaactgcgaaaagttttttcatacaagcaagagcaagagcaaataacgcttcagatcttgttaagaatggagcaagaacagaaagtggcagaagatgcccgcatagtcgctgagcgagatgctgctgaacaaacatgcgctgcccatttgcttcaggagaagtatgaagctacaatggcagcactttcacaaatggagaagagagctgtaatggcagaaacaatgctggaagctacaaagcaataccaggctgggcaggttaaagccaaccaatctttcacttcaagttcacctcgtgcagaacatgttcttgggaagataaatcaagaaccaaaccaagatatgtctaacaggagaatcggcctgctttctaggggacttggatggcttgacaagagcaagggaaggcaaaattccactgaaacatctggaggctaaactcatctagagttcaggatgaagtcatagctcccaacaagatctggattgttcattgatgcttggattgcctgatcacgataagaatgtgttgaaatcagcagctatgttttctcggggagattcagctggcattttccatgaagttttgcaggaagtgtatcttgtaccatattgagctcagttgtcggataaagttttgttggtaggtcagaaaggctgctgcaagtcatcggtgtaaattttcttttattagtttcattaaggtcgtcaatagtcagtgtttccaagtaggagaaagaaaagaacccaacttcatatacacatggaaagaggaaaaattgtgttagattagttacagtatcatggggttgttttgttgaagagcgtatatctcttccgaaatgtctgaaccactgaagagattatctctgttttttttttcttttgagacatgtggctctaacatattcttcagttactgttgacatgcctgatgtacgaaaattattgtcaaaaggatctgattacgaatccaacatcgaaaaatccagtatagcgag

SEQ ID NO: 207105 - DNA, 1378 bp, Zea Mays
actggcttcctctgccgctcgcagtctcgctccacaaccacaactatccatccactaccggctccctccctcctcctgaaaaccccgaccgcgggcgaaccaaaccctagcgagcgaggcgatcagcgtccggcgaccggcgacagagcgcaatggagacgcgcccggcgccttgcgacctcgaggcggccgtgcccgcgggctccggggctgcaacggcggcggcggcgcagcaggaggcacccgcggcgaagaaagtggcggaggaggaggatccgcgcctgcgctgggccttcgtgcggaaggtgtacgccattctctccctccagttcgcgctcaccgcggccgtcgcggccaccgcgtgcctcgtccgcccgatcccgcgcttcttcgcctccggcccccccgccgccgttttggaatggaccaccgatcgcggttttgtttgtgcagtcatgttccccatgctcaagtacagggagaagcaccccaggaacctcgtcctgctcgccgtattcactctctgctgcagtctcagcatcgccgtctccgcctccaccaccctcgtggtcctgcaagctaccatcctcacagctgctgctgtcctggggctcaccctcttcaccttctggggcgtcaagaggggctacgacttcaccttcacgttccccttcctgttcgcctgcctcgtcgtgctgctggtgtacatcatcatccaggtctgcttcccgctgggaagggtagccatgaccatctacggcgtcctggccaccgtggtgttctcgggcttcatcgtctatgacaccaacaagctgctgaagcgccacgcctacaaccagtacgtggtggcagccatctccctctacctggacgtcatcaacctcttcatggcccagatggccatctccttccagtgatggattgcgggtctcacctgtacggctgtaccccatgcatgacggcgcctcgcccgtctggtacatggtggatcacacatccacatagcttcgcaagtcgagctgtctttcattatccttatcctaatactggtagtaccaatagcattacagtcctacagatctgtaattggctggccacccttcagctgagacagtatatatatcgtatatggcacctcaccataaatgacgttggagaccatgagatggttggtcgtgcttcggcaccgtatagttgtgacggtgacatgctgatttgaggtcaaagtaggatgacgttttctcgattttttaggatcatgccgccaacaaatattgtccaacgaatattgttctggtgtcgtgagatgggagatgcttactatgttggataacactagtagcggtaattttttactctgctatagcggttgatggac

SEQ ID NO: 207106 - DNA, 6018 bp, Zea Mays
acccgcttgagctcgggccaagagcgccgatacacgatacggcagccgagcacactcttccccttcctgacctccacttcctagctcggccccggctccgcatctatctatctctcgccctgccgtctccggagaccggagctgctctcacatccccacgcgcgcgccctcgaccccgaccacgtcccccgcccgctcggcgctcgcacagtccttccagattccctcgtccggggagcggcgctgaggtctcgcaccgatgagctcgggggccatcggggcctcggatcctgggggtggcgagacgaagccggtggcgggcggtgacgtcacgacgtcggaagctgcgggcgaggtgcctgctttcgccgccgatgtgaaagtggaggggaaagctacgttggcgacggatgtggatcgtgaagggggagatacggcggtgagcgacccgctctacgcgaacgagtcagctggtatggttggtgccgaaggccacggagatgagcccgcggagggcctggaggcggtgaatggtgaggaggagatgctagaagcaggagctcgtgatctgctcactgagacggagaagaatccggttcttgtggtacatgtgcctgctgctgctgctggtggtggttctgccattcctgaacatgctgaagccgaatctaacaaagttgaagatcatgtaaacgtggagcctgggacaaagaataatgaaagtgataatggcatagctcattttgataaggaaatacagaacaatgtgcctgatgacatagaggaaagctccaaggaacatgaaggtgatggagcacctgtagttgaccagacaaataatgcatctgaaatgctcccacaaaccggagagcagtttcctgatgttgaaaatagcacggacagcaacctagaggctgctagtctgggtagtgtggatcagggtgctagatactgcctgcctcctcatgataaaggcgggtttcaagttgctgatcttgtctggggtaaagtgaaaagtcatccttggtggcctggtgaaatttttgatccatcagatgcatctgaattggctctgaaacatcagaaaaagggcagccacttggtagcttattttggtgacaacacttttgcgtggtgcgatgaatcccagttgaagccttttgtgacaaattattcacaaatggagaaacagagcagttcagatgcctttgttgggtcagttaataatgcacttgaagaactgtcaaggcggatactgtcaggtatgagctgctcttgtttgccagaagagcttgctgataatggcatgtcctatacagttgataatgctgggctcaaggatggagttacttgctctgcagttaatcggcctgaaatcttaaactgtttcagtccagaaaaccttcttcattatattaaggagttagctctatttcctggccaaggaggtgatctgttggagttagttatagcatgttctcaacttacttctttctatcgatctaagggatgtcctgaacttgcatcatttcaaactggcgatgcgtgggttgaggatggtctggattgtacagacactttgtccacccagaatgtaatggttgaggaacctgtgattaatgaagtgcatcctactcaagataagcccaaaaggggcagggggagacctcggaaacaaaaacctggtggtgaccaggtggtgatggagaaaaggagcatatctaatcaggtcaatgatactagctacaatgagaaacaagtgggtatggactttgataactatggcaacctacagaacaagaacaaaagaaactttgaatcatttgaagattcagagaagtcatcagctccaactggtggtagttctttcaagattggtgagtgtattcggcgagctgcaagccagctgacaggatctccgtccattatgaaggctcagaatgctgctgaaggagagaatggggaatttgatatctttagtgatgatgctggtgatgaacttactgtagagaaacgagcaaaaaggagaagtctgcacaggaatcacactgcagatcccaaggaattactatcacagctatgcttggttgcaacagagccaatgaatggatataatttctcagtaatgataatcagttacttcagtgattacagaaactatattgtttctactactactgaagcaaacatcgttgataaaggtacatctaggagagggaggaagagaaaagaagttttaccttctcctgatgtagagacaacagatcatatgcaggactcgtattggtccggattgagcttgcataatcacccaatccatgacctcagaaaagagagtcccactacaaggccaagacgtaggcggagatcctcaagtcatgcatatgtacctttgtcagaacttggggagccagtacctaaaaaacagatacaagtgatggaaagatctatcatccatgttgacgagaagatgattgatgagttgaagcccactgcacttgttttgagctttgccaggtcagcttctattccttcagaattggatcttgttaagatgttcagtcgctttggtccactgaaagaaagggaggcagaagtacacagggaaacaaatactgttaaagttgtcttcaagaaacgtgccgatgctgaaagggcttttagcgctgctggcaagtatggcacttttggaccttcgcttcgaagttaccgtcttgtcagtatgccattttctctagagacacagtcagcaaacaatcctgtgaaacatcctgaaaatcatggcatggagattccaggttcaaatcagtccgaagctcctaaggattccatggaagttgacctggtacagaaaacagatgaagtagaagttgcaggagaaccgtcgtctgaagaagttgagactgtgaggcaaatatctcaagtgcaagctgcagacagtacatttgtcagtcaagacaggtttgatgaagctggaaatattgacgctgagctaattgaccatgttaatcaaattgggaaagctgcacaagctgcatctgtatctgaagagtcacgagatgttgagcaagtttacactcaaaaggaagtgtcagccaatgatctacccacagagacagaaatcttaaattctgatgctataacaaaagagttgcctcagaatgctccagataatgtggaaactgatatagtcgaagatccaaaacagagtcacaattcaagagataatgccgtatttgaagcagtcattgaagatccaaaacagagtcacaattcaggagataatgccgtatttgaagcagtcactgaagcaccgagtactgcacaagatcatactgaggatgatactgggaatgaagttccagaagagcacatggtatctcttgagttacaaagtcaaacccctggtgatctacccacagagacagaaaccttacattctgatgctatagtaaaagagttgcctcataatgctccagataatatgcaaactgatatagccgaagatccaaaacagagtcacaatccaggaggtaatgccgtatttgatgcagtcactgaagcaagaagtactacacaagatcatactgaggatgatactgggaatgaagttccagaagaggacatggtatctcttgagttacaaagtcaaacccctggtgatctacccacagagacagaaaccttatattctgatgctatagtaaaagagttgcctcataatgctccagataatctgcaaactgatatagccagagatccaaaacagagtcacaatctaggagataatgctgtatttgaagcagtcactgaagcaccaagtactgcacaagatcatactgaggatgatactgggaatgaagttccagaagagcacatggtatctcctgagttacaaagtcaaacccctggtgatctacccacagagacagaaaccttacattctgatgctatgataaaagagttgcctcagaatgctccaaatagtatgcaaactgacatagctgaagatccaaaacagagtcacaatccaggagataatgccgtatttgaagcagtcactgaagcaccaagtactgcacaagatcatactgaggatgatactggtaataaagttccagaagagcacatggtatctcttgagttacaaagtcaaacccctggtgatccacccacagagacagaaaccttacattctgatgctatagtaaaagagttgcctcataatgctccagataatatgcaaactgatatagcggaagatccaaaacagagtcacaatccaggagatgctgtatttgaagcagtcactgaagcaccaagtactgcacaagatcatactgaggatgatactgggaatgaagttccagaagagcacatggtatctcctgagttacaaagtcaaacccctggtgatctacccacagagacagaaaccttacattctgatgctataatgaaagagttgcctcagattgctccagataatatgcaagttgatatagctgaacatccaaatcagagtcacaattcaggagataatgccgtatttgaagcagtcgctgaagcaccaagtactgcacacgatcatactgaggatgatactgggaatgaagttccagaagaggacatggtatcttctgagttacaaggtcaaacccctggtgagaaactagtggggcaatctgcaactgaacagatggtgggatctgaagatccaaagccgcaagccgaaaattttgttgctgaacctgttgtgctgggtgcagtcgggcaagtagaaattgaactggaatccaaaactactgttgaagtgtcaggcgaacaaggctatagtattgagcagactgttcaagtggaagctctaattgaagcgtcaggtggacaacttgaggtgggaaggcaaattccagaagatgaatctattgcttgtgcaactactgagcactctatggttgtcgatgaaactgtggaggcaaaagtggtactactcgatgagagtatagagaataatgctgctgtcataggagtagtcgaggagactgctgaaggtgaaactaaggaggaagcatcagacgagaagggaaaaatagaaaataatgaagatgctgacaaattagcaccagccgggaaggggaaaatagaaaataatgaaattataattgacgcaccagatgagaaaacagaaaataaagcagatgctgacacaccagctggggagaccaaagaaggtgaaattacagtagaggaaacagatgagaaaatagaatctaaagttactgctgaacctgtaatcggggagacaactgaaggtcaaactgcagctggagaaccagttgaagaagctagaacagctgaggacatggtagaagatgttaaggtgctagatgataaatctacagcagctgagaaacctgtagagaatgccacagttgtggcacatgagaattcgactacagttgagaatactctgaaggatgcgattgtcgcgccaccagatgcaaataccaccaacgccgaaaaaactgctattggtgccacaattgaaacacaaaatgaggacgctccagcggagaggactatagaggatacctcggttgaggcaccagatgtacaagcaggtgcaagtgagtaaaccagcttagcgatcctttgcattcctgtcagtttctgttgatatcgacgtagtttgctcaactgattctcttgtctagatgatgtgttctgtatagaaaacctggaaccactttagcatcataaggctgttaggttttaaataacttgggcatctatattttgccccttatttttcctatataaacttcatctagttgtattcgatgcgcacgtgtgagtttgtcataaacacaattttctcctatatgtcagttcagtgctcaggcgatcagtgactgagtggaagtctttgggctatctacttggatcaaatgattctggtaccatttgtcgtctgtaaccaactgtgttctcgaatccttctaccatattacctagatt

SEQ ID NO: 207107 - DNA, 6203 bp, Zea Mays
cccgcttgagctcgggccaagagcgccgatacacgatacggcagccgagcacactcttccccttcctgacctccacttcctagctcggccccggctccgcatctatctatctctcgccctgccgtctccggagaccggagctgctctcacatccccacgcgcgcgccctcgaccccgaccacgtcccccgcccgctcggcgctcgcacagattccctcgtccggggagcggcgctgaggtctcgcaccgatgagctcgggggccatcggggcctcggatcctgggggtggcgagacgaagccggtggcgggcggtgacgtcacgacgtcggaagctgcgggcgaggtgcctgctttcgccgccgatgtgaaagtggaggggaaagctacgttggcgacggatgtggatcgtgaagggggagatacggcggtgagcgacccgctctacgcgaacgagtcagctggtatggttggtgccgaaggccacggagatgagcccgcggagggcctggaggcggtgaatggtgaggaggagatgctagaagcaggagctcgtgatctgctcactgagacggagaagaatccggttcttgtggtacatgtgcctgctgctgctgctggtggtggttctgccattcctgaacatgctgaagccgaatctaacaaagttgaagatcatgtaaacgtggagcctgggacaaagaataatgaaagtgataatggcatagctcattttgataaggaaatacagaacaatgtgcctgatgacatagaggaaagctccaaggaacatgaaggtgatggagcacctgtagttgaccagacaaataatgcatctgaaatgctcccacaaaccggagagcagtttcctgatgttgaaaatagcacggacagcaacctagaggctgctagtctgggtagtgtggatcagggtgctagatactgcctgcctcctcatgataaaggcgggtttcaagttgctgatcttgtctggggtaaagtgaaaagtcatccttggtggcctggtgaaatttttgatccatcagatgcatctgaattggctctgaaacatcagaaaaagggcagccacttggtagcttattttggtgacaacacttttgcgtggtgcgatgaatcccagttgaagccttttgtgacaaattattcacaaatggagaaacagagcagttcagatgcctttgttgggtcagttaataatgcacttgaagaactgtcaaggcggatactgtcaggtatgagctgctcttgtttgccagaagagcttgctgataatggcatgtcctatacagttgataatgctgggctcaaggatggagttacttgctctgcagttaatcggcctgaaatcttaaactgtttcagtccagaaaaccttcttcattatattaaggagttagctctatttcctggccaaggaggtgatctgttggagttagttatagcatgttctcaacttacttctttctatcgatctaagggatgtcctgaacttgcatcatttcaaactggcgatgcgtgggttgaggatggtctggattgtacagacactttgtccacccagaatgtaatggttgaggaacctgtgattaatgaagtgcatcctactcaagataagcccaaaaggggcagggggagacctcggaaacaaaaacctggtggtgaccaggtggtgatggagaaaaggagcatatctaatcaggtcaatgatactagctacaatgagaaacaagtgggtatggactttgataactatggcaacctacagaacaagaacaaaagaaactttgaatcatttgaagattcagagaagtcatcagctccaactggtggtagttctttcaagattggtgagtgtattcggcgagctgcaagccagctgacaggatctccgtccattatgaaggctcagaatgctgctgaaggagagaatggggaatttgatatctttagtgatgatgctggtgatgaacttactgtagagaaacgagcaaaaaggagaagtctgcacaggaatcacactgcagatcccaaggaattactatcacagctatgcttggttgcaacagagccaatgaatggatataatttctcagtaatgataatcagttacttcagtgattacagaaactatattgtttctactactactgaagcaaacatcgttgataaaggtacatctaggagagggaggaagagaaaagaagttttaccttctcctgatgtagagacaacagatcatatgcaggactcgtattggtccggattgagcttgcataatcacccaatccatgacctcagaaaagagagtcccactacaaggccaagacgtaggcggagatcctcaagtcatgcatatgtacctttgtcagaacttggggagccagtacctaaaaaacagatacaagtgatggaaagatctatcatccatgttgacgagaagatgattgatgagttgaagcccactgcacttgttttgagctttgccaggtcagcttctattccttcagaattggatcttgttaagatgttcagtcgctttggtccactgaaagaaagggaggcagaagtacacagggaaacaaatactgttaaagttgtcttcaagaaacgtgccgatgctgaaagggcttttagcgctgctggcaagtatggcacttttggaccttcgcttcgaagttaccgtcttgtcagtatgccattttctctagagacacagtcagcaaacaatcctgtgaaacatcctgaaaatcatggcatggagattccaggttcaaatcagtccgaagctcctaaggattccatggaagttgacctggtacagaaaacagatgaagtagaagttgcaggagaaccgtcgtctgaagaagttgagactgtgaggcaaatatctcaagtgcaagctgcagacagtacatttgtcagtcaagacaggtttgatgaagctggaaatattgacgctgagctaattgaccatgttaatcaaattgggaaagctgcacaagctgcatctgtatctgaagagtcacgagatgttgagcaagtttacactcaaaaggaagtgtcagccaatgatctacccacagagacagaaatcttaaattctgatgctataacaaaagagttgcctcagaatgctccagataatgtggaaactgatatagtcgaagatccaaaacagagtcacaattcaagagataatgccgtatttgaagcagtcattgaagcaccgagtactgcacaagatcatacagaggaggatactgggaatgcagttccagaagagcccatggtatctcctgagttacaaagtcaaacccctggtgatctacccacagagacagaaaccttacattctgatgctatattaaaaaagttgcctcagaatgctccagataatatgcaaactgatatagccgaggatccaaaacagagtcacaattcaggagataatgccgtatttgaagcagtcactgaagcaccgagtactgcacaagatcatactgaggatgatactgggaatgaagttccagaagagcacatggtatctcttgagttacaaagtcaaacccctggtgatctacccacagagacagaaaccttacattctgatgctatagtaaaagagttgcctcataatgctccagataatatgcaaactgatatagccgaagatccaaaacagagtcacaatccaggaggtaatgccgtatttgatgcagtcactgaagcaagaagtactacacaagatcatactgaggatgatactgggaatgaagttccagaagaggacatggtatctcttgagttacaaagtcaaacccctggtgatctacccacagagacagaaaccttatattctgatgctatagtaaaagagttgcctcataatgctccagataatctgcaaactgatatagccagagatccaaaacagagtcacaatctaggagataatgctgtatttgaagcagtcactgaagcaccaagtactgcacaagatcatactgaggatgatactgggaatgaagttccagaagagcacatggtatctcctgagttacaaagtcaaacccctggtgatctacccacagagacagaaaccttacattctgatgctatgataaaagagttgcctcagaatgctccaaatagtatgcaaactgacatagctgaagatccaaaacagagtcacaatccaggagataatgccgtatttgaagcagtcactgaagcaccaagtactgcacaagatcatactgaggatgatactggtaataaagttccagaagagcacatggtatctcttgagttacaaagtcaaacccctggtgatccacccacagagacagaaaccttacattctgatgctatagtaaaagagttgcctcataatgctccagataatatgcaaactgatatagcggaagatccaaaacagagtcacaatccaggagatgctgtatttgaagcagtcactgaagcaccaagtactgcacaagatcatactgaggatgatactgggaatgaagttccagaagagcacatggtatctcctgagttacaaagtcaaacccctggtgatctacccacagagacagaaaccttacattctgatgctataatgaaagagttgcctcagattgctccagataatatgcaagttgatatagctgaacatccaaatcagagtcacaattcaggagataatgccgtatttgaagcagtcgctgaagcaccaagtactgcacacgatcatactgaggatgatactgggaatgaagttccagaagaggacatggtatcttctgagttacaaggtcaaacccctggtgagaaactagtggggcaatctgcaactgaacagatggtgggatctgaagatccaaagccgcaagccgaaaattttgttgctgaacctgttgtgctgggtgcagtcgggcaagtagaaattgaactggaatccaaaactactgttgaagtgtcaggcgaacaaggctatagtattgagcagactgttcaagtggaagctctaattgaagcgtcaggtggacaacttgaggtgggaaggcaaattccagaagatgaatctattgcttgtgcaactactgagcactctatggttgtcgatgaaactgtggaggcaaaagtggtactactcgatgagagtatagagaataatgctgctgtcataggagtagtcgaggagactgctgaaggtgaaactaaggaggaagcatcagacgagaagggaaaaatagaaaataatgaagatgctgacaaattagcaccagccgggaaggggaaaatagaaaataatgaaattataattgacgcaccagatgagaaaacagaaaataaagcagatgctgacacaccagctggggagaccaaagaaggtgaaattacagtagaggaaacagatgagaaaatagaatctaaagttactgctgaacctgtaatcggggagacaactgaaggtcaaactgcagctggagaaccagttgaagaagctagaacagctgaggacatggtagaagatgttaaggtgctagatgataaatctacagcagctgagaaacctgtagagaatgccacagttgtggcacatgagaattcgactacagttgagaatactctgaaggatgcgattgtcgcgccaccagatgcaaataccaccaacgccgaaaaaactgctattggtgccacaattgaaacacaaaatgaggacgctccagcggagaggactatagaggatacctcggttgaggcaccagatgtacaagcaggtgcaagtgagtaaaccagcttagcgatcctttgcattcctgtcagtttctgttgatatcgacgtagtttgctcaactgattctcttgtctagatgatgtgttctgtatagaaaacctggaaccactttagcatcataaggctgttaggttttaaataacttgggcatctatattttgccccttatttttcctatataaacttcatctagttgtattcgatgcgcacgtgtgagtttgtcataaacacaattttctcctatatgtcagttcagtgctcaggcgatcagtgactgagtggaagtctttgggctatctacttggatcaaatgattctggtaccatttgtcgtctgtaaccaactgtgttctcgaatccttctaccatattacctagatt

SEQ ID NO: 207108 - DNA, 1821 bp, Zea Mays
agaggatttctattgtagaaatgcagttaggcccattaggttttgcccttttttttcagactcggattggtccgccctccttgtgctccgccggcaatggcgtccaccgccgtcaagctcatcggcaagttcctccgctccctctcccacctcaccgtcctgtatcgtcccctctctaccccggactgaccctctgccttcaccttgccctccacccccctccctccccttctgcggccgtggcgagcaccccaccagacatcgcagtcaacttcacagatggcatgttcaagggcatctaccacggcaagcagtgccacgccgccgacatcccggccgtactcgcgcgcgcgtgggctgcaggcgtcgatcgcatcattgtcaccggaggctccctgaaagagtccagagaggcattgcagatcgccgagaccgacgggagactgttctgcactgtgggagtgcacccaacaagatgcggggaattcgaggagagtggagatcccgagggtcattttcaggcactgctggctctagcgaaggagggtttagataaaggcaaggtcgttgctgttggtgaatgtggtttggattatgacagacttcagttctgtccggcagatatgcaaaagaagtacttcgagaaacaatttgagttggctgaagcagtaaaactgcccatgtttcttcacatgcgtgctgctggtgaagacttctgtgaaatcatgacacggaatttgcacaggtagcatataatctgtattcgattccctggtggggttacacattccttcactgactcagcagaagatcgggacatgctactttcttttgagaagatgtttataggtgttaatggttgctctctgaaaactaacgaaaatcttgaggttctacgaggcattcctgtcgagaggttgatgatagaaacagattctccatattgtgacataagaaatactcatgctggaagccagtatgtaaaatctgtctggccatctaagaagaaagaaaagtatgagccagattcaacagtaaaaggtcgcaatgagccttgtttagttaggcaagttcttgaggtagtggctggaagcaaaggaatttctgacatagaaggcctgagtagaactctgtaccacaacacatgcaggctcttctttcctcaagatcttgacgcttctgctaatgcgcagcttgagagtggtactgccgtccaggattgctgatgtcagagtgatttttttattataaatgtttccttttgactgttgcggcggcgtagggcgggggtaggacagggcgcccacgcggtggcggaggccgacatggtggcgctgcaggttctggaaccggaggctgagaagcggggcaggggcgtaatggcggctgcggtggccatggccggagcgcagagatttatagaatatgacgaatattgaataaattattcactatccaggcgtaggggtgggcattttaaaaccgaacctgaacccgaaccaaacccgaatagaccgaattgtcggtctattcgggttttcgggttcgggttcggttcctatatgtgctatatttcgggatatgtgttcgggttcggttcctaacctttaaaacccaaatagacctaataacccgaaatataaaaaagctcttaatatgtgatggtattattatatgtatgatttataaacttagtagcttgaaataatgatatcatcttaacgatagtatatatatctttgtatgctattttttatagtcacttgtagtaatagtactttcgattaattattcattgtatatattttaacaaaatatact

SEQ ID NO: 207109 - DNA, 2161 bp, Zea Mays
agaggatttctattgtagaaatgcagttaggcccattaggttttgcccttttttttcagactcggattggtccgccctccttgtgctccgccggcaatggcgtccaccgccgtcaagctcatcggcaagttcctccgctccctctcccacctcaccgtcctgtatcgtcccctctctaccccggactgaccctctgccttcaccttgccctccacccccctccctccccttctgcggccgtggcgagcaccccaccagacatcgcagtcaacttcacagatggcatgttcaagggcatctaccacggcaagcagtgccacgccgccgacatcccggccgtactcgcgcgcgcgtgggctgcaggcgtcgatcgcatcattgtcaccggaggctccctgaaagagtccagagaggcattgcagatcgccgagaccgacgggagactgttctgcactgtgggagtgcacccaacaagatgcggggaattcgaggagagtggagatcccgagggtcattttcaggcactgctggctctagcgaaggagggtttagataaaggtcgttgctgttggtgaatgtggtttggattatgacagacttcagttctgtccggcagatatgcaaaagaagtacttcgagaaacaatttgagttggctgaagcagtaaaactgcccatgtttcttcacatgcgtgctgctggtgaagacttctgtgaaatcatgacacggaatttgcacagattccctggtggggttacacattccttcactgactcagcagaagatcgggacatgctactttcttttgagaagatgtttataggtgttaatggttgctctctgaaaactaacgaaaatcttgaggttctacgaggcattcctgtcgagaggttgatgatagaaacagattctccatattgtgacataagaaatactcatgctggaagccagtatgtaaaatctgtctggccatctaagaagaaagaaaagtatgagccagattcaacagtaaaaggtcgcaatgagccttgtttagttaggcaagttcttgaggtagtggctggaagcaaaggaatttctgacatagaaggcctgagtagaactctgtaccacaacacatgcaggctcttctttcctcaagatcttgacgcttctgctaatgcgcagcttgagagtggtactgccgtccaggattgctgatgtcagagtgatttttttattataaatgtttccttttgactggtactgccgtccaggtttcgtacaacttccaatatgcctatgaaatatttttggtcttatatttcccatgtttcatgagcctgatgacatgtcaggcacgttctgactatgtacagccctactgaggctatgtcctaaaatcatttagggctaatttgacaatcatatttttcaaggatttttcattttttttcaagggaaataaattagttcattttctctttaggaaaaatgggaatcccctgagaaaattaagttgtcaaactagctcttaaactgttctttttactgagtatacacaaaacagaggtacaacttgaattgatcacatctttcaaacgtcaattgattcctcggtggctgcagttgcggcggcgtagggcgggggtaggacagggcgcccacgcggtggcggaggccgacatggtggcgctgcaggttctggaaccggaggctgagaagcggggcaggggcgtaatggcggctgcggtggccatggccggagcgcagagatttatagaatatgacgaatattgaataaattattcactatccaggcgtaggggtgggcattttaaaaccgaacctgaacccgaaccaaacccgaatagaccgaattgtcggtctattcgggttttcgggttcgggttcggttcctatatgtgctatatttcgggatatgtgttcgggttcggttcctaacctttaaaacccaaatagacctaataacccgaaatataaaaaagctcttaatatgtgatggtattattatatgtatgatttataaacttagtagcttgaaataatgatatcatcttaacgatagtatatatatctttgtatgctattttttatagtcacttgtagtaatagtactttcgattaattattcattgtatatattttaacaaaatatact

SEQ ID NO: 207110 - DNA, 935 bp, Zea Mays
aggcgtcctacgcgggcgggaagcgggcagacgagcgagccgactggagcgggtggccagatgggtgcgcttgctagaggcaggtagacggacgagcgagcgccgatagacgggtggttgcagttgtcgggtgaactccaacaagcggacatgaagatgagtgccaccaggccaaatgagccgactgcgaagctgtgcagagccgcaaggcaacaggacagagccaccaagcgacgcggtctttgagaccaggctacgacaacttagcatagcgttgcctttaatgtgttgcgcagcagatatgctctctgttccttcaaggaagcaggtagtgatagtggggcagaaaggatctgaagaatttcaggacatggtagcagctacgttttcgtcatatgatccgaatagaacagtgatccaaatcgaccctaggaacacagaagaaatggaattctgggacggcaacaatgcaaacatcgcgcaaatggcacggggcagccctccggggaaaccggcggtggcgcatgtgtgccaggacttcaagtgcagcccgccggtaacctctcctgggtcgcttcgcgagctgctgaacaagacactggctgctgcaagctcagcctgaggccttttgcctcctgctatgttcgtagatgttctgataccagtgtaacaatagttaaaaaaaaacctgtgtacatatttacatgtgagaaatataaataggattgtcagttaagctgtacagcctgttaaagccttctcagctgtacacatgttcacaataataaggcacggagcataatggtttccttttcagcgttttcttcgagttgttttagtcaaagaacaggagcatccaaaattgtaagtcgattggtgaaaactgaccagtttttgcggttgtggaacaacattgaaaacgctgccaacattga

SEQ ID NO: 207111 - DNA, 2283 bp, Zea Mays
caggcccgcgccgcttgcaaccctactctgccttgtcttctcccatcattcccaagcgtgagcaaaaccccaccaccgaagactgccccgccgccgacgcccgcctccatcctctcctccagttcctcctagcgccgccgcccgactccctcctccagcgccggcgcccaaatccctcctccagtgccgtcgccgactctccgcccgcgtccatcctccggttccagcttacattggtccatcctctcctctgccccctcctccatccttcatcagattcagacggtgaagcacccagtcccagttcaggttcaaacacaggacgctccgcacgagctggagatggaggtggaggtggccaaatattcacgggggcagggtgctgacctgaaggcgctgggggacaagaagttgaaagggcagctcagtgtaaaagagaagctatatggccaatctgcaaaagctgctgcaaatgccgaaaagtggcttatgcctaatgatggaggtattttagagcctggtcatttggagaaaacatatagattttcacaagaggatatattgacagaggtggatcttttgagttcaagaaaaccatttgatatgatcttacctgtactcggtccttataatataggatacacctcaaacggccgctacatgctagtaggcggacgaaaaggccaccttgcaatgatggatatgttgcatatggatcttatcaaggagtttgaggtgagggaaactgttcgtgacgtgacattcttacacaatgagcagttgtatgcggtcgctcaaaaaaactcattgaacttcttgtacataatctgaatcttgatgatgtgaggtaggacttaggagcagctgagaattgccatttgaggtatccctacatctataatcgacatggtacagaaatacactgtctgaaggaacatggaaaagcactgaagctccaatttctgtctaaacaattcctcttagcatcgataaacagcttcgggcagctccactaccaagatgtgagcactggcgaaatggttgcaaattataggacaggtctgggccgcaccgatgttatgcggggcaatccttacaatgctgtgattggccttgggcatgctggtggcaaagttaccatgtggaagccaaccagtgtgaaaccccttgttaccatgctgtgtcatcatggcccggtgactgctgttgcatttgacaggggtggcaatctcatggcaacagcaggtgttgacaggaagataaagatctgggacctgaggaagtatgaggttgtgcgttcttacccaatgcgcgctcagtctttggattttagccagaaggggctgttagcctgcagcaatggatctcaggtagagatatacagggatttcggtgggcatgactataggctttacatgaagcacaagatagtgaagggctatcaggtcgggaaggttgtgttccgcccctacgaagacattctggggatcgggcactcgatgggcttctcttccatccttgtcccaggatctggtgagccgaacttcgacacctttgttgacaacccgatggaaactaccaagcagaaacgtgagaaggaggtgcatgctctcctggataaactccctccggagaccattatgctgaacccgaacacgatagccactgtacgagctccgaagaagaaagagaagaagaccaaggaggagattgaggaagagatggcagatgccgtggaggcggccaagaacactgagcgcaagaagaagaccaagggcaggagcaaaccgagcaagcgagccaagaagaaagaggaagacgttttcaaggccaagaggcccttcctggagcaatctgataaggtggatgggcgacctgacaagaagcagcggataggtgaactcccaaaggccttgcagaggtttgccaagaaaccacaatcataatcgtcgtcgttaacacagggttgggatttcacattggtatttccaatatgtagaatttccgcgtgagcacagaagaatgtgccgaaattttgtgctgaactattttggtattccagcgagcatggccgtgtcagctgattttttttttggtgttgttttggttctcatagagtttgttgcattttttcattcaggtgtagttaattcctaggtttagtgtggaccgtctaaggtcctggttggttacaacaagataatcactatctactaaatttgtaggtatatttgaaccaaacaatctagctaatgtactagataaaatttagctaaagctcag

SEQ ID NO: 207112 - DNA, 1347 bp, Zea Mays
gtgtgaatggcttgtgtagttttatttttttgggaaatatacccacatatgtgtttcccttgttatgctctttatcgtctatccacatattttatgttttgtgctatttgccagtcatgactcatgcttgtgctgcttgacaactaagttttctgactgctgctcagcctcaattctcacagcttaaaatatgttgctactaaacttctaatggtcactggttgtcttccatctgccattggttgttcatgcttaacagctcagatggaaaatatctattaacaggtggtgaagatgatcttgtgcaggtatggggcatggatgatagaaagatagttgcttggggtgaaggacataattcatgggtcagtggagttgcttttgattcatattggtccccaccaagttctgatggaaatggagaaaatgtatatcgctttggttctgttgggcaggacacccaactacttctgtgggacctggcactggatgagattgttgtcccactacggcatccttcaagtgcctcacctacgtttagcagcgggagcccttccacacactgggacaatgcatgccctccaacaggtgttcttcaaccttctcctagaatgcgagatgtcccaaaactatcgcccctagttgcccaccgagtacatgccgatcccctatctggtatggtgttcaccagtgaatctatcctcaccatctgccgcgagggcctcatcaaaatctgggttcgaccagagcagagcgaaaacaatcagcaatcgaattcttcagaatttgctttaggccctgcttcgaaggatagggcgatcacatcttccaataaagcaagtagctccagctttaagaagctgccgcctgttcttgtcacatgatgaatcaacgggatggttcttgtggatatttctgcttcacgtggcattagtggtggatatgaatcttactccatggttgatggggatgaaactctcatatggagtctgcagactgcaagtaatgagggtgagcatttgatggttgatgttcccaggaagcagggccagcgttgccagtttttttggcacgaaagagtaaatgggagctcttgtacagacacatacttaatgataaaattgtaaaaactcactgtccgtttcataatattcaatagccaccgaaagatgattggacgaccatgttatcgattttagctggtgggttgatagtatccttaaactttggtacttcggagacttgtaattatggaccataatatctgaggaatgcttcagtcttacctggtgtaagttgtgttactatttccttctgccttttgtcaattattagatctagtttggc

SEQ ID NO: 207113 - DNA, 2522 bp, Zea Mays
ttttatctcttttatgtgtttccccgtttcgttgttttcggttctcctttgcctttgtttcccttttctgttctttgggggttgagctctgaggttttcatacggggtttcatctctagcctaccccaacgtgcttgggacaaaaaaggctttgttgttgttgttgttgttgttgttgttgtataaatagaatgtatattccgtctccaaagtccaaagcagttgttcctcgccgtctcggggtctcggcctctcctcggtctctcctcccagatcgggccatccaggtgctaccgctcttcgccccctccacttcaccgccgccgcgtagatccgtctccgcctcctggaagcgctaccagtggaccaacgccgagccggcggagttagcggcgttagggttgcggttgggaattgattgcgggggacgcagcggtggcgcctggcatggcgggggcgcccggggtcgggccgggtgcggggggtgggggcggcgccgctgcggggctcaagacttacttcaagacgcccgaggggaggtacaagctgcagtacgagaaggcgcactccgcggtgctgcactacagccacggcggcaagaccgtctcgcagttgacagtggcatacctcaaggagaagcctgctagccagggctctcagccatcaacaccaagcgccagcagtgggatgcggtctgcagcagcaaggctgctgggcactgggaatgggagcaaggcacttagctttggtggcggtaatggtgcaagccgagctgttgctggaagcagccgtgtaggaggcggccttggtacacctacaggccttggtggatcacaggggggcacaaattatgatggcaagggtacatatattgtattcaatgctgctgatacactattcatcagtgatctcaattcccaggagaaggatccactaaagtccatccatttcagcaactcaaacccactgtgccatgcattcgacccagaggccaaagagggacacgacctgatcattgggatgggatcaggggatgtctattcaatgtcgctgaggcaacagttacaagatcctggaagaaaacccgtggcagctctacattacaataagggtgataaagatgtctcacccaatggaagacatgatcaaggtagcataggtacatgtctgaacaaggatgggaacacagactgtacgtttccagctgtcaaggatcagtctcagtttatggttgcacatgcaaagtcgagtaagagcaacccagtcgctaggtggcatatatgtcaaggttcgatcaatgcaatttccttttcaccagatggcgcatacttggcgactgttgggagagatggttatttgagagtattcgatttttcaaaggaacaactaatatttggtggaagaagttattatggtgcactgttgtgttgcacttggagctcagatggaaaatatctattaacaggtggtgaagatgatcttgtgcaggtatggggcatggatgatagaaagatagttgcttggggtgaaggacataattcatggtggagttgcttttgattcatattggtccccaccaagttctgatggaaatggagaaaatgtatatcgctttggttctgttgggcaggacacccaactacttctgtgggacctggcactggatgagattgttgtcccactacggcatccttcaagtgcctcacctacgtttagcagcgggagcccttccacacactgggacaatgcatgccctccaacaggtgttcttcaaccttctcctagaatgcgagatgtcccaaaactatcgcccctagttgcccaccgagtacatgccgatcccctatctggtatggtgttcaccagtgaatctatcctcaccatctgccgcgagggcctcatcaaaatctgggttcgaccagagcagagcgaaaacaatcagcaatcgaattcttcagaatttgctttaggccctgcttcgaaggatagggcgatcacatcttccaataaagcaagtagctccagctttaagaagctgccgcctgttcttgtcacatgatgaatcaacgggatggttcttgtggatatttctgcttcacgtggcattagtggtggatatgaatcttactccatggttgatggggatgaaactctcatatggagtctgcagactgcaagtaatgagggtgagcatttgatggttgatgttcccaggaagcagggccagcgttgccagtttttttggcacgaaagagtaaatgggagctcttgtacagacacatacttaatgataaaattgtaaaaactcactgtccgtttcataatattcaatagccaccgaaagatgattggacgaccatgttatcgattttagctggtgggttgatagtatccttaaactttggtacttcggagacttgtaattatggaccataatatctgaggaatgcttcagtcttacctggtgtaagttgtgttactatttccttctgccttttgtcaattattagatctagtttggc

SEQ ID NO: 207114 - DNA, 2530 bp, Zea Mays
ttttatctcttttatgtgtttccccgtttcgttgttttcggttctcctttgcctttgtttcccttttctgttctttgggggttgagctctgaggttttcatacggggtttcatctctagcctaccccaacgtgcttgggacaaaaaaggctttgttgttgttgttgttgttgttgttgttgtataaatagaatgtatattccgtctccaaagtccaaagcagttgttcctcgccgtctcggggtctcggcctctcctcggtctctcctcccagatcgggccatccaggtgctaccgctcttcgccccctccacttcaccgccgccgcgtagatccgtctccgcctcctggaagcgctaccagtggaccaacgccgagccggcggagttagcggcgttagggttgcggttgggaattgattgcgggggacgcagcggtggcgcctggcatggcgggggcgcccggggtcgggccgggtgcggggggtgggggcggcgccgctgcggggctcaagacttacttcaagacgcccgaggggaggtacaagctgcagtacgagaaggcgcactccgcggtgctgcactacagccacggcggcaagaccgtctcgcagttgacagtggcatacctcaaggagaagcctgctagccagggctctcagccatcaacaccaagcgccagcagtgggatgcggtctgcagcagcaaggctgctgggcactgggaatgggagcaaggcacttagctttggtggcggtaatggtgcaagccgagctgttgctggaagcagccgtgtaggaggcggccttggtacacctacaggccttggtggatcacaggggggcacaaattatgatggcaagggtacatatattgtattcaatgctgctgatacactattcatcagtgatctcaattcccaggagaaggatccactaaagtccatccatttcagcaactcaaacccactgtgccatgcattcgacccagaggccaaagagggacacgacctgatcattgggatgggatcaggggatgtctattcaatgtcgctgaggcaacagttacaagatcctggaagaaaacccgtggcagctctacattacaataagggtgataaagatgtctcacccaatggaagtcgttgcacttctgtcgcatggggtgccagagcgtgaaggcattttcgtttgttagccatttctgatggaaatttgtacgtgtatgataaaaacaaggatgggaacacagactgtacgtttccagctgtcaaggatcagtctcagtttatggttgcacatgcaaagtcgagtaagagcaacccagtcgctaggtggcatatatgtcaaggttcgatcaatgcaatttccttttcaccagatggcgcatacttggcgactgttgggagagatggttatttgagagtattcgatttttcaaaggaacaactaatatttggtggaagaagttattatggtgcactgttgtgttgcacttggagctcagatggaaaatatctattaacaggtggtgaagatgatcttgtgcaggtcagtggagttgcttttgattcatattggtccccaccaagttctgatggaaatggagaaaatgtatatcgctttggttctgttgggcaggacacccaactacttctgtgggacctggcactggatgagattgttgtcccactacggcatccttcaagtgcctcacctacgtttagcagcgggagcccttccacacactgggacaatgcatgccctccaacaggtgttcttcaaccttctcctagaatgcgagatgtcccaaaactatcgcccctagttgcccaccgagtacatgccgatcccctatctggtatggtgttcaccagtgaatctatcctcaccatctgccgcgagggcctcatcaaaatctgggttcgaccagagcagagcgaaaacaatcagcaatcgaattcttcagaatttgctttaggccctgcttcgaaggatagggcgatcacatcttccaataaagcaagtagctccagctttaagaagctgccgcctgttcttgtcacatgatgaatcaacgggatggttcttgtggatatttctgcttcacgtggcattagtggtggatatgaatcttactccatggttgatggggatgaaactctcatatggagtctgcagactgcaagtaatgagggtgagcatttgatggttgatgttcccaggaagcagggccagcgttgccagtttttttggcacgaaagagtaaatgggagctcttgtacagacacatacttaatgataaaattgtaaaaactcactgtccgtttcataatattcaatagccaccgaaagatgattggacgaccatgttatcgattttagctggtgggttgatagtatccttaaactttggtacttcggagacttgtaattatggaccataatatctgaggaatgcttcagtcttacctggtgtaagttgtgttactatttccttctgccttttgtcaattattagatctagtttggc

SEQ ID NO: 207115 - DNA, 2605 bp, Zea Mays
ttttatctcttttatgtgtttccccgtttcgttgttttcggttctcctttgcctttgtttcccttttctgttctttgggggttgagctctgaggttttcatacggggtttcatctctagcctaccccaacgtgcttgggacaaaaaaggctttgttgttgttgttgttgttgttgttgttgtataaatagaatgtatattccgtctccaaagtccaaagcagttgttcctcgccgtctcggggtctcggcctctcctcggtctctcctcccagatcgggccatccaggtgctaccgctcttcgccccctccacttcaccgccgccgcgtagatccgtctccgcctcctggaagcgctaccagtggaccaacgccgagccggcggagttagcggcgttagggttgcggttgggaattgattgcgggggacgcagcggtggcgcctggcatggcgggggcgcccggggtcgggccgggtgcggggggtgggggcggcgccgctgcggggctcaagacttacttcaagacgcccgaggggaggtacaagctgcagtacgagaaggcgcactccgcggtgctgcactacagccacggcggcaagaccgtctcgcagttgacagtggcatacctcaaggagaagcctgctagccagggctctcagccatcaacaccaagcgccagcagtgggatgcggtctgcagcagcaaggctgctgggcactgggaatgggagcaaggcacttagctttggtggcggtaatggtgcaagccgagctgttgctggaagcagccgtgtaggaggcggccttggtacacctacaggccttggtggatcacaggggggcacaaattatgatggcaagggtacatatattgtattcaatgctgctgatacactattcatcagtgatctcaattcccaggagaaggatccactaaagtccatccatttcagcaactcaaacccactgtgccatgcattcgacccagaggccaaagagggacacgacctgatcattgggatgggatcaggggatgtctattcaatgtcgctgaggcaacagttacaagatcctggaagaaaacccgtggcagctctacattacaataagggtgataaagatgtctcacccaatggaagacatgatcaaggtagcataggtacatgtctgaacaaggatgggaacacagactgtacgtttccagctgtcaaggatcagtctcagtttatggttgcacatgcaaagtcgagtaagagcaacccagtcgctaggtggcatatatgtcaaggttcgatcaatgcaatttccttttcaccagatggcgcatacttggcgactgttgggagagatggttatttgagagtattcgatttttcaaaggaacaactaatatttggtggaagaagttattatggtgcactgttgtgttgcacttggagctcagatggaaaatatctattaacaggtggtgaagatgatcttgtgcaggtatggggcatggatgatagaaagatagttgcttggggtgaaggacataattcatgggtcagtggagttgcttttgattcatattggtccccaccaagttctgatggaaatggagaaaatgtatatcgctttggttctgttgggcagatcagggataagaattacttcttttcagtactgatggggttattttctcatgatgttttgaaagtaatttatgtttttgacacccaactacttctgtgggacctggcactggatgagattgttgtcccactacggcatccttcaagtgcctcacctacgtttagcagcgggagcccttccacacactgggacaatgcatgccctccaacaggtgttcttcaaccttctcctagaatgcgagatgtcccaaaactatcgcccctagttgcccaccgagtacatgccgatcccctatctggtatggtgttcaccagtgaatctatcctcaccatctgccgcgagggcctcatcaaaatctgggttcgaccagagcagagcgaaaacaatcagcaatcgaattcttcagaatttgctttaggccctgcttcgaaggatagggcgatcacatcttccaataaagcaagtagctccagctttaagaagctgccgcctgttcttgtcacatgatgaatcaacgggatggttcttgtggatatttctgcttcacgtggcattagtggtggatatgaatcttactccatggttgatggggatgaaactctcatatggagtctgcagactgcaagtaatgagggtgagcatttgatggttgatgttcccaggaagcagggccagcgttgccagtttttttggcacgaaagagtaaatgggagctcttgtacagacacatacttaatgataaaattgtaaaaactcactgtccgtttcataatattcaatagccaccgaaagatgattggacgaccatgttatcgattttagctggtgggttgatagtatccttaaactttggtacttcggagacttgtaattatggaccataatatctgaggaatgcttcagtcttacctggtgtaagttgtgttactatttccttctgccttttgtcaattattagatctagtttggc

SEQ ID NO: 207116 - DNA, 2527 bp, Zea Mays
ttttatctcttttatgtgtttccccgtttcgttgttttcggttctcctttgcctttgtttcccttttctgttctttgggggttgagctctgaggttttcatacggggtttcatctctagcctaccccaacgtgcttgggacaaaaaaggctttgttgttgttgttgttgttgttgttgttgtataaatagaatgtatattccgtctccaaagtccaaagcagttgttcctcgccgtctcggggtctcggcctctcctcggtctctcctcccagatcgggccatccaggtgctaccgctcttcgccccctccacttcaccgccgccgcgtagatccgtctccgcctcctggaagcgctaccagtggaccaacgccgagccggcggagttagcggcgttagggttgcggttgggaattgattgcgggggacgcagcggtggcgcctggcatggcgggggcgcccggggtcgggccgggtgcggggggtgggggcggcgccgctgcggggctcaagacttacttcaagacgcccgaggggaggtacaagctgcagtacgagaaggcgcactccgcggtgctgcactacagccacggcggcaagaccgtctcgcagttgacagtggcatacctcaaggagaagcctgctagccagggctctcagccatcaacaccaagcgccagcagtgggatgcggtctgcagcagcaaggctgctgggcactgggaatgggagcaaggcacttagctttggtggcggtaatggtgcaagccgagctgttgctggaagcagccgtgtaggaggcggccttggtacacctacaggccttggtggatcacaggggggcacaaattatgatggcaagggtacatatattgtattcaatgctgctgatacactattcatcagtgatctcaattcccaggagaaggatccactaaagtccatccatttcagcaactcaaacccactgtgccatgcattcgacccagaggccaaagagggacacgacctgatcattgggatgggatcaggggatgtctattcaatgtcgctgaggcaacagttacaagatcctggaagaaaacccgtggcagctctacattacaataagggtgataaagatgtctcacccaatggaagacatgatcaaggtagcataggtacatgtctgaacaaggatgggaacacagactgtacgtttccagctgtcaaggatcagtctcagtttatggttgcacatgcaaagtcgagtaagagcaacccagtcgctaggtggcatatatgtcaaggttcgatcaatgcaatttccttttcaccagatggcgcatacttggcgactgttgggagagatggttatttgagagtattcgatttttcaaaggaacaactaatatttggtggaagaagttattatggtgcactgttgtgttgcacttggagctcagatggaaaatatctattaacaggtggtgaagatgatcttgtgcaggtatggggcatggatgatagaaagatagttgcttggggtgaaggacataattcatgggtcagtggagttgcttttgattcatattggtccccaccaagttctgatggaaatggagaaaatgtatatcgctttggttctgttgggcaggacacccaactacttctgtgggacctggcactggatgagattgttgtcccactacggcatccttcaagtgcctcacctacgtttagcagcgggagcccttccacacactgggacaatgcatgccctccaacaggtgttcttcaaccttctcctagaatgcgagatgtcccaaaactatcgcccctagttgcccaccgagtacatgccgatcccctatctggtatggtgttcaccagtgaatctatcctcaccatctgccgcgagggcctcatcaaaatctgggttcgaccagagcagagcgaaaacaatcagcaatcgaattcttcagaatttgctttaggccctgcttcgaaggatagggcgatcacatcttccaataaagcaagtagctccagctttaagaagctgccgcctgttcttgtcacatgatgaatcaacgggatggttcttgtggatatttctgcttcacgtggcattagtggtggatatgaatcttactccatggttgatggggatgaaactctcatatggagtctgcagactgcaagtaatgagggtgagcatttgatggttgatgttcccaggaagcagggccagcgttgccagtttttttggcacgaaagagtaaatgggagctcttgtacagacacatacttaatgataaaattgtaaaaactcactgtccgtttcataatattcaatagccaccgaaagatgattggacgaccatgttatcgattttagctggtgggttgatagtatccttaaactttggtacttcggagacttgtaattatggaccataatatctgaggaatgcttcagtcttacctggtgtaagttgtgttactatttccttctgccttttgtcaattattagatctagtttggc

SEQ ID NO: 207117 - DNA, 2582 bp, Zea Mays
ttttatctcttttatgtgtttccccgtttcgttgttttcggttctcctttgcctttgtttcccttttctgttctttgggggttgagctctgaggttttcatacggggtttcatctctagcctaccccaacgtgcttgggacaaaaaaggctttgttgttgttgttgttgttgttgttgttgtataaatagaatgtatattccgtctccaaagtccaaagcagttgttcctcgccgtctcggggtctcggcctctcctcggtctctcctcccagatcgggccatccaggtgctaccgctcttcgccccctccacttcaccgccgccgcgtagatccgtctccgcctcctggaagcgctaccagtggaccaacgccgagccggcggagttagcggcgttagggttgcggttgggaattgattgcgggggacgcagcggtggcgcctggcatggcgggggcgcccggggtcgggccgggtgcggggggtgggggcggcgccgctgcggggctcaagacttacttcaagacgcccgaggggaggtacaagctgcagtacgagaaggcgcactccgcggtgctgcactacagccacggcggcaagaccgtctcgcagttgacagtggcatacctcaaggagaagcctgctagccagggctctcagccatcaacaccaagcgccagcagtgggatgcggtctgcagcagcaaggctgctgggcactgggaatgggagcaaggcacttagctttggtggcggtaatggtgcaagccgagctgttgctggaagcagccgtgtaggaggcggccttggtacacctacaggccttggtggatcacaggggggcacaaattatgatggcaagggtacatatattgtattcaatgctgctgatacactattcatcagtgatctcaattcccaggagaaggatccactaaagtccatccatttcagcaactcaaacccactgtgccatgcattcgacccagaggccaaagagggacacgacctgatcattgggatgggatcaggggatgtctattcaatgtcgctgaggcaacagttacaagatcctggaagaaaacccgtggcagctctacattacaataagggtgataaagatgtctcacccaatggaagtcgttgcacttctgtcgcatggggtgccagagcgtgaaggcattttcgtttgttagccatttctgatggaaatttgtacgtgtatgataaaaacaaggatgggaacacagactgtacgtttccagctgtcaaggatcagtctcagtttatggttgcacatgcaaagtcgaagcaacccagtcgctaggtggcatatatgtcaaggttcgatcaatgcaatttccttttcaccagatggcgcatacttggcgactgttgggagagatggttatttgagagtattcgatttttcaaaggaacaactaatatttggtggaagaagttattatggtgcactgttgtgttgcacttggagctcagatggaaaatatctattaacaggtggtgaagatgatcttgtgcaggtatggggcatggatgatagaaagatagttgcttggggtgaaggacataattcatgggtcagtggagttgcttttgattcatattggtccccaccaagttctgatggaaatggagaaaatgtatatcgctttggttctgttgggcaggacacccaactacttctgtgggacctggcactggatgagattgttgtcccactacggcatccttcaagtgcctcacctacgtttagcagcgggagcccttccacacactgggacaatgcatgccctccaacaggtgttcttcaaccttctcctagaatgcgagatgtcccaaaactatcgcccctagttgcccaccgagtacatgccgatcccctatctggtatggtgttcaccagtgaatctatcctcaccatctgccgcgagggcctcatcaaaatctgggttcgaccagagcagagcgaaaacaatcagcaatcgaattcttcagaatttgctttaggccctgcttcgaaggatagggcgatcacatcttccaataaagcaagtagctccagctttaagaagctgccgcctgttcttgtcacatgatgaatcaacgggatggttcttgtggatatttctgcttcacgtggcattagtggtggatatgaatcttactccatggttgatggggatgaaactctcatatggagtctgcagactgcaagtaatgagggtgagcatttgatggttgatgttcccaggaagcagggccagcgttgccagtttttttggcacgaaagagtaaatgggagctcttgtacagacacatacttaatgataaaattgtaaaaactcactgtccgtttcataatattcaatagccaccgaaagatgattggacgaccatgttatcgattttagctggtgggttgatagtatccttaaactttggtacttcggagacttgtaattatggaccataatatctgaggaatgcttcagtcttacctggtgtaagttgtgttactatttccttctgccttttgtcaattattagatctagtttggc

SEQ ID NO: 207118 - DNA, 2587 bp, Zea Mays
ttttatctcttttatgtgtttccccgtttcgttgttttcggttctcctttgcctttgtttcccttttctgttctttgggggttgagctctgaggttttcatacggggtttcatctctagcctaccccaacgtgcttgggacaaaaaaggctttgttgttgttgttgttgttgttgttgttgtataaatagaatgtatattccgtctccaaagtccaaagcagttgttcctcgccgtctcggggtctcggcctctcctcggtctctcctcccagatcgggccatccaggtgctaccgctcttcgccccctccacttcaccgccgccgcgtagatccgtctccgcctcctggaagcgctaccagtggaccaacgccgagccggcggagttagcggcgttagggttgcggttgggaattgattgcgggggacgcagcggtggcgcctggcatggcgggggcgcccggggtcgggccgggtgcggggggtgggggcggcgccgctgcggggctcaagacttacttcaagacgcccgaggggaggtacaagctgcagtacgagaaggcgcactccgcggtgctgcactacagccacggcggcaagaccgtctcgcagttgacagtggcatacctcaaggagaagcctgctagccagggctctcagccatcaacaccaagcgccagcagtgggatgcggtctgcagcagcaaggctgctgggcactgggaatgggagcaaggcacttagctttggtggcggtaatggtgcaagccgagctgttgctggaagcagccgtgtaggaggcggccttggtacacctacaggccttggtggatcacaggggggcacaaattatgatggcaagggtacatatattgtattcaatgctgctgatacactattcatcagtgatctcaattcccaggagaaggatccactaaagtccatccatttcagcaactcaaacccactgtgccatgcattcgacccagaggccaaagagggacacgacctgatcattgggatgggatcaggggatgtctattcaatgtcgctgaggcaacagttacaagatcctggaagaaaacccgtggcagctctacattacaataagggtgataaagatgtctcacccaatggaagtcgttgcacttctgtcgcatggggtgccagagcgtgaaggcattttcgtttgttagccatttctgatggaaatttgtacgtgtatgataaaaacaaggatgggaacacagactgtacgtttccagctgtcaaggatcagtctcagtttatggttgcacatgcaaagtcgagtaagagcaacccagtcgctaggtggcatatatgtcaaggttcgatcaatgcaatttccttttcaccagatggcgcatacttggcgactgttgggagagatggttatttgagagtattcgatttttcaaaggaacaactaatatttggtggaagaagttattatggtgcactgttgtgttgcacttggagctcagatggaaaatatctattaacaggtggtgaagatgatcttgtgcaggtatggggcatggatgatagaaagatagttgcttggggtgaaggacataattcatgggtcagtggagttgcttttgattcatattggtccccaccaagttctgatggaaatggagaaaatgtatatcgctttggttctgttgggcaggacacccaactacttctgtgggacctggcactggatgagattgttgtcccactacggcatccttcaagtgcctcacctacgtttagcagcgggagcccttccacacactgggacaatgcatgccctccaacaggtgttcttcaaccttctcctagaatgcgagatgtcccaaaactatcgcccctagttgcccaccgagtacatgccgatcccctatctggtatggtgttcaccagtgaatctatcctcaccatctgccgcgagggcctcatcaaaatctgggttcgaccagagcagagcgaaaacaatcagcaatcgaattcttcagaatttgctttaggccctgcttcgaaggatagggcgatcacatcttccaataaagcaagtagctccagctttaagaagctgccgcctgttcttgtcacatgatgaatcaacgggatggttcttgtggatatttctgcttcacgtggcattagtggtggatatgaatcttactccatggttgatggggatgaaactctcatatggagtctgcagactgcaagtaatgagggtgagcatttgatggttgatgttcccaggaagcagggccagcgttgccagtttttttggcacgaaagagtaaatgggagctcttgtacagacacatacttaatgataaaattgtaaaaactcactgtccgtttcataatattcaatagccaccgaaagatgattggacgaccatgttatcgattttagctggtgggttgatagtatccttaaactttggtacttcggagacttgtaattatggaccataatatctgaggaatgcttcagtcttacctggtgtaagttgtgttactatttccttctgccttttgtcaattattagatctagtttggc

SEQ ID NO: 207119 - DNA, 2470 bp, Zea Mays
ttttatctcttttatgtgtttccccgtttcgttgttttcggttctcctttgcctttgtttcccttttctgttctttgggggttgagctctgaggttttcatacggggtttcatctctagcctaccccaacgtgcttgggacaaaaaaggctttgttgttgttgttgttgttgttgttgttgtataaatagaatgtatattccgtctccaaagtccaaagcagttgttcctcgccgtctcggggtctcggcctctcctcggtctctcctcccagatcgggccatccaggtgctaccgctcttcgccccctccacttcaccgccgccgcgtagatccgtctccgcctcctggaagcgctaccagtggaccaacgccgagccggcggagttagcggcgttagggttgcggttgggaattgattgcgggggacgcagcggtggcgcctggcatggcgggggcgcccggggtcgggccgggtgcggggggtgggggcggcgccgctgcggggctcaagacttacttcaagacgcccgaggggaggtacaagctgcagtacgagaaggcgcactccgcggtgctgcactacagccacggcggcaagaccgtctcgcagttgacagtggcatacctcaaggagaagcctgctagccagggctctcagccatcaacaccaagcgccagcagtgggatgcggtctgcagcagcaaggctgctgggcactgggaatgggagcaaggcacttagctttggtggcggtaatggtgcaagccgagctgttgctggaagcagccgtgtaggaggcggccttggtacacctacaggccttggtggatcacaggggggcacaaattatgatggcaagggtacatatattgtattcaatgctgctgatacactattcatcagtgatctcaattcccaggagaaggatccactaaagtccatccatttcagcaactcaaacccactgtgccatgcattcgacccagaggccaaagagggacacgacctgatcattgggatgggatcaggggatgtctattcaatgtcgctgaggcaacagttacaagatcctggaagaaaacccgtggcagctctacattacaataagggtgataaagatgtctcacccaatggaagacatgatcaaggtagcataggtacatgtctgaacaaggatgggaacacagactgtacgtttccagctgtcaaggatcagtctcagtttatggttgcacatgcaaagtcgagtaagagcaacccagtcgctaggtggcatatatgtcaaggttcgatcaatgcaatttccttttcaccagatggcgcatacttggcgactgttgggagagatggttatttgagagtattcgatttttcaaaggaacaactaatatttggtggaagaagttattatggtgcactgttgtgttgcacttggagctcagatggaaaatatctattaacaggtggtgaagatgatcttgtgcaggtcagtggagttgcttttgattcatattggtccccaccaagttctgatggaaatggagaaaatgtatatcgctttggttctgttgggcaggacacccaactacttctgtgggacctggcactggatgagattgttgtcccactacggcatccttcaagtgcctcacctacgtttagcagcgggagcccttccacacactgggacaatgcatgccctccaacaggtgttcttcaaccttctcctagaatgcgagatgtcccaaaactatcgcccctagttgcccaccgagtacatgccgatcccctatctggtatggtgttcaccagtgaatctatcctcaccatctgccgcgagggcctcatcaaaatctgggttcgaccagagcagagcgaaaacaatcagcaatcgaattcttcagaatttgctttaggccctgcttcgaaggatagggcgatcacatcttccaataaagcaagtagctccagctttaagaagctgccgcctgttcttgtcacatgatgaatcaacgggatggttcttgtggatatttctgcttcacgtggcattagtggtggatatgaatcttactccatggttgatggggatgaaactctcatatggagtctgcagactgcaagtaatgagggtgagcatttgatggttgatgttcccaggaagcagggccagcgttgccagtttttttggcacgaaagagtaaatgggagctcttgtacagacacatacttaatgataaaattgtaaaaactcactgtccgtttcataatattcaatagccaccgaaagatgattggacgaccatgttatcgattttagctggtgggttgatagtatccttaaactttggtacttcggagacttgtaattatggaccataatatctgaggaatgcttcagtcttacctggtgtaagttgtgttactatttccttctgccttttgtcaattattagatctagtttggc

SEQ ID NO: 207120 - DNA, 2262 bp, Zea Mays
ttttatctcttttatgtgtttccccgtttcgttgttttcggttctcctttgcctttgtttcccttttctgttctttgggggttgagctctgaggttttcatacggggtttcatctctagcctaccccaacgtgcttgggacaaaaaaggctttgttgttgttgttgttgttgttgttgttgtataaatagaatgtatattccgtctccaaagtccaaagcagttgttcctcgccgtctcggggtctcggcctctcctcggtctctcctcccagatcgggccatccagttgacagtggcatacctcaaggagaagcctgctagccagggctctcagccatcaacaccaagcgccagcagtgggatgcggtctgcagcagcaaggctgctgggcactgggaatgggagcaaggcacttagctttggtggcggtaatggtgcaagccgagctgttgctggaagcagccgtgtaggaggcggccttggtacacctacaggccttggtggatcacaggggggcacaaattatgatggcaagggtacatatattgtattcaatgctgctgatacactattcatcagtgatctcaattcccaggagaaggatccactaaagtccatccatttcagcaactcaaacccactgtgccatgcattcgacccagaggccaaagagggacacgacctgatcattgggatgggatcaggggatgtctattcaatgtcgctgaggcaacagttacaagatcctggaagaaaacccgtggcagctctacattacaataagggtgataaagatgtctcacccaatggaagtcgttgcacttctgtcgcatggggtgccagagcgtgaaggcattttcgtttgttagccatttctgatggaaatttgtacgtgtatgataaaaacaaggatgggaacacagactgtacgtttccagctgtcaaggatcagtctcagtttatggttgcacatgcaaagtcgagtaagagcaacccagtcgctaggtggcatatatgtcaaggttcgatcaatgcaatttccttttcaccagatggcgcatacttggcgactgttgggagagatggttatttgagagtattcgatttttcaaaggaacaactaatatttggtggaagaagttattatggtgcactgttgtgttgcacttggagctcagatggaaaatatctattaacaggtggtgaagatgatcttgtgcaggtatggggcatggatgatagaaagatagttgcttggggtgaaggacataattcatgggtcagtggagttgcttttgattcatattggtccccaccaagttctgatggaaatggagaaaatgtatatcgctttggttctgttgggcaggacacccaactacttctgtgggacctggcactggatgagattgttgtcccactacggcatccttcaagtgcctcacctacgtttagcagcgggagcccttccacacactgggacaatgcatgccctccaacaggtgttcttcaaccttctcctagaatgcgagatgtcccaaaactatcgcccctagttgcccaccgagtacatgccgatcccctatctggtatggtgttcaccagtgaatctatcctcaccatctgccgcgagggcctcatcaaaatctgggttcgaccagagcagagcgaaaacaatcagcaatcgaattcttcagaatttgctttaggccctgcttcgaaggatagggcgatcacatcttccaataaagcaagtagctccagctttaagaagctgccgcctgttcttgtcacatgatgaatcaacgggatggttcttgtggatatttctgcttcacgtggcattagtggtggatatgaatcttactccatggttgatggggatgaaactctcatatggagtctgcagactgcaagtaatgagggtgagcatttgatggttgatgttcccaggaagcagggccagcgttgccagtttttttggcacgaaagagtaaatgggagctcttgtacagacacatacttaatgataaaattgtaaaaactcactgtccgtttcataatattcaatagccaccgaaagatgattggacgaccatgttatcgattttagctggtgggttgatagtatccttaaactttggtacttcggagacttgtaattatggaccataatatctgaggaatgcttcagtcttacctggtgtaagttgtgttactatttccttctgccttttgtcaattattagatctagtttggc

SEQ ID NO: 207121 - DNA, 2608 bp, Zea Mays
ttttatctcttttatgtgtttccccgtttcgttgttttcggttctcctttgcctttgtttcccttttctgttctttgggggttgagctctgaggttttcatacggggtttcatctctagcctaccccaacgtgcttgggacaaaaaaggctttgttgttgttgttgttgttgttgttgttgtataaatagaatgtatattccgtctccaaagtccaaagcagttgttcctcgccgtctcggggtctcggcctctcctcggtctctcctcccagatcgggccatccaggtgctaccgctcttcgccccctccacttcaccgccgccgcgtagatccgtctccgcctcctggaagcgctaccagtggaccaacgccgagccggcggagttagcggcgttagggttgcggttgggaattgattgcgggggacgcagcggtggcgcctggcatggcgggggcgcccggggtcgggccgggtgcggggggtgggggcggcgccgctgcggggctcaagacttacttcaagacgcccgaggggaggtacaagctgcagtacgagaaggcgcactccgcggtgctgcactacagccacggcggcaagaccgtctcgcagttgacagtggcatacctcaaggagaagcctgctagccagggctctcagccatcaacaccaagcgccagcagtgggatgcggtctgcagcagcaaggctgctgggcactgggaatgggagcaaggcacttagctttggtggcggtaatggtgcaagccgagctgttgctggaagcagccgtgtaggaggcggccttggtacacctacaggccttggtggatcacaggggggcacaaattatgatggcaagggtacatatattgtattcaatgctgctgatacactattcatcagtgatctcaattcccaggagaaggatccactaaagtccatccatttcagcaactcaaacccactgtgccatgcattcgacccagaggccaaagagggacacgacctgatcattgggatgggatcaggggatgtctattcaatgtcgctgaggcaacagttacaagatcctggaagaaaacccgtggcagctctacattacaataagggtgataaagatgtctcacccaatggaagtcgttgcacttctgtcgcatggggtgccagagcgtgaaggcattttcgtttgttagccatttctgatggaaatttgtacgtgtatgataaaaacaaggatgggaacacagactgtacgtttccagctgtcaaggatcagtctcagtttatggttgcacatgcaaagtcgagtaagagcaacccagtcgctaggtggcatatatgtcaaggttcgatcaatgcaatttccttttcaccagatggcgcatacttggcgactgttgggagagatggttatttgagagtattcgatttttcaaaggaacaactaatatttggtggaagaagttattatggtgcactgttgtgttgcacttggagctcagatggaaaatatctattaacaggtggtgaagatgatcttgtgcaggtcagtggagttgcttttgattcatattggtccccaccaagttctgatggaaatggagaaaatgtatatcgctttggttctgttgggcagatcagggataagaattacttcttttcagtactgatggggttattttctcatgatgttttgaaagtaatttatgtttttgacacccaactacttctgtgggacctggcactggatgagattgttgtcccactacggcatccttcaagtgcctcacctacgtttagcagcgggagcccttccacacactgggacaatgcatgccctccaacaggtgttcttcaaccttctcctagaatgcgagatgtcccaaaactatcgcccctagttgcccaccgagtacatgccgatcccctatctggtatggtgttcaccagtgaatctatcctcaccatctgccgcgagggcctcatcaaaatctgggttcgaccagagcagagcgaaaacaatcagcaatcgaattcttcagaatttgctttaggccctgcttcgaaggatagggcgatcacatcttccaataaagcaagtagctccagctttaagaagctgccgcctgttcttgtcacatgatgaatcaacgggatggttcttgtggatatttctgcttcacgtggcattagtggtggatatgaatcttactccatggttgatggggatgaaactctcatatggagtctgcagactgcaagtaatgagggtgagcatttgatggttgatgttcccaggaagcagggccagcgttgccagtttttttggcacgaaagagtaaatgggagctcttgtacagacacatacttaatgataaaattgtaaaaactcactgtccgtttcataatattcaatagccaccgaaagatgattggacgaccatgttatcgattttagctggtgggttgatagtatccttaaactttggtacttcggagacttgtaattatggaccataatatctgaggaatgcttcagtcttacctggtgtaagttgtgttactatttccttctgccttttgtcaattattagatctagtttggc

SEQ ID NO: 207122 - DNA, 2548 bp, Zea Mays
ttttatctcttttatgtgtttccccgtttcgttgttttcggttctcctttgcctttgtttcccttttctgttctttgggggttgagctctgaggttttcatacggggtttcatctctagcctaccccaacgtgcttgggacaaaaaaggctttgttgttgttgttgttgttgttgttgttgtataaatagaatgtatattccgtctccaaagtccaaagcagttgttcctcgccgtctcggggtctcggcctctcctcggtctctcctcccagatcgggccatccaggtgctaccgctcttcgccccctccacttcaccgccgccgcgtagatccgtctccgcctcctggaagcgctaccagtggaccaacgccgagccggcggagttagcggcgttagggttgcggttgggaattgattgcgggggacgcagcggtggcgcctggcatggcgggggcgcccggggtcgggccgggtgcggggggtgggggcggcgccgctgcggggctcaagacttacttcaagacgcccgaggggaggtacaagctgcagtacgagaaggcgcactccgcggtgctgcactacagccacggcggcaagaccgtctcgcagttgacagtggcatacctcaaggagaagcctgctagccagggctctcagccatcaacaccaagcgccagcagtgggatgcggtctgcagcagcaaggctgctgggcactgggaatgggagcaaggcacttagctttggtggcggtaatggtgcaagccgagctgttgctggaagcagccgtgtaggaggcggccttggtacacctacaggccttggtggatcacaggggggcacaaattatgatggcaagggtacatatattgtattcaatgctgctgatacactattcatcagtgatctcaattcccaggagaaggatccactaaagtccatccatttcagcaactcaaacccactgtgccatgcattcgacccagaggccaaagagggacacgacctgatcattgggatgggatcaggggatgtctattcaatgtcgctgaggcaacagttacaagatcctggaagaaaacccgtggcagctctacattacaataagggtgataaagatgtctcacccaatggaagacatgatcaaggtagcataggtacatgtctgaacaaggatgggaacacagactgtacgtttccagctgtcaaggatcagtctcagtttatggttgcacatgcaaagtcgagtaagagcaacccagtcgctaggtggcatatatgtcaaggttcgatcaatgcaatttccttttcaccagatggcgcatacttggcgactgttgggagagatggttatttgagagtattcgatttttcaaaggaacaactaatatttggtggaagaagttattatggtgcactgttgtgttgcacttggagctcagatggaaaatatctattaacaggtggtgaagatgatcttgtgcaggtcagtggagttgcttttgattcatattggtccccaccaagttctgatggaaatggagaaaatgtatatcgctttggttctgttgggcagatcagggataagaattacttcttttcagtactgatggggttattttctcatgatgttttgaaagtaatttatgtttttgacacccaactacttctgtgggacctggcactggatgagattgttgtcccactacggcatccttcaagtgcctcacctacgtttagcagcgggagcccttccacacactgggacaatgcatgccctccaacaggtgttcttcaaccttctcctagaatgcgagatgtcccaaaactatcgcccctagttgcccaccgagtacatgccgatcccctatctggtatggtgttcaccagtgaatctatcctcaccatctgccgcgagggcctcatcaaaatctgggttcgaccagagcagagcgaaaacaatcagcaatcgaattcttcagaatttgctttaggccctgcttcgaaggatagggcgatcacatcttccaataaagcaagtagctccagctttaagaagctgccgcctgttcttgtcacatgatgaatcaacgggatggttcttgtggatatttctgcttcacgtggcattagtggtggatatgaatcttactccatggttgatggggatgaaactctcatatggagtctgcagactgcaagtaatgagggtgagcatttgatggttgatgttcccaggaagcagggccagcgttgccagtttttttggcacgaaagagtaaatgggagctcttgtacagacacatacttaatgataaaattgtaaaaactcactgtccgtttcataatattcaatagccaccgaaagatgattggacgaccatgttatcgattttagctggtgggttgatagtatccttaaactttggtacttcggagacttgtaattatggaccataatatctgaggaatgcttcagtcttacctggtgtaagttgtgttactatttccttctgccttttgtcaattattagatctagtttggc

SEQ ID NO: 207123 - DNA, 3987 bp, Zea Mays
ggcctaccgcacccgcaaaatttcccaaaccccgcacacaattgccggaaccctagctccactccatcctcccagcccgcaccaatgacggaccaacaaacccaggatctcgtcaaggagctcgtccaccgcctcctctccgccgccgaatccggcgggcgcggcggcgggcgcgacacgggcggtgcgctgcggttcgcgcaccgaatcctctccagccgcctcgcccccgcggtcctccccgatgagcacgcgctcgcggagtccatcaagcgccgcctcgccgcctcgggccgccccgatgatgcgctctcattcgctgacctccactccaagctctccgtccgtgcccgcccagcgtcgctgtggccgctcctctacctgctcgactctctctcctcgcagtaccgcgccgccgccgcggcttcgtgcctcccaaaccttcccatcgccgccctaccgcagaatgccacctcggggacggcgccgggcgccggtgtcaggccgggttcgcggacgcacggggcgccgccgggcggcctggtgctggtctccaaggatccggacaacatccgcgagatcgcgctgcgtgagtacaccgagctggtgatcgacgagacggaggtgtcggaggccgcgcttgtgcgggacgtgctgtacgcgtgccagggcatcgacggccgctacgtgcgctatgacaagtccgtggactcctacgaccttccagacggtgttcgagtgccgcgatccacgcgcaccctcgttcgcaagctatgcgagcttggctggctgttcagcaaggtgcggggcttcatttctgacaacataagccgctcgccctcagatgctgccactgaggtgggcactgttacccaggcattctgctcggcgctccaggaggagctgtctgattattataagctgctggctgttctggaatcgtactcattgaatccaattcccacacctggatctgattcaggtgtgtccagtaattacctctcactgcgccgtcttgcagtgtggcttgctgagcctgcagtgagaatgcgcctaatggctgttctggttgatggatgccggggactgaggggtggtgctatggctggtgtgatccatgggcacgcacaacacggagatcctatgtttcaggagtttatgggccgattactgcgccgggtgtgctcgccgttgtttgagatggtcaggagctgggtgctagaaggggaattggaggatgtatttgcagagttttttatcgttgggcagccagtgaaagcagaatctttgtggcgggagggctaccttattcaatctgatatgcttccagctttcatatctccagtgctcgcaaaacggattcttagaactggcaagtcaatcaactttcttagagtatgctgtgacgatagtggctgggctgatgctgctgccgaggctgctgcatatgttggcactacaacatctcggggtggccttggttatggggagactgatgctttggaggcattggtggttgaggcagccaagaggattgatcgacatttgatggatgtcattcataagcggtaccgatttaaggaccactgccttgctattaagcgttacttgcttcttgggcagggtgattttgtccagtatcttatggacgttgttggccccgagttatcagagccagcaaataggattagctccttccaattggctggcttgcttgagactgcaatccgagcatccaatgcacaatatgatgactgtgatatcttggaccggataaaggtaaagatgatggatcatggggatggtgatcgtggctgggatgtcttctctttggagtatgatgctagggtccccctggacactgtgttcacagcttcagttatgaagatgtatctcaaggaacaagcatcagagctcaatttgtatcagttcttcgtaaatgtcaagttctattcaatgagatgaatcactttgtgaccaatttccaatactacattatgtttgaggtcctggaggtttcgtgggcccgtttttctgatgaaatggatgcagcaaaggatttagatgaccttctcttagcacacgataaatatctcaactcgatactggagaaggccctgcttggtgaacattcccaaggacttttgaggaatctgtttgaactgtttgacattattttacagtttcgaagccatgctgatcgatggtttgaaaggatatatgagttgcagctaaggggaaagggtaaatcaaaatcaaaggatacaggttcatggtttgatggcggcagaaaagctatgatccaactagctggagaacttttctggaaaatgggtgaagacctggatagcatcgcaaaggattatacagcttctcttgatgcttttattacgcagctgcccatgcaacagcacgtcgatttgaagttccttctcttccgccttgacttcactgaatattacagtcgtgtttcctccaacaaatgaataagaggatctgaatacccttttactgaggattgccaatgctacaatctggtgattctgtcagctgtttgcatgctgatgcttatgtgccgattcaacgaggctaaagccacgcatttcatgcaactctgtacacaattgtaagtttgttttgatcttgattttcatggatgttctggtgtaaatttaatatttattttttctctattaatttcttgagaattaaagctggaggtcttgaagatttgtccttaacagtttgtattgtcagttttacaagagcagataactcattacattgttttgatcttgaagtttggtttagaaatgtaatgtaaatagcaacggtaatgatttacactcgagtatcggtaataataagctaaaatagaacaatattaatttttagtgtggtatccgattacggtaacgttatcagttatctatcaccagttatctctcacgttacaaatacaaatatgtgaagcaaacatcacctcagtgtccataagctagtgacctgcttggagcatgatgcaactgaatggcctgcttggagcatgatgcaactgaatggatgcggaaaaaggagacttgaagaaatccgtgggaatttgcagatgttcaagctttgtcaaatacaaaaaatttggttagttttgggagtggttgctatttcttgtgcaaaattgtgagcaacgatcttaaattgaaacatttgcatgtagagaaaatacttgagcgttatattgaataaaactaattgtatagcaccaaccgaggatgaatggatgatctatgcaaaatgtaacttacaagtgccaaataacaggtttgcaaggctaaattaaagtgacaatctgaaatttccaacaatacttagggtgtgtttggttcaggtttctgaatcaaattcagaaccaaaaatctgaaatcttaaccaaatgggtacaacaacgaaatatattcctgaaaatcaaatttatagttcaatttagaatcacctcttatcttaggtttttcagatttctgacatctatgttataaactgtcatagtcttatagaatctatagttgatagttgttttaactaaataaattttagtttttcattattgttagctcacctcggtcttttcacagctcacaactagaataatatttttagaaatgtacaaatgaaccaaatatacccttaatctgtgtatgtctagaaatttagaaaacacatagttttaaaattgattaaccatgcatggaatatctccagttctgtgtatgtcgagaaattcagaaatctggagatctcttggaattagttgcatcccataaagatgccttatcaactttagatatgctggagcgccctattgaaaattttgagagtacatttcatcctggtggcaatgaaagtaacctgtttatagcgggggataagaaagacgataacgaggaaggagatgttcaaaatggtcagctagtacaagaagaagagagggag

SEQ ID NO: 207124 - DNA, 3731 bp, Zea Mays
ggcctaccgcacccgcaaaatttcccaaaccccgcacacaattgccggaaccctagctccactccatcctcccagcccgcaccaatgacggaccaacaaacccaggatctcgtcaaggagctcgtccaccgcctcctctccgccgccgaatccggcgggcgcggcggcgggcgcgacacgggcggtgcgctgcggttcgcgcaccgaatcctctccagccgcctcgcccccgcggtcctccccgatgagcacgcgctcgcggagtccatcaagcgccgcctcgccgcctcgggccgccccgatgatgcgctctcattcgctgacctccactccaagctctccgtccgtgcccgcccagcgtcgctgtggccgctcctctacctgctcgactctctctcctcgcagtaccgcgccgccgccgcggcttcgtgcctcccaaaccttcccatcgccgccctaccgcagaatgccacctcggggacggcgccgggcgccggtgtcaggccgggttcgcggacgcacggggcgccgccgggcggcctggtgctggtctccaaggatccggacaacatccgcgagatcgcgctgcgtgagtacaccgagctggtgatcgacgagacggaggtgtcggaggccgcgcttgtgcgggacgtgctgtacgcgtgccagggcatcgacggccgctacgtgcgctatgacaagtccgtggactcctacgaccttccagacggtgttcgagtgccgcgatccacgcgcaccctcgttcgcaagctatgcgagcttggctggctgttcagcaaggtgcggggcttcatttctgacaacataagccgctcgccctcagatgctgccactgaggtgggcactgttacccaggcattctgctcggcgctccaggaggagctgtctgattattataagctgctggctgttctggaatcgtactcattgaatccaattcccacacctggatctgattcaggtgtgtccagtaattacctctcactgcgccgtcttgcagtgtggcttgctgagcctgcagtgagaatgcgcctaatggctgttctggttgatggatgccggggactgaggggtggtgctatggctggtgtgatccatgggcacgcacaacacggagatcctatgtttcaggagtttatgggccgattactgcgccgggtgtgctcgccgttgtttgagatggtcaggagctgggtgctagaaggggaattggaggatgtatttgcagagttttttatcgttgggcagccagtgaaagcagaatctttgtggcgggagggctaccttattcaatctgatatgcttccagctttcatatctccagtgctcgcaaaacggattcttagaactggcaagtcaatcaactttcttagagtatgctgtgacgatagtggctgggctgatgctgctgccgaggctgctgcatatgttggcactacaacatctcggggtggccttggttatggggagactgatgctttggaggcattggtggttgaggcagccaagaggattgatcgacatttgatggatgtcattcataagcggtaccgatttaaggaccactgccttgctattaagcgttacttgcttcttgggcagggtgattttgtccagtatcttatggacgttgttggccccgagttatcagagccagcaaataggattagctccttccaattggctggcttgcttgagactgcaatccgagcatccaatgcacaatatgatgactgtgatatcttggaccggataaaggtaaagatgatggatcatggggatggtgatcgtggctgggatgtcttctctttggagtatgatgctagggtccccctggacactgtgttcacagcttcagttatgaagatgtatctcaaggttttcaacttcttgtggaagctcaaacgcgtagatcactcccttaccggagtgtggaagactatgaaacctaactgcattgtttcttctccattttacaaggaaggaacaagcatcagagctcaatttgtatcagttcttcgtaaatgtcaagttctattcaatgagatgaatcactttgtgaccaatttccaatactacattatgtttgaggtcctggaggtttcgtgggcccgtttttctgatgaaatggatgcagcaaaggatttagatgaccttctcttagcacacgataaatatctcaactcgatactggagaaggccctgcttggtgaacattcccaaggacttttgaggaatctgtttgaactgtttgacattattttacagtttcgaagccatgctgatcgatggtttgaaaggatatatgagttgcagctaaggggaaagggtaaatcaaaatcaaaggatacaggttcatggtttgatggcggcagaaaagctatgatccaactagctggagaacttttctggaaaatgggtgaagacctggatagcatcgcaaaggattatacagcttctcttgatgcttttattacgcagctgcccatgcaacagcacgtcgatttgaagttccttctcttccgccttgacttcactgaatattacagtcgtgtttcctccaacaaatgaataagaggatctgaatacccttttactgaggattgccaatgctacaatctggtgattctgtcagctgtttgcatgctgatgcttatgtgccgattcaacgaggctaaagccacgcatttcatgcaactctgtacacaatttgtccataagctagtgacctgcttggagcatgatgcaactgaatggcctgcttggagcatgatgcaactgaatggatgcggaaaaaggagacttgaagaaatccgtgggaatttgcagatgttcaagctttgtcaaatacaaaaaatttggttagttttgggagtggttgctatttcttgtgcaaaattgtgagcaacgatcttaaattgaaacatttgcatgtagagaaaatacttgagcgttatattgaataaaactaattgtatagcaccaaccgaggatgaatggatgatctatgcaaaatgtaacttacaagtgccaaataacaggtttgcaaggctaaattaaagtgacaatctgaaatttccaacaatacttagggtgtgtttggttcaggtttctgaatcaaattcagaaccaaaaatctgaaatcttaaccaaatgggtacaacaacgaaatatattcctgaaaatcaaatttatagttcaatttagaatcacctcttatcttaggtttttcagatttctgacatctatgttataaactgtcatagtcttatagaatctatagttgatagttgttttaactaaataaattttagtttttcattattgttagctcacctcggtcttttcacagctcacaactagaataatatttttagaaatgtacaaatgaaccaaatatacccttaatctgtgtatgtctagaaatttagaaaacacatagttttaaaattgattaaccatgcatggaatatctccagttctgtgtatgtcgagaaattcagaaatctggagatctcttggaattagttgcatcccataaagatgccttatcaactttagatatgctggagcgccctattgaaaattttgagagtacatttcatcctggtggcaatgaaagtaacctgtttatagcgggggataagaaagacgataacgaggaaggagatgttcaaaatggtcagctagtacaagaagaagagagggag

SEQ ID NO: 207125 - DNA, 3885 bp, Zea Mays
cgggcactcggctcacggcggagcaaaccctctcggcctctcctcctgagtcctgcctccgtccctcatatattaaccgcaattttgtcttcgcttccgtcgccagattcctccgcaccgccatggatgaccttgagcatgtcatccttcttgcctccgactcacctgctgccgcagcggcgtccccatctatccgcgcggaggctctcgccttctgcgcccgcgcccgcgacgagtccccgccgtcgtcgctcctccgcctctgcctgtccggcatcgcctcctccccgcacgctcaagtccacttttggtgcctccagtccctccacgacgcgctcctccgccgccggctcgtgctccccgacgacctcgcgttgctccgctcctccctcctctcgctggcggtttcctctcacgccggatcgccaccgttcctccgcaacaagctcgcgcagcttgttgcgctcctcatccgcctcgagtacccccatgtttacccctcttacttcattgatctcctcccgcccgcaccgccgcagcctggccccacggacatgttcgcgcgggttctaatctctctcgacgacgacctgctctcccaggagtacccccgcaattctggcgaagccgccgacgctatgcgggtgaaggattccatgcgcgcacagtgcgtgtcccagatcgccagccactggcacgccgccgccgtgactctccgtacagccgaccctgcggctgcggcggtggcccttgacgcggcgcgcaggtgcatctcgtggattgatgtcggactggtcgccaatgatgtcttcgttcctctattctttgacattgcgatgtcccctggaagcgcgtctccactcgctgctgcagcggtggggtgcctttctggtgtggcgtcgaagaggatggactcaagggcgaaggtgggattgctgaggtcactcctggctgcacagcaggggcttggtagcccagacaatgggttgaaaatggcacctttggtgatagcatatgctgcagaggctctcgaatgtcatagcaggcttggccctagtgatgctgatggagctgcagcattggagatgctggaagaggtgctaccagctgtatttgcagctgcagagagcggtaacgatgaagatgtggattctggttccgtgcttgagttcttatctggctatgtgagcacaatgaaggcaccatctgagaagcagttggggcacttgggacggatcttggaggtggtgcgggtacagatgtcatttgatccagtatatagggggcatcttgatgtgcttgacaagatagggaaggaggaggaggacctcatggcagagcaacggaaagatttgatcgtattattccggagcatttgtcgtgttgcaccagctgcagctcagctattcataagtgggctgattgtgacagctctctcatctgcagaagctagtgtggaggatgttgaggttgctcttaccctgttcttccggcttggagaagctgtgggtgaggaggagattcggactggggcagggctgataggccagcttgtgcccatgctcctaactgcgaggttctcgtgtcacacacaccgcttagttgcattggtgtacctggagacagtaacccgctacatgaagttcatgcaggagcatgtgcagtatgtaccacacctgcttggcgtgttcttggataaccgtggaatacaccatcagaatgcccacgtgagccgtcgtgcaggatacttattcatgagggcagtcaagtcattgaaggcaaagctagtgccttacctggataccatactgcagagcctgcaagatgtactaagtcaattcacttctatgaattggccaaacaaggatactaagtttcccagctcagaggacggcagccaaatttttgaggctgttggattactgataggcattgaagaggtatcaccagagaagcaggctcagttcttgaccgctcttctaaatcctctctgtcatcaggttgagtcacttgttatggatgccaaagcacgagggcttgaggaatcatcaccaatggctattagccttcaacaaattattgttgcattgaatatggtcagcaagggcttcaatgagcgtcttgtgatggtaaataggccagctattgggatcatgtttaagaaaacccttgatgtagttttgcaagtccttgtttcatttcctagcgtgagacctctgcgatctaaggtcatatcgtttctgcatcgtatgatcgagatattaggtctctcagtgcttccctgtattccaattgcactgagactattgcttcttgacaacgaggctaaagatatggtggaatttctcgtattggtaaaccaaataatctgcaaatttaaatcgtcagctagcgccatattggaggaaatatttcctactattgcaagtcgtttgtctgcgatattatcacaagatgcattttcagctggtcctgcaagcaatactgaggaaatgcgagaactgcaagagctgcagaggacattatacacattcttgcatgctatggcaacacatgatctttctgcagttctccttactcctagctctagggagtatctggagaccataatgcagttgcttttatttacctcatacaaacatagagatatactactgcgcaaggcatgtgtacaaatttttgtgaatcttgtaaaagactggtgctctaactctgaagataaggttccaggcttccgagtatttatgattgagaagtttgctactaattgctgtttatacagcgtccttgataaatcatttgatttacgcgatgcaaactcgcttgtcctttttggtgaaattgtgctggcccagaagattatgtatgaaagatttgggggggatttcattgtgaactttatagcaaaaggtctttctggagttcactgcccaccggacctagctgaacagtactaccagaagttaaagggaaatgatatcaaggcattcaggtcattttatcaatcgcttgttgagagaataagaccgcaggggaatgggagtcttgttttcagatagcatcatcctttcattttcaatatgttttccaccaaaagatacctcaactgtgttatttaattatatttataggctagttgtgccgtcaatgtacatagagctaccatttctgcgatcggaagacgtattactgcggcattatctttaccaagtctggcaaccatggttgtgcccttattcattgtattctatctgaggtgcaggggaattcatcctgcaatagtttgtactaggaaggaatcacagggttccattttcttattttgcctatatccccaaatcataggctgttctgctgtctgggcctgaaattttgcaagagcatgccatgtcatgctggtgcctgcaaatgctgtatctgatgaggaattccatggcccatgttgctgttgtctcaactgctgcaagttttgttggtcggttcttatttgagcccatcctgttcggtattggagcttgtacagaacaacaccgagtgtggcatgagtcgtgtcaaccctcagctcagctgaaagggctcaagttcgtgccacaacacaactggaagagctgcggccgtggccaaggagggaaatgccaaacaacagcaacaccattacaccaacaaaactaagggagaaagaccagggtgttacttgtattgtatatatcactccgcagaatttttgtcgtcacaaagacacaaatgaaggagcgctaacaaccattatcggtgttaataataatattgtatttggctgctatcgtcttgttcgatgtggcttgactgactgtggctgtgatttatataatattttgtctctattgcagtttcagcaatttaaac

SEQ ID NO: 207126 - DNA, 3961 bp, Zea Mays
attaaccgcaattttgtcttcgcttccgtcgccagattcctccgcaccgccatggatgaccttgagcatgtcatccttcttgcctccgactcacctgctgccgcagcggcgtccccatctatccgcgcggaggctctcgccttctgcgcccgcgcccgcgacgagtccccgccgtcgtcgctcctccgcctctgcctgtccggcatcgcctcctccccgcacgctcaagtccacttttggtgcctccagtccctccacgacgcgctcctccgccgccggctcgtgctccccgacgacctcgcgttgctccgctcctccctcctctcgctggcggtttcctctcacgccggatcgccaccgttcctccgcaacaagctcgcgcagcttgttgcgctcctcatccgcctcgagtacccccatgtttacccctcttacttcattgatctcctcccgcccgcaccgccgcagcctggccccacggacatgttcgcgcgggttctaatctctctcgacgacgacctgctctcccaggagtacccccgcaattctggcgaagccgccgacgctatgcgggtgaaggattccatgcgcgcacagtgcgtgtcccagatcgccagccactggcacgccgccgccgtgactctccgtacagccgaccctgcggctgcggcggtggcccttgacgcggcgcgcaggtgcatctcgtggattgatgtcggactggtcgccaatgatgtcttcgttcctctattctttgacattgcgatgtcccctggaagcgcgtctccactcgctgctgcagcggtggggtgcctttctggtgtggcgtcgaagaggatggactcaagggcgaaggtgggattgctgaggtcactcctggctgcacagcaggggcttggtagcccagacaatgggttgaaaatggcacctttggtgatagcatatgctgcagaggctctcgaatgtcatagcaggcttggccctagtgatgctgatggagctgcagcattggagatgctggaagaggtgctaccagctgtatttgcagctgcagagagcggtaacgatgaagatgtggattctggttccgtgcttgagttcttatctggctatgtgagcacaatgaaggcaccatctgagaagcagttggggcacttgggacggatcttggaggtggtgcgggtacagatgtcatttgatccagtatatagggggcatcttgatgtgcttgacaagatagggaaggaggaggaggacctcatggcagagcaacggaaagatttgatcgtattattccggagcatttgtcgtgttgcaccagctgcagctcagctattcataagtgggctgattgtgacagctctctcatctgcagaagctagtgtggaggatgttgaggttgctcttaccctgttcttccggcttggagaagctgtgggtgaggaggagattcggactggggcagggctgataggccagcttgtgcccatgctcctaactgcgaggttctcgtgtcacacacaccgcttagttgcattggtgtacctggagacagtaacccgctacatgaagttcatgcaggagcatgtgcagtatgtaccacacctgcttggcgtgttcttggataaccgtggaatacaccatcagaatgcccacgtgagccgtcgtgcaggatacttattcatgagggcagtcaagtcattgaaggcaaagctagtgccttacctggataccatactgcagagcctgcaagatgtactaagtcaattcacttctatgaattggccaaacaaggatactaagtttcccagctcagaggacggcagccaaatttttgaggctgttggattactgataggcattgaagaggtatcaccagagaagcaggctcagttcttgaccgctcttctaaatcctctctgtcatcaggttgagtcacttgttatggatgccaaagcacgagggcttgaggaatcatcaccaatggctattagccttcaacaaattattgttgcattgaatatggtcagcaagggcttcaatgagcgtcttgtgatggtaaataggccagctattgggatcatgtttaagaaaacccttgatgtagttttgcaagtccttgtttcatttcctagcgtgagacctctgcgatctaaggtcatatcgtttctgcatcgtatgatcgagatattaggtctctcagtgcttccctgtattccaattgcactgagactattgcttcttgacaacgaggctaaagatatggtggaatttctcgtattggtaaaccaaataatctgcaaatttaaatcgtcagctagcgccatattggaggaaatatttcctactattgcaagtcgtttgtctgcgatattatcacaagatgcattttcagctggtcctgcaagcaatactgaggaaatgcgagaactgcaagagctgcagaggacattatacacattcttgcatgctatggcaacacatgatctttctgcagttctccttactcctagctctagggagtatctggagaccataatgcagttgcttttatttacctcatacaaacatagagatatactactgcgcaaggcatgtgtacaaatttttgtgaatcttgtaaaagactggtgctctaactctgaagataaggttccaggcttccgagtatttatgattgagaagtttgctactaattgctgtttatacagcgtccttgataaatcatttgatttacgcgatgcaaactcgcttgtcctttttggtgaaattgtgctggcccagaagattatgtatgaaagatttgggggggatttcattgtgaactttatagcaaaaggtctttctggagttcactgcccaccggacctagctgaacagtactaccagaagttaaagggaaatgatatcaaggcattcaggtcattttatcaatcgcttgttgagagaataagaccgcaggggaatgggagtcttgttttcagatagcatcatcctttcattttcaatatgttttccaccaaaagatacctcaactgtgttatttaattatatttataggctagttgtgccgtcaatgtacatagagctaccatttctgcgatcggaagacgtattactgcggcattatctttaccaagtctggcaaccatggttgtgcccttattcattgtattctatctgaggtgcaggggaattcatcctgcaatagtttgtactaggaaggaatcacagggttccattttcttattttgcctatatccccaaatcataggctgttctgctgtctgggcctgaaattttgcaagtgatgacagagcatgccatgtcatgctggtgcctgcaaatgctgtatctgatgaggaattccatggcccatgttgctgttgtctcaactgctgcaagttttgttggtcggttcttatttgagcccatcctgttcggtattggagcttgtacagaacaacaccgaggtgcatgatattcttgactgaataaaattaattgacgacactgtttttacgtaaggaaggatgaggataatttggagacataggtctaaccaccggaaatagtaagcgggaatctcttgtatgtctttttttatatagtgtggcatgagtcgtgtcaaccctcagctcagctgaaagggctcaagttcgtgccacaacacaactggaagagctgcggccgtggccaaggagggaaatgccaaacaacagcaacaccattacaccaacaaaactaagggagaaagaccagggtgttacttgtattgtatatatcactccgcagaatttttgtcgtcacaaagacacaaatgaaggagcgctaacaaccattatcggtgttaataataatattgtatttggctgctatcgtcttgttcgatgtggcttgactgactgtggctgtgatttatataatattttgtctctattgcagtttcagcaatttaaac

SEQ ID NO: 207127 - DNA, 5181 bp, Zea Mays
attaaccgcaattttgtcttcgcttccgtcgccagattcctccgcaccgccatggatgaccttgagcatgtcatccttcttgcctccgactcacctgctgccgcagcggcgtccccatctatccgcgcggaggctctcgccttctgcgcccgcgcccgcgacgagtccccgccgtcgtcgctcctccgcctctgcctgtccggcatcgcctcctccccgcacgctcaagtccacttttggtgcctccagtccctccacgacgcgctcctccgccgccggctcgtgctccccgacgacctcgcgttgctccgctcctccctcctctcgctggcggtttcctctcacgccggatcgccaccgttcctccgcaacaagctcgcgcagcttgttgcgctcctcatccgcctcgagtacccccatgtttacccctcttacttcattgatctcctcccgcccgcaccgccgcagcctggccccacggacatgttcgcgcgggttctaatctctctcgacgacgacctgctctcccaggagtacccccgcaattctggcgaagccgccgacgctatgcgggtgaaggattccatgcgcgcacagtgcgtgtcccagatcgccagccactggcacgccgccgccgtgactctccgtacagccgaccctgcggctgcggcggtggcccttgacgcggcgcgcaggtgcatctcgtggattgatgtcggactggtcgccaatgatgtcttcgttcctctattctttgacattgcgatgtcccctggaagcgcgtctccactcgctgctgcagcggtggggtgcctttctggtgtggcgtcgaagaggatggactcaagggcgaaggtgggattgctgaggtcactcctggctgcacagcaggggcttggtagcccagacaatgggttgaaaatggcacctttggtgatagcatatgctgcagaggctctcgaatgtcatagcaggcttggccctagtgatgctgatggagctgcagcattggagatgctggaagaggtgctaccagctgtatttgcagctgcagagagcggtaacgatgaagatgtggattctggttccgtgcttgagttcttatctggctatgtgagcacaatgaaggcaccatctgagaagcagttggggcacttgggacggatcttggaggtggtgcgggtacagatgtcatttgatccagtatatagggggcatcttgatgtgcttgacaagatagggaaggaggaggaggacctcatggcagagcaacggaaagatttgatcgtattattccggagcatttgtcgtgttgcaccagctgcagctcagctattcataagtgggctgattgtgacagctctctcatctgcagaagctagtgtggaggatgttgaggttgctcttaccctgttcttccggcttggagaagctgtgggtgaggaggagattcggactggggcagggctgataggccagcttgtgcccatgctcctaactgcgaggttctcgtgtcacacacaccgcttagttgcattggtgtacctggagacagtaacccgctacatgaagttcatgcaggagcatgtgcagtatgtaccacacctgcttggcgtgttcttggataaccgtggaatacaccatcagaatgcccacgtgagccgtcgtgcaggatacttattcatgagggcagtcaagtcattgaaggcaaagctagtgccttacctggataccatactgcagagcctgcaagatgtactaagtcaattcacttctatgaattggccaaacaaggatactaagtttcccagctcagaggacggcagccaaatttttgaggctgttggattactgataggcattgaagaggtatcaccagagaagcaggctcagttcttgaccgctcttctaaatcctctctgtcatcaggttgagtcacttgttatggatgccaaagcacgagggcttgaggaatcatcaccaatggctattagccttcaacaaattattgttgcattgaatatggtcagcaagggcttcaatgagcgtcttgtgatggtaaataggccagctattgggatcatgtttaagaaaacccttgatgtagttttgcaagtccttgtttcatttcctagcgtgagacctctgcgatctaaggtcatatcgtttctgcatcgtatgatcgagatattaggtctctcagtgcttccctgtattccaattgcactgagactattgcttcttgacaacgaggtgtttcaattatattttaatgacaaacctctgttttcttggtttttttgcgtgtgagtcttgctgtgtaaataatagtgttaatggtttaaaaaaatggttctcagcctttaaaatagaaaggtgaccaaaaggaacttgttgatttacaaagttaggcatttagccgcagacaggattacgccatagatagtattagcaatttcttaattaccccttctctactttgtgaactgcatgttgctattttaggcagtgcattaataacaaagcactctttcctttctgaagattgcagtgtgctcctaaaaatattgtcttgtctgtcctaaagcaattataataagtcactagagagcgtatttgtgttttttttctgttggccaaaaagcacaggaataaatcctctgtactgctactgctctacccctatgttttcctatttctctgctcatggccataaatacaacatccaatgtcttcatggtttgttagaatctgcctactcagatatgtatgttttcttgtaagttccatcactcgctgcttgactgacttctatgttctattactcgctgcttaactggcttctttgttccagcatttcttttttaccttttgtagtgggaaacaccatcattagtactttatggttgtagaacacaggttgaactacaatagaagccattcgtgcacaattgagtttaggcaaagttcattcaggggttgtcttagggtgattagactatgggtatgatgactagggcagggcacttgtttcatgtcacctaactatctcttaaaaacaacaacaaagccttttaggcttttaatcccaagcaagttggggtaggctaactatctccctaaaggcagttattaacacaattaaaaatgtgtgattctaacctgttaatagccttgaaagacttctagtttgtcttgtttctttctccttttctatcttgttactgttaattctatcttgcgccatttttcagttctgacagtattattattttcgtgcaggctaaagatatggtggaatttctcgtattggtaaaccaaataatctgcaaatttaaatcgtcagctagcgccatattggaggaaatatttcctactattgcaagtcgtttgtctgcgatattatcacaagatgcattttcagctggtcctgcaagcaatactgaggaaatgcgagaactgcaagagctgcagaggacattatacacattcttgcatgctatggcaacacatgatctttctgcagttctccttactcctagctctagggagtatctggagaccataatgcagttgcttttatttacctcatacaaacatagagatatactactgcgcaaggcatgtgtacaaatttttgtgaatcttgtaaaagactggtgctctaactctgaagataaggttccaggcttccgagtatttatgattgagaagtttgctactaattgctgtttatacagcgtccttgataaatcatttgatttacgcgatgcaaactcgcttgtcctttttggtgaaattgtgctggcccagaagattatgtatgaaagatttgggggggatttcattgtgaactttatagcaaaaggtctttctggagttcactgcccaccggacctagctgaacagtactaccagaagttaaagggaaatgatatcaaggcattcaggctagttgtgccgtcaatgtacatagagctaccatttctgcgatcggaagacgtattactgcggcattatctttaccaagtctggcaaccatggttgtgcccttattcattgtattctatctgaggtgcaggggaattcatcctgcaatagtttgtactaggaaggaatcacagggttccattttcttattttgcctatatccccaaatcataggctgttctgctgtctgggcctgaaattttgcaaggtacttccagtgaactactgcctccgttctcgaatatttgttgcccgctagtatatttttaaactaaaccacgacaaataaaaaagaacggagcgagtaatcggtaagggggcaaaagagtgttgcgtaggctgtgtttttcatgacaaaaaatgccgcaccgcctgttgtgtcgtgagtcgtgctacaccagttttgcgaaacggcaactggttttgcaccccctattgccatctggggtgatgtacatattcttttttttctttctcgttttccccatttgatttcataaattattttgtcgcctacttcaccaatctgatgatccagtgatgacagagcatgccatgtcatgctggtgcctgcaaatgctgtatctgatgaggaattccatggcccatgttgctgttgtctcaactgctgcaagttttgttggtcggttcttatttgagcccatcctgttcggtattggagcttgtacagaacaacaccgaggtgcatgatattcttgactgaataaaattaattgacgacactgtttttacgtaaggaaggatgaggataatttggagacataggtctaaccaccggaaatagtaagcgggaatctcttgtatgtctttttttatatagtgtggcatgagtcgtgtcaaccctcagctcagctgaaagggctcaagttcgtgccacaacacaactggaagagctgcggccgtggccaaggagggaaatgccaaacaacagcaacaccattacaccaacaaaactaagggagaaagaccagggtgttacttgtattgtatatatcactccgcagaatttttgtcgtcacaaagacacaaatgaaggagcgctaacaaccattatcggtgttaataataatattgtatttggctgctatcgtcttgttcgatgtggcttgactgactgtggctgtgatttatataatattttgtctctattgcagtttcagcaatttaaac

SEQ ID NO: 207128 - DNA, 1881 bp, Zea Mays
ctcaaattcagtgcctcaccttaggcatgtctaaaaaaatcttgccacttttatgagtcattgacgagcggggcctatacagaaggagaaaaatcttgccacaactgtagctacaaaccaaacgcatgtctaacttggtcaaacctacctaaccaggggcggaggagccattatggttaggtatagcccaagccatacctacatatgaaaacaaaatttaatagaccagcattagaaacacaaggttagcacaatttaagatgataaggagaaaaaacacaagaaaatcacaaactcgtagatttgaatagttattttagtcgggcatctagtagcacaaacacaagtatttatgggaatggagttggccaggaggacaatccaccaatagtggaggaagctattggatctcaattagaggacgatgaaaaggttcgatgtgaagaagatgccaatggtaaagtcgaccaacatcactacaggatcgtggtagggatagtgatgatgaagacttccgagatagggactacgatgtggctgcacttgctagtaatttaagccaggcatttaaatatggtatctacagtaacgatgacattgacgaggctcaagcatcacttgagcgggatgatgaggatgtatattttgatgatgaatctgcagaggtagtaatctcctcccttcgccttggagacgaccaagaaagtggctcgctctttacaaattccaactggtttgcatttgacgaggacaaggcactgaatgatggtttggttagcccagaagcttccccatctccaaattcagaaatatccgcactaaaagaggatgatgaagtcattcttggcgaagtaatagatgacacagaaggttctgaaccaactctaccagtctccaacaaagacgcaaacgaagagtctggtcacaccgtcttggcaaatggtaccattgacaaacaggaagatgatatcaggccactgactccggatgtaaaagagagtcaacccgagtttgtggaatggaaggaggaagaagctgaacctggtgatgttgctgagaaggatactgcagttcctggtattgaggttgaaagtgagaagcagctgaattccatggacgatgttatgctttgtgatgccgagttaggagaggaaaagaagagtggtggtatgcttggatcttcagcacctgaggcagaagcagcatcgcctgtttcatctgacatcgattcaatcaagcacccggaacaagctgctgacagtgctgtatcagagtatccaatgggcgaacaaaatcctgagatatgaaatgaatttgagggcagcagagttccgctcacgtgatggcggatgatgatggacgtgcaggaagcacttggaactggttggaccattactgtacaagcagtttgaggatcatgtgtgggttttctgttctactctcttggaggaaggtggtcccggaacatgcatctgatggagcctcaaaggttccacttagtctcatggagatgcttaggttcgatgtgtaacatattcatggagacgcaaaattcagaaagttgacttccctgcccttttccttaatcagtggggttctggttgtgtcactctggtaaatagccgataattgaataggtgatatctggtctggctacatgtccattactgtagttggtgctatttgtacgaaagttttggctcaaatgcagtcagttgattcttgtcatatttagaacttgtttgaaatttgtgtaaacgaaaaaaatatagcttctatttttcccaggtgcttggtgcttaattcatctgttataaatatagattttattttcccctcttgttctttgttttccccagcagaacagaaaaagaaaacttc

SEQ ID NO: 207129 - DNA, 2428 bp, Zea Mays
ctctaaaactatactataactgttttgattcgcttaatcggtgcagatgaaactatgtattcaagccatgcagattctatgcaatggttagatgacatacaagtccttgagatgattgttgacaagttcagcacatcagattctgctgaggttcacgcaaatgctgctgaaatcctttgtgcagtaaccagatacgcccctccagcacttgctgcaaagatttccagtccaagcttcgtagggaggttatttcaacatgcttttgaagattcaaggcctaaatcggtgctggtccactcattatcagtgtgcatatctttgttagatcctaagagacttgtatcggcttcctaccaagctttccgtagccagttgagccatggaacacttgtcactgcaagtccagagacagtaaatggcatgctggatagcctaggggatttgttgaagctgctggatgtttcatctgccgaaaatgttctgccaacaacatatggaagcttacaacctccactcgggaaacatcgcttaaagattgttgagttcatctctgttctactatcaattggtagtgaagttgccgaaacgcgactgattcaactaggagcaatccagcacgctatagatctattttttgagtacccgtttaacaacttcttgcaccaccatgtcgagaatatcattgggtcatgtctggagagtaagcaggatcacctgattggccatgtccttgatgagtgtaaacttgttacaagaattctggaagcggagaagaactctgctctgtcgtcagatttaactaagcatacattgtctacagagggaagatgtccaccaaggataggaattgttggtcatatgacacgaatagctaacaagctccttcagctggccaataccaacatcatggtccaatcatatttgcagcaaaattctgattggattgagtggcacaccagtaccctaacgaagcgtaatgcattagaaaatgtttaccagtgggcatgtggtcgaccaacatcactacaggatcgtggtagggatagtgatgatgaagacttccgagatagggactacgatgtggctgcacttgctagtaatttaagccaggcatttaaatatggtatctacagtaacgatgacattgacgaggctcaagcatcacttgagcgggatgatgaggatgtatattttgatgatgaatctgcagaggtagtaatctcctcccttcgccttggagacgaccaagaaagtggctcgctctttacaaattccaactggtttgcatttgacgaggacaaggcactgaatgatggtttggttagcccagaagcttccccatctccaaattcagaaatatccgcactaaaagaggatgatgaagtcattcttggcgaagtaatagatgacacagaaggttctgaaccaactctaccagtctccaacaaagacgcaaacgaagagtctggtcacaccgtcttggcaaatggtaccattgacaaacaggaagatgatatcaggccactgactccggatgtaaaagagagtcaacccgagtttgtggaatggaaggaggaagaagctgaacctggtgatgttgctgagaaggatactgcagttcctggtattgaggttgaaagtgagaagcagctgaattccatggacgatgttatgctttgtgatgccgagttaggagaggaaaagaagagtggtggtatgcttggatcttcagcacctgaggcagaagcagcatcgcctgtttcatctgacatcgattcaatcaagcacccggaacaagctgctgacagtgctgtatcagagtatccaatgggcgaacaaaatcctgagatatgaaatgaatttgagggcagcagagttccgctcacgtgatggcggatgatgatggacgtgcaggaagcacttggaactggttggaccattactgtacaagcagtttgaggatcatgtgtgggttttctgttctactctcttggaggaaggtggtcccggaacatgcatctgatggagcctcaaaggttccacttagtctcatggagatgcttaggttcgatgtgtaacatattcatggagacgcaaaattcagaaagttgacttccctgcccttttccttaatcagtggggttctggttgtgtcactctggtaaatagccgataattgaataggtgatatctggtctggctacatgtccattactgtagttggtgctatttgtacgaaagttttggctcaaatgcagtcagttgattcttgtcatatttagaacttgtttgaaatttgtgtaaacgaaaaaaatatagcttctatttttcccaggtgcttggtgcttaattcatctgttataaatatagattttattttcccctcttgttctttgttttccccagcagaacagaaaaagaaaacttc

SEQ ID NO: 207130 - DNA, 3271 bp, Zea Mays
ccgcctcgccctgctgcttcccttcttccgcctccgcctccactccacctccgcctccgcgcccttccgacctcccagtcctcctcatctcgcgattggcgaattatagggtttcgcggcggccacccggatccagctcggcttggtgagcgcctccaaagcttcggatcgcgagagggcgctgtgctcactcgctgttccgccgccgccgcgacgacgacgacgagcttctgtgcgcctgtgcctgggttcggagcccccgtcgcccctccgctggccaccgctcatgatgtggaaatctcagctctaaatccgcttaggttgtgataccgtgacagtgtgggactgacataattgtcactgtgcaagatgttttggcacgtgccaggattctccgctgcatcacctgtggatactattttggacaaggaaaattttaagttggaggatcttcttgatgaggatgaaataattcaggagtgcaaagcactgaatacccgcttaatcaattttttgcgggataaggttcaagtggagcaattgctccgctacattgtagaggaggctcctgaagatgcagaaaagaaacggatatttagatttccatttatagcttgtgaaatatttacatgtgacgtggatgtcatcatgaagacattagtggaggatgaagatcttatgaatttgcttttctccttcctaaaacctgaccaccctcatgggacattgttggctggttactttgctaaggtagtaatttgtttggcgatgaggaagacacttcaactagttcattatgtgcagggccatcctgaaatagttagccagcttgttgatcttattgggattacttctatcatggaggttttgattcgcttaatcggtgcagatgaaactatgtattcaagccatgcagattctatgcaatggttagatgacatacaagtccttgagatgattgttgacaagttcagcacatcagattctgctgaggttcacgcaaatgctgctgaaatcctttgtgcagtaaccagatacgcccctccagcacttgctgcaaagatttccagtccaagcttcgtagggaggttatttcaacatgcttttgaagattcaaggcctaaatcggtgctggtccactcattatcagtgtgcatatctttgttagatcctaagagacttgtatcggcttcctaccaagctttccgtagccagttgagccatggaacacttgtcactgcaagtccagagacagtaaatggcatgctggatagcctaggggatttgttgaagctgctggatgtttcatctgccgaaaatgttctgccaacaacatatggaagcttacaacctccactcgggaaacatcgcttaaagattgttgagttcatctctgttctactatcaattggtagtgaagttgccgaaacgcgactgattcaactaggagcaatccagcacgctatagatctattttttgagtacccgtttaacaacttcttgcaccaccatgtcgagaatatcattgggtcatgtctggagagtaagcaggatcacctgattggccatgtccttgatgagtgtaaacttgttacaagaattctggaagcggagaagaactctgctctgtcgtcagatttaactaagcatacattgtctacagagggaagatgtccaccaaggataggaattgttggtcatatgacacgaatagctaacaagctccttcagctggccaataccaacatcatggtccaatcatatttgcagcaaaattctgattggattgagtggcacaccagtaccctaacgaagcgtaatgcattagaaaatgtttaccagtgggcatgtggtcgaccaacatcactacaggatcgtggtagggatagtgatgatgaagacttccgagatagggactacgatgtggctgcacttgctagtaatttaagccaggcatttaaatatggtatctacagtaacgatgacattgacgaggctcaagcatcacttgagcgggatgatgaggatgtatattttgatgatgaatctgcagaggtagtaatctcctcccttcgccttggagacgaccaagaaagtggctcgctctttacaaattccaactggtttgcatttgacgaggacaaggcactgaatgatggtttggttagcccagaagcttccccatctccaaattcagaaatatccgcactaaaagaggatgatgaagtcattcttggcgaagtaatagatgacacagaaggttctgaaccaactctaccagtctccaacaaagacgcaaacgaagagtctggtcacaccgtcttggcaaatggtaccattgacaaacaggaagatgatatcaggccactgactccggatgtaaaagagagtcaacccgagtttgtggaatggaaggaggaagaagctgaacctggtgatgttgctgagaaggatactgcagttcctggtattgaggttgaaagtgagaagcagctgaattccatggacgatgttatgctttgtgatgccgagttaggagaggaaaagaagagtggtggtatgcttggatcttcagcacctgaggcagaagcagcatcgcctgtttcatctgacatcgattcaatcaagcacccggaacaagctgctgacagtgctgtatcagagtatccaatgggcgaacaaaatcctgagatatgaaatgaatttgagggcagcagagttccgctcacgtgatggcggatgatgatggacgtgcaggaagcacttggaactggttggaccattactgtacaagcagtttgaggatcatgtgtgggttttctgttctactctcttggaggaaggtggtcccggaacatgcatctgatggagcctcaaaggttccacttagtctcatggagatgcttaggttcgatgtgtaacatattcatggagacgcaaaattcagaaagttgacttccctgcccttttccttaatcagtggggttctggttgtgtcactctggtaaatagccgataattgaataggtgatatctggtctggctacatgtccattactgtagttggtgctatttgtacgaaagttttggctcaaatgcagtcagttgattcttgtcatatttagaacttgtttgaaatttgtgtaaacgaaaaaaatatagcttctatttttcccaggtgcttggtgcttaattcatctgttataaatatagattttattttcccctcttgttctttgttttccccagcagaacagaaaaagaaaacttc

SEQ ID NO: 207131 - DNA, 3332 bp, Zea Mays
catgtcgcatcgagacgaagcctttcgtttagattattctccccaaagtttcttccggcctctcctccacccccacctccgcctcgccctgctgcttcccttcttccgcctccgcctccactccacctccgcctccgcgcccttccgacctcccagtcctcctcatctcgcgattggcgaattatagggtttcgcggcggccacccggatccagctcggcttggtgagcgcctccaaagcttcggatcgcgagagggcgctgtgctcactcgctgttccgccgccgccgcgacgacgacgacgagcttctgtgcgcctgtgcctgggttcggagcccccgtcgcccctccgctggccaccggataccagctcatgatgtggaaatctcagctctaaatccgcttaggttgtgataccgtgacagtgtgggactgacataattgtcactgtgcaagatgttttggcacgtgccaggattctccgctgcatcacctgtggatactattttggacaaggaaaattttaagttggaggatcttcttgatgaggatgaaataattcaggagtgcaaagcactgaatacccgcttaatcaattttttgcgggataaggttcaagtggagcaattgctccgctacattgtagaggaggctcctgaagatgcagaaaagaaacggatatttagatttccatttatagcttgtgaaatatttacatgtgacgtggatgtcatcatgaagacattagtggaggatgaagatcttatgaatttgcttttctccttcctaaaacctgaccaccctcatgggacattgttggctggttactttgctaaggtagtaatttgtttggcgatgaggaagacacttcaactagttcattatgtgcagggccatcctgaaatagttagccagcttgttgatcttattgggattacttctatcatggagatgaaactatgtattcaagccatgcagattctatgcaatggttagatgacatacaagtccttgagatgattgttgacaagttcagcacatcagattctgctgaggttcacgcaaatgctgctgaaatcctttgtgcagtaaccagatacgcccctccagcacttgctgcaaagatttccagtccaagcttcgtagggaggttatttcaacatgcttttgaagattcaaggcctaaatcggtgctggtccactcattatcagtgtgcatatctttgttagatcctaagagacttgtatcggcttcctaccaagctttccgtagccagttgagccatggaacacttgtcactgcaagtccagagacagtaaatggcatgctggatagcctaggggatttgttgaagctgctggatgtttcatctgccgaaaatgttctgccaacaacatatggaagcttacaacctccactcgggaaacatcgcttaaagattgttgagttcatctctgttctactatcaattggtagtgaagttgccgaaacgcgactgattcaactaggagcaatccagcacgctatagatctattttttgagtacccgtttaacaacttcttgcaccaccatgtcgagaatatcattgggtcatgtctggagagtaagcaggatcacctgattggccatgtccttgatgagtgtaaacttgttacaagaattctggaagcggagaagaactctgctctgtcgtcagatttaactaagcatacattgtctacagagggaagatgtccaccaaggataggaattgttggtcatatgacacgaatagctaacaagctccttcagctggccaataccaacatcatggtccaatcatatttgcagcaaaattctgattggattgagtggcacaccagtaccctaacgaagcgtaatgcattagaaaatgtttaccagtgggcatgtggtcgaccaacatcactacaggatcgtggtagggatagtgatgatgaagacttccgagatagggactacgatgtggctgcacttgctagtaatttaagccaggcatttaaatatggtatctacagtaacgatgacattgacgaggctcaagcatcacttgagcgggatgatgaggatgtatattttgatgatgaatctgcagaggtagtaatctcctcccttcgccttggagacgaccaagaaagtggctcgctctttacaaattccaactggtttgcatttgacgaggacaaggcactgaatgatggtttggttagcccagaagcttccccatctccaaattcagaaatatccgcactaaaagaggatgatgaagtcattcttggcgaagtaatagatgacacagaaggttctgaaccaactctaccagtctccaacaaagacgcaaacgaagagtctggtcacaccgtcttggcaaatggtaccattgacaaacaggaagatgatatcaggccactgactccggatgtaaaagagagtcaacccgagtttgtggaatggaaggaggaagaagctgaacctggtgatgttgctgagaaggatactgcagttcctggtattgaggttgaaagtgagaagcagctgaattccatggacgatgttatgctttgtgatgccgagttaggagaggaaaagaagagtggtggtatgcttggatcttcagcacctgaggcagaagcagcatcgcctgtttcatctgacatcgattcaatcaagcacccggaacaagctgctgacagtgctgtatcagagtatccaatgggcgaacaaaatcctgagatatgaaatgaatttgagggcagcagagttccgctcacgtgatggcggatgatgatggacgtgcaggaagcacttggaactggttggaccattactgtacaagcagtttgaggatcatgtgtgggttttctgttctactctcttggaggaaggtggtcccggaacatgcatctgatggagcctcaaaggttccacttagtctcatggagatgcttaggttcgatgtgtaacatattcatggagacgcaaaattcagaaagttgacttccctgcccttttccttaatcagtggggttctggttgtgtcactctggtaaatagccgataattgaataggtgatatctggtctggctacatgtccattactgtagttggtgctatttgtacgaaagttttggctcaaatgcagtcagttgattcttgtcatatttagaacttgtttgaaatttgtgtaaacgaaaaaaatatagcttctatttttcccaggtgcttggtgcttaattcatctgttataaatatagattttattttcccctcttgttctttgttttccccagcagaacagaaaaagaaaacttc

SEQ ID NO: 207132 - DNA, 3267 bp, Zea Mays
cccatgtcgcatcgagacgaagcctttcgtttagattattctccccaaagtttcttccggcctctcctccacccccacctccgcctcgccctgctgcttcccttcttccgcctccgcctccactccacctccgcctccgcgcccttccgacctcccagtcctcctcatctcgcgattggcgaattatagggtttcgcggcggccacccggatccagctcggcttggtgagcgcctccaaagcttcggatcgcgagagggcgctgtgctcactcgctgttccgccgccgccgcgacgacgacgacgagcttctgtgcgcctgtgcctgggttcggagcccccgtcgcccctccgctggccaccggataccagctcatgatgtggaaatctcagctctaaatccgcttaggttgtgataccgtgacagtgtgggactgacataattgtcactgtgcaagatgttttggcacgtgccaggattctccgctgcatcacctgtggatactattttggacaaggaaaattttaagttggaggatcttcttgatgaggatgaaataattcaggagtgcaaagcactgaatacccgcttaatcaattttttgcgggataaggttcaagtggagcaattgctccgctacattgtagaggaggctcctgaagatgcagaaaagaaacggatatttagatttccatttatagcttgtgaaatatttacatgtgacgtggatgtcatcatgaagacattagtggaggatgaagatcttatgaatttgcttttctccttcctaaaacctgaccaccctcatgggacattgttggctggttactttgctaaggtagtaatttgtttggcgatgaggaagacacttcaactagttcattatgtgcagggccatcctgaaatagttagccagcttgttgatcttattgggattacttctatcatggaggttttgattcgcttaatcggtgcagatgaaactatgtattcaagccatgcagattctatgcaatggttagatgacatacaagtccttgagatgattgttgacaagttcagcacatcagattctgctgaggttcacgcaaatgctgctgaaatcctttgtgcagtaaccagatacgcccctccagcacttgctgcaaagatttccagtccaagatcctaagagacttgtatcggcttcctaccaagctttccgtagccagttgagccatggaacacttgtcactgcaagtccagagacagtaaatggcatgctggatagcctaggggatttgttgaagctgctggatgtttcatctgccgaaaatgttctgccaacaacatatggaagcttacaacctccactcgggaaacatcgcttaaagattgttgagttcatctctgttctactatcaattggtagtgaagttgccgaaacgcgactgattcaactaggagcaatccagcacgctatagatctattttttgagtacccgtttaacaacttcttgcaccaccatgtcgagaatatcattgggtcatgtctggagagtaagcaggatcacctgattggccatgtccttgatgagtgtaaacttgttacaagaattctggaagcggagaagaactctgctctgtcgtcagatttaactaagcatacattgtctacagagggaagatgtccaccaaggataggaattgttggtcatatgacacgaatagctaacaagctccttcagctggccaataccaacatcatggtccaatcatatttgcagcaaaattctgattggattgagtggcacaccagtaccctaacgaagcgtaatgcattagaaaatgtttaccagtgggcatgtggtcgaccaacatcactacaggatcgtggtagggatagtgatgatgaagacttccgagatagggactacgatgtggctgcacttgctagtaatttaagccaggcatttaaatatggtatctacagtaacgatgacattgacgaggctcaagcatcacttgagcgggatgatgaggatgtatattttgatgatgaatctgcagaggtagtaatctcctcccttcgccttggagacgaccaagaaagtggctcgctctttacaaattccaactggtttgcatttgacgaggacaaggcactgaatgatggtttggttagcccagaagcttccccatctccaaattcagaaatatccgcactaaaagaggatgatgaagtcattcttggcgaagtaatagatgacacagaaggttctgaaccaactctaccagtctccaacaaagacgcaaacgaagagtctggtcacaccgtcttggcaaatggtaccattgacaaacaggaagatgatatcaggccactgactccggatgtaaaagagagtcaacccgagtttgtggaatggaaggaggaagaagctgaacctggtgatgttgctgagaaggatactgcagttcctggtattgaggttgaaagtgagaagcagctgaattccatggacgatgttatgctttgtgatgccgagttaggagaggaaaagaagagtggtggtatgcttggatcttcagcacctgaggcagaagcagcatcgcctgtttcatctgacatcgattcaatcaagcacccggaacaagctgctgacagtgctgtatcagagtatccaatgggcgaacaaaatcctgagatatgaaatgaatttgagggcagcagagttccgctcacgtgatggcggatgatgatggacgtgcaggaagcacttggaactggttggaccattactgtacaagcagtttgaggatcatgtgtgggttttctgttctactctcttggaggaaggtggtcccggaacatgcatctgatggagcctcaaaggttccacttagtctcatggagatgcttaggttcgatgtgtaacatattcatggagacgcaaaattcagaaagttgacttccctgcccttttccttaatcagtggggttctggttgtgtcactctggtaaatagccgataattgaataggtgatatctggtctggctacatgtccattactgtagttggtgctatttgtacgaaagttttggctcaaatgcagtcagttgattcttgtcatatttagaacttgtttgaaatttgtgtaaacgaaaaaaatatagcttctatttttcccaggtgcttggtgcttaattcatctgttataaatatagattttattttcccctcttgttctttgttttccccagcagaacagaaaaagaaaacttc

SEQ ID NO: 207133 - DNA, 3321 bp, Zea Mays
ctccccatgtcgcatcgagacgaagcctttcgtttagattattctccccaaagtttcttccggcctctcctccacccccacctccgcctcgccctgctgcttcccttcttccgcctccgcctccactccacctccgcctccgcgcccttccgacctcccagtcctcctcatctcgcgattggcgaattatagggtttcgcggcggccacccggatccagctcggcttggtgagcgcctccaaagcttcggatcgcgagagggcgctgtgctcactcgctgttccgccgccgccgcgacgacgacgacgagcttctgtgcgcctgtgcctgggttcggagcccccgtcgcccctccgctggccaccggataccagctcatgatgtggaaatctcagctctaaatccgcttaggttgtgataccgtgacagtgtgggactgacataattgtcactgtgcaagatgttttggcacgtgccaggattctccgctgcatcacctgtggatactattttggacaaggaaaattttaagttggaggatcttcttgatgaggatgaaataattcaggagtgcaaagcactgaatacccgcttaatcaattttttgcgggataaggttcaagtggagcaattgctccgctacattgtagaggaggctcctgaagatgcagaaaagaaacggatatttagatttccatttatagcttgtgaaatatttacatgtgacgtggatgtcatcatgaagacattagtggaggatgaagatcttatgaatttgcttttctccttcctaaaacctgaccaccctcatgggacattgttggctggttactttgctaaggtagtaatttgtttggcgatgaggaagacacttcaactagttcattatgtgcagggccatcctgaaatagttagccagcttgttgatcttattgggattacttctatcatggaggttttgattcgcttaatcggtgcagatgaaactatgtattcaagccatgcagattctatgcaatggttagatgacatacaagtccttgagatgattgttgacaagttcagcacatcagattctgctgaggttcacgcaaatgctgctgaaatcctttgtgcagtaaccagatacgcccctccagcacttgctgcaaagatttccagtccaagcttcgtagggaggttatttcaacatgcttttgaagattcaaggcctaaatcggtgctggtccactcattatcagtgtgcatatctttgttagatcctaagagacttgtatcggcttcctaccaagctttccgtagccagttgagccatggaacacttgtcactgcaagtccagagacagtaaatggcatgctggatagcctaggggatttgttgaagctgctggatgtttcatctgccgaaaatgttctgccaacaacatatggaagcttacaacctccactcgggaaacatcgcttaaagattgttgagttcatctctgttctactatcaattggtagtgaagttgccgaaacgcgactgattcaactaggagcaatccagcacgctatagatctattttttgagtacccgtttaacaacttcttgcaccaccatgtcgagaatatcattgggtcatgtctggagagtaagcaggatcacctgattggccatgtccttgatgagtgtaaacttgttacaagaattctggaagcggagaagaactctgctctgtcgtcagatttaactaagcatacattgtctacagagggaagatgtccaccaaggataggaattgttggtcatatgacacgaatagctaacaagctccttcagctggccaataccaacatcatggtccaatcatatttgcagcaaaattctgattggattgagtggcacaccagtaccctaacgaagcgtaatgcattagaaaatgtttaccagtgggcatgtggtcgaccaacatcactacaggatcgtggtagggatagtgatgatgaagacttccgagatagggactacgatgtggctgcacttgctagtaatttaagccaggcatttaaatatggtatctacagtaacgatgacattgacgaggctcaagcatcacttgagcgggatgatgaggatgtatattttgatgatgaatctgcagagtggctcgctctttacaaattccaactggtttgcatttgacgaggacaaggcactgaatgatggtttggttagcccagaagcttccccatctccaaattcagaaatatccgcactaaaagaggatgatgaagtcattcttggcgaagtaatagatgacacagaaggttctgaaccaactctaccagtctccaacaaagacgcaaacgaagagtctggtcacaccgtcttggcaaatggtaccattgacaaacaggaagatgatatcaggccactgactccggatgtaaaagagagtcaacccgagtttgtggaatggaaggaggaagaagctgaacctggtgatgttgctgagaaggatactgcagttcctggtattgaggttgaaagtgagaagcagctgaattccatggacgatgttatgctttgtgatgccgagttaggagaggaaaagaagagtggtggtatgcttggatcttcagcacctgaggcagaagcagcatcgcctgtttcatctgacatcgattcaatcaagcacccggaacaagctgctgacagtgctgtatcagagtatccaatgggcgaacaaaatcctgagatatgaaatgaatttgagggcagcagagttccgctcacgtgatggcggatgatgatggacgtgcaggaagcacttggaactggttggaccattactgtacaagcagtttgaggatcatgtgtgggttttctgttctactctcttggaggaaggtggtcccggaacatgcatctgatggagcctcaaaggttccacttagtctcatggagatgcttaggttcgatgtgtaacatattcatggagacgcaaaattcagaaagttgacttccctgcccttttccttaatcagtggggttctggttgtgtcactctggtaaatagccgataattgaataggtgatatctggtctggctacatgtccattactgtagttggtgctatttgtacgaaagttttggctcaaatgcagtcagttgattcttgtcatatttagaacttgtttgaaatttgtgtaaacgaaaaaaatatagcttctatttttcccaggtgcttggtgcttaattcatctgttataaatatagattttattttcccctcttgttctttgttttccccagcagaacagaaaaagaaaacttc

SEQ ID NO: 207134 - DNA, 558 bp, Zea Mays
ctcaaagggccttgcatctccagcgtcggcgtccacgacgccggggaccagcgaccatgcggccactttcctgttgcgctctcgtccgtctccacaatttgtgcagaaagaagcatttaacgactggccgcaccagaccaaaccgtagcagaactcaactgaaggcaactgcgggcccgcggccgcaatgagtcaacaggaatgcagtctatcagatgatgaaaagcagaaggaatcccttctcagagagtgaaatccaaaactggtgctttcaaatatttcaagatctgatttacatgcattcgcatggatatttccaatgcgaccttaatcctgatatgtggttttgcattttttttacaaacaatattgcaatggttgatctatgattcctgtttgttgtgaaacaagtttctagccccaaccattttcacatgacattttagataagaaaatagttctccatatagctcaatcttcatgtttaaaatatcatgtgtatttgactggagggactatcagttataagcccaagaatagctgccttgcaattttcct

SEQ ID NO: 207135 - DNA, 708 bp, Zea Mays
aaaaggggctctcaaagggccttgcatctccagcgtcggcgtccacgacgccggggaccagcgaccatgcggccactttcctgttgcgctctcgtccgtctccacaatttgtgcagtggatctagaaagaagcatttaacgactggccgcaccagaccaaaccgtagcagaactcaactgaaggcaactgcgggcccgcggccgcaatgagtcaacagatgaagtgtttgagaagacaaattattattctttggggagagtgcataaatcttcgataagcgaagtccatgcgaaggatgaaccataaaaactgtgaagatcaaataagtcataagagaatgatttttgagaatgcagtctatcagatgatgaaaagcagaaggaatcccttctcagagagtgaaatccaaaactggtgctttcaaatatttcaagatctgatttacatgcattcgcatggatatttccaatgcgaccttaatcctgatatgtggttttgcattttttttacaaacaatattgcaatggttgatctatgattcctgtttgttgtgaaacaagtttctagccccaaccattttcacatgacattttagataagaaaatagttctccatatagctcaatcttcatgtttaaaatatcatgtgtatttgactggagggactatcagttataagcccaagaatagctgccttgcaattttcct

SEQ ID NO: 207136 - DNA, 708 bp, Zea Mays
caaaaggggctctcaaagggccttgcatctccagcgtcggcgtccacgacgccggggaccagcgaccatgcggccactttcctgttgcgctctcgtccgtctccacaatttgtgcagaccaaagacaaagtaagagtgtgctgaaagaagaaattgacctacttaaggtggaaccaaacgaaagcgaagtggatctagaaagaagcatttaacgactggccgcaccagaccaaaccgtagcagaactcaactgaaggcaactgcgggcccgcggccgcaatgagtcaacagatgaagtgtttgagaagacaaattattattctttggggagagtgcataaatcttcgataagcgaagtctatcagatgatgaaaagcagaaggaatcccttctcagagagtgaaatccaaaactggtgctttcaaatatttcaagatctgatttacatgcattcgcatggatatttccaatgcgaccttaatcctgatatgtggttttgcattttttttacaaacaatattgcaatggttgatctatgattcctgtttgttgtgaaacaagtttctagccccaaccattttcacatgacattttagataagaaaatagttctccatatagctcaatcttcatgtttaaaatatcatgtgtatttgactggagggactatcagttataagcccaagaatagctgccttgcaattttcct

SEQ ID NO: 207137 - DNA, 641 bp, Zea Mays
caaaaggggctctcaaagggccttgcatctccagcgtcggcgtccacgacgccggggaccagcgaccatgcggccactttcctgttgcgctctcgtccgtctccacaatttgtgcagaccaaagacaaagtaagagtgtgctgaaagaagaaattgacctacttaaggtggaaccaaacgaaagcgaagaaagaagcatttaacgactggccgcaccagaccaaaccgtagcagaactcaactgaaggcaactgcgggcccgcggccgcaatgagtcaacaggaatgcagtctatcagatgatgaaaagcagaaggaatcccttctcagagagtgaaatccaaaactggtgctttcaaatatttcaagatctgatttacatgcattcgcatggatatttccaatgcgaccttaatcctgatatgtggttttgcattttttttacaaacaatattgcaatggttgatctatgattcctgtttgttgtgaaacaagtttctagccccaaccattttcacatgacattttagataagaaaatagttctccatatagctcaatcttcatgtttaaaatatcatgtgtatttgactggagggactatcagttataagcccaagaatagctgccttgcaattttcct

SEQ ID NO: 207138 - DNA, 651 bp, Zea Mays
ccaaaaggggctctcaaagggccttgcatctccagcgtcggcgtccacgacgccggggaccagcgaccatgcggccactttcctgttgcgctctcgtccgtctccacaatttgtgcagaccaaagacaaagtaagagtgtgctgaaagaagaaattgacctacttaaggtggaaccaaacgaaagcgaagtggatctagaaagaagcatttaacgactggccgcaccagaccaaaccgtagcagaactcaactgaaggcaactgcgggcccgcggccgcaatgagtcaacaggaatgcagtctatcagatgatgaaaagcagaaggaatcccttctcagagagtgaaatccaaaactggtgctttcaaatatttcaagatctgatttacatgcattcgcatggatatttccaatgcgaccttaatcctgatatgtggttttgcattttttttacaaacaatattgcaatggttgatctatgattcctgtttgttgtgaaacaagtttctagccccaaccattttcacatgacattttagataagaaaatagttctccatatagctcaatcttcatgtttaaaatatcatgtgtatttgactggagggactatcagttataagcccaagaatagctgccttgcaattttcct

SEQ ID NO: 207139 - DNA, 579 bp, Zea Mays
ccaaaaggggctctcaaagggccttgcatctccagcgtcggcgtccacgacgccggggaccagcgaccatgcggccactttcctgttgcgctctcgtccgtctccacaatttgtgcagtggatctagaaagaagcatttaacgactggccgcaccagaccaaaccgtagcagaactcaactgaaggcaactgcgggcccgcggccgcaatgagtcaacaggaatgcagtctatcagatgatgaaaagcagaaggaatcccttctcagagagtgaaatccaaaactggtgctttcaaatatttcaagatctgatttacatgcattcgcatggatatttccaatgcgaccttaatcctgatatgtggttttgcattttttttacaaacaatattgcaatggttgatctatgattcctgtttgttgtgaaacaagtttctagccccaaccattttcacatgacattttagataagaaaatagttctccatatagctcaatcttcatgtttaaaatatcatgtgtatttgactggagggactatcagttataagcccaagaatagctgccttgcaattttcct

SEQ ID NO: 207140 - DNA, 645 bp, Zea Mays
ccaaaaggggctctcaaagggccttgcatctccagcgtcggcgtccacgacgccggggaccagcgaccatgcggccactttcctgttgcgctctcgtccgtctccacaatttgtgcagtggatctagaaagaagcatttaacgactggccgcaccagaccaaaccgtagcagaactcaactgaaggcaactgcgggcccgcggccgcaatgagtcaacagatgaagtgtttgagaagacaaattattattctttggggagagtgcataaatcttcgataagcgaaggaatgcagtctatcagatgatgaaaagcagaaggaatcccttctcagagagtgaaatccaaaactggtgctttcaaatatttcaagatctgatttacatgcattcgcatggatatttccaatgcgaccttaatcctgatatgtggttttgcattttttttacaaacaatattgcaatggttgatctatgattcctgtttgttgtgaaacaagtttctagccccaaccattttcacatgacattttagataagaaaatagttctccatatagctcaatcttcatgtttaaaatatcatgtgtatttgactggagggactatcagttataagcccaagaatagctgccttgcaattttcct

SEQ ID NO: 207141 - DNA, 1193 bp, Zea Mays
gtttctcttcccttctctctctgctccgggttcagagcagagctcagcgccctgtctccctccctccctccattcctcctcctccgctctctctctgcaggcctgcactgtgaggagactgtgacccggggacggagagctcctttcttctctctcatcgctccaccccttatttaccggtcggttgttcctgggccgtcccgtcccgtcccgtcgtctcgcctgggttctcgcttgcttctcaccatcactaccaccgtccacaccatcgcgagggcctggagggaagaggatgggacagggaggagaagtgaaggcggcgccggccgtgagggtgctggtggtggacgactcccccgtcgaccgcaaggtcgtggagctgctgctccggaaccacaaccaccagggcggcgccgcgccattccacgttaccgccgtcgacagcggcaagaaggcaatggagcatctccggctgatggagcaaggcggccagctggattcatgtgccgctgatgctaatcggataaccattgacatcgtgctcacggactactgcatgccggagatgactggctacgacctgctcaaggccatcaaggcgctgagctcccctaacccgatcccggtggtggtgatgtcgtcggagaacgagccccagaggatcagcagatgcctaaccgccggtgccgaggatttcatcctcaagccactcaagaccaaggacgtgcagcgcctgcgcaactgctccagcgccgctagacccagggacgacgcggcccaccagtgcgagagcttgaggaggagcagcagaaagctgcggtcggatcaggtcgccgcgcctggccacagatcgcaaccgacgacgggattaaccatggtgctgcatgcctccagcattgagctctcgcactacttccagttcctcctcaagttcgtgctgctcgcgtacgcggtgctgtgcctgaccgagctcctccacagatggtccaatggctccgtcctctccctgtggtctgcatgaggtcgactggaaccgcgatgcggtattattagtgtaaccactaaggctccaggctttcagttcaattcccccctgtaatccagtcctggcatgaggagccaccagttcttgctcgccgctccctatatttccatttcacttttcaccagcttttttgtgagggggggggggg

SEQ ID NO: 207142 - DNA, 3495 bp, Zea Mays
cccaaaacccactccgcctcctccgtgtacggtgtaccccatggcgcccgccgcggccgtcatcggcgctggagattccgatcgtctcgcgcgcgaggtggcgcgggtgctggacgagtgccgcgcatcccacgccgtgcaaccgcgtaagctgcgggagctcgcggccctccgctcctcttcaggaggcggcggccgcctcttcatcgcagccttccacgtcgctgtcacgccgctcttcgccctcgcccgccgatccgctgaatctgaccgcgtcgcccgcttcatctctgccttcgcgtccgcttccgcatcatcggccgacgatggtgggaacgggttcctcgaggagttccttcggttcctcgtcaccgcgtccaaggccgcgcaccgtcccgcgcgattccgcgcatgccaaatcatctctgagattataatgcggctgccagatgatgctgaggtgagcgatgagatttgggatgaagtaattgatggcatgaaggtccgggttcaagataagaatgctgcaattcgcacttatgctgtgcgagcattgtcccgttttgcagttgaaggagaggatggtggcattgttgacctattcctcgagaccctagacaatgagccgaatgctgaggttcggaagacaatagttttttctcttccaccatcaaataatacactagagagcgtagttgaatcaatgcttgacattagtgaatcagttagacgagcagcatattctgtgcttgcaactaaatttcccctgcagactcttagcattaagcaaaggactactgtccttcacaggggcctatctgataggtctgcttcagtaaacaacgagtgcctgaagatgctgaaggatgagtggcttgttaagtactgtggaggggatgtgatttcccttctcagatttcttgatgtcgagacatatgaatcagttggagaatctgtaatggcagtgcttctaaaagatggtgctttgcgagtgcaagatgggcacagtattaggcagtacttcactgcaaatgaacgagattccaatattcaactcatggatgctgaggttgctctttactggaaaatcatgtgcaagcatttgcaagctgaagctcaggtcaaaggctcagaggctgcagcaactacaggtgcggaagcagcggtatatgcttctgaggctactgataaaaacgaccttctcgacagtgtccttcctagcacaattactgattatgttgatttggtaaaggcacacctttctgccggtaagcaggaatagctatcattctttctatgtatggtctatttctattgcttacctaccatttcaggaccaaattatcacttcacatcaaggcaattattgctacttggtgaaatgcttgagttctctgatactatgaaccgaaagattgcaagttcttttctgcatgagcttctcgtcaggcctcttgaacatgaagttgatgatgatgggaaccagattgcaattggagacggtgtgagtcttggaggagacaaagactgggcgaaagcagtggcggagttggccaaaaaagtgcattcttctgttggtgaattcgaaatggtggtttccactgttgttgaagagctggctagaccttgcagggagagaacagctgacttcatgcagtggatgcactgtctcgccgtgacaggtcttctgcttcagaatacttcaaccttacggaatctccaggccacagcaattgagccttcagaactgcttcactctttgttgcttcccgcaaaacaaaatcatgttgatgtacaaagggctgctttaagatgcctttgtctccttggactgttagagaacagacctaatgcagagttggtgaagcagctacgcttatctttcatcaatgggcctgacttggttagtgccatagcatgcaaggccttgattgaccttgtaacttggcatgggccacaagaaatagatcgagccattggaattgaatcgccagatcctagctacgaaaaatctcagttcactcaagttgacctctctgatatgaatgatgatgatctaaacattggagttcttgatattttattttctggatttcataaagatcactgggaattcgatctagagggtgacaatcatgataatgtcccaaccattcttggtgaaggttttgcaaagattcttctcctcagtgggaattttgcaagtatacctgctgatttgcatactgttatcctcgctaaactcattaaattgtatttctcagaggaaactaaagagctcgaaagattgaaacaatgtatgtctgtcttctttcagcactatccagcactttcagataaacacaagagttgtatctgcaacgcatttgtacctgtcatgaaagccatgtggcctggtttatatggtaatgctgggggtagcactcatgttatttcaaagagacggaaacttgcggttcaagcttctcgtttcatggtgcaaatggtgcaaacccaattattttcaaccgaaagtatggaccaagcttcaaaaagttctgaaagtgcttcaggtttagcagatgcgtcaaacaattttgacatcagcgaggaagggcttgctatccgtatagcactagaggtagccagttgcccagataagaagaccgcagctgggaaagcatatgctttggccctgtgcaaggttgtggtccttctaagattccggcaatcagaacagaaggccatcaagtgcatgagaggccttgtgaatcatttggctgcttcagtggcttccgacaaggagctcgggaaggagctagctcaaatggctgcacggcttagatcgcttgatgcctgtccagacgaagaacttgcacaagatgacgcagatgccatattcaagaaactaggattcgatgatggcttcaagttggacaccaatcaagcagtgcctcctacaccagcaccacggtcagtccggcctccggctcctgccaggagaagagcgagacaggcaccgtcctctagcgatgacagtgacgaggaagcgggagaagctgacgtgcctgcaacatcggcaagcagggttccagccactcccagtatgactgctgctgcacgttctcagagagcaagcaagactgctgctctgagcaagatgtctgcaaaacctgctaccgcgtctgatgacagtgagctggacgggcagtctgacgtcacgagcgaggaggatgcatccgatgaggagtcgttatagccttataggttgctgttattgtctcgtgtaatcgtggactggagtttctgatgacgttgttgagcggaagaaccaagtaatctaactaaattaattacagcggtgacatattgtcactgcattatgtatttctttcgtgttactaagtatgatttaaagccttcatttgcgtttgagctgcagcaatctgcacagacggttttataagcagcaagtgattagttttaaataaaagtcctgacggtggtaaatttaat

SEQ ID NO: 207143 - DNA, 2086 bp, Zea Mays
ctccctcccttcttcgattgccgtcttctctggcttccattttcgcgaggaggcgaggtggacagagacgccgccgccgcttccgcttcgacctcgacctcggcttcggcttccacgagaattctagcaagtcttctggagaatataatccacatctgtttattttgctgcattttggtatggacgaatctgcctgtagatccactgccccagttgggtttcttagaagaggttcgggcatttccttgagaaatcaaagcaatgaggataggtcaaatcagtacaacaagcagccagggaagagttcaaatcccaatcctgtaaaattacggttcactgaaaataaagagaaaccaaggtattttcaagggacatttcattcatcaggctccagggcctcatctgtaagctcttcaaaagctcctgctagaaaatactgcgacgagagacagaaacagccctttttggcagagacagacattgctgaaagcagtaacagaagaactgaggttagacgcctacaaagtggcaagaaagcttctgtatttggtgatgggcatccatacacacagaagagtatctcagaagcttcatcatcctcaacaattactggaggcttgccagaagagcatgatcttggagctttatatgtttctggttcttcaggtagttctgcacatccagttaatcccaggaatgctgcattgaatgcttcggcacatatgcaaaaggataaagaagaaatgagttcaggatgctcttcatctgattctgctcgtgataggagaatcgaagttacaaagaagagaacttctggtgcaggaagttcttcaagatcaaggataagtgaacaatctaatttcagtcagccacgtgctagttatcctggcagtactggtcctagagctagagctgctgaacaatcagcttctcaacaaacagcaaggaccaatagccgaaatattccggatcatacagattcaataaggactagacgaccttttactctacgtgccagggagaggatgatgccaggtgaaagggaggacagtgtatttgctctgcatgagactgttgcaagcattcatccagaatgcggacattttcacatggatggtactcccccagagagattaggaagacccttttatgcagaactacctcatgcaatttattcatctaatcgtcaaggatcaagtagtcagacagcaaggagaagatctacgtctcgtactgaagaaagccctcaacggatgtttcatggtatgttttgggagagagatggctacagggggataaacatggaaggaattgcacaggcgttgctagcattggataggattgaacatgatgttgaattgacttatgagcaactgcttctgctagaaactaatctgctcttaagtggccttgatttgcacgatcaacatgaagatatgagattggatatcgacaatatgtcttatgaggaactgcttgctttggaagagcatattggctcagtgactactgcccttactgaagagcaatttaccaagtgtgtaaaccaaagtgtgtatgaagcaagaaattcttatagagatgtaagcaagatcgcagcagatgatgtgaaatgtagcgtatgtcaggaggaatacgttgatggtgaagagattggtacaatgcaatgtgaacatcagtaccatgtgcgctgcattcacgaatggcttaagcagaagaattggtgtccaatatgcaaagcttcagctataccttcagagatgaccaagggagacgcatgaatcttggcccaaacttgtaaatagcgtggatttattattagacattgtagatgctgacgcagttcaccccaatatgtggatacgatagtctctcccgaacggtcgaacgcctggaaccttttgttactgcatcttttatcttcttagcacacccttgctgcttgacagcagtacgggtcagaaactcgaaaataaccgtggttctcaagaaatttttccagattctaaatatgaaattgttctccttgattgaaatgttgggttacatggtttatctaaagaccatctccagcaatttacccata

SEQ ID NO: 207144 - DNA, 1089 bp, Zea Mays
ccagaaaccattattcttccatacgccttttctgctgccgctgcatcttccactcgcgtcaagaaacgaaacccagctgcaccagcaacttctgccagcagacccaacgaccgaagctttttttttctttcttttcatcgccgccgctcggggttcaaggttcagcgcgtccccgaatgacgggcacgtacgaggcctccgaccgtcctcctcctcccaactccgccggctaccggaccgacaaagtccggcgaaagcggctgacggcgcagaagaggaaagagatcaaggaggcgttcgacctcttcgacatcgacggctccggcaccatcgatgcaagggagctgaacgtcgcgatgagagcccttggattcgagatgacaccggaggtacgtacgcgtgacgtgtgccaatggcgacgacaaccaaatcgggcagatgatcgcggaggtggacaaggacggcagcggcaccatcgacttcgacgagttcgtgcacatgatgacggacaagatgggcgagcgggacgcccgggacgagctccacaaggcgttccgcatcatcgaccaggacgccaacggaaagatctcggacatggacatccagcggctggccatcgagaccggcgagcacttcacgctggacgaggtccgggagatgatagaggccgccgacgaggacggcgacggcgagatcgacctggaggagttcatgaagatgatgaagcggacagactttggctctgggttctagtagtcacagacaagccaatcccaacatacattgatacataccatcggtgaaaaatacatatcacctagctactacgctacatatgactggagtattgggatttatttgagaaataatggcgtacacacaccacacatcattgtgcactaactactctagtacgtcctagctacgggttgtgtatttatttacacgtaatgaaacacatactactatttgtactgtcgtttttcagtaaaaaccagtaaaaatcgatatttttattggtggctattttggaatagccagtggaaaaatgcagttttcttaacaaaatgcaagtgaaaataacattcc

SEQ ID NO: 207145 - DNA, 1032 bp, Zea Mays
cgaaagtgccagaaaccattattcttccatacgccttttctgctgccgctgcatcttccactcgcgtcaagaaacgaaacccagctgcaccagcaacttctgccagcagacccaacgaccgaagctttttttttctttcttttcatcgccgccgctcggggttcaaggttcagcgcgtccccgaatgacgggcacgtacgaggcctccgaccgtcctcctcctcccaactccgccggctaccggaccgacaaagtccggcgaaagcggctgacggcgcagaagaggaaagagatcaaggaggcgttcgacctcttcgacatcgacggctccggcaccatcgatgcaagggagctgaacgtcgcgatgagcaaatcgggcagatgatcgcggaggtggacaaggacggcagcggcaccatcgacttcgacgagttcgtgcacatgatgacggacaagatgggcgagcgggacgcccgggacgagctccacaaggcgttccgcatcatcgaccaggacgccaacggaaagatctcggacatggacatccagcggctggccatcgagaccggcgagcacttcacgctggacgaggtccgggagatgatagaggccgccgacgaggacggcgacggcgagatcgacctggaggagttcatgaagatgatgaagcggacagactttggctctgggttctagtagtcacagacaagccaatcccaacatacattgatacataccatcggtgaaaaatacatatcacctagctactacgctacatatgactggagtattgggatttatttgagaaataatggcgtacacacaccacacatcattgtgcactaactactctagtacgtcctagctacgggttgtgtatttatttacacgtaatgaaacacatactactatttgtactgtcgtttttcagtaaaaaccagtaaaaatcgatatttttattggtggctattttggaatagccagtggaaaaatgcagttttcttaacaaaatgcaagtgaaaataacattcc

SEQ ID NO: 207146 - DNA, 1502 bp, Zea Mays
gagggagtgagtcaggatttagggtttgggggatttgtgggctgttttgcagcccgttttggcgtggagcccaaatttacacgtttttttggccaaagtgctttttttcgcccccagccgaaaccaccgaaatttcggaatttccatttggaaattgctaaccctggtaccaactaccgagttaatcaacttaatgtcataacatgagtgcagccagagcatcaagcccatcacagttgggtccatcttaatgtgtaacctaagggacaccaactgaattatcaagagcagtaaatgctggatctcaatattagtaggactggatgcaaaacggaagttgttcaagcttctggacttgctcaaaagtcttaagattgttaatatctatggatattttttttttcaaaacaaaaaagttatcaacctgttgttttgtagtacaacaattgtttgttcgaagtgctctacaaactggcacccccccaaaaaacaattattgaaactaatatttatgttgttgcccccatatttatcagacatccttcatatcctctcttacatgccaaaaggtctcaattttattgagcacacaatcaatattggttggaaagagcatcaaagagctcgacctatcattgtagatccagcactgcaggtcccaaataaaactgaggttcatcttgggtgatgcttagtcgatcgttcctggagttttgcttgcgatgggacaaccttcctcgcacactactgatgtatttcaccaacttcctctcatcctcagagggctacttccacacagtgatctgcaactcagagcactaccagaacaccactgtcaacagtgacctgcggttcatggcctgggataagccccctctgacgcaccctgttaacctcacaacagagcattttgatgcgatggcaaacaacggggcgccatttgcacactctttcgccaatgacaattcagtcctggatatgattgacgccaagttgttgggccgggcacctggccgcttcaccccgggtggatggtgtttgggtagctcagtaggcgggaaagatccgtgcaccttcttgggaagatcctttattctcaggccgaccaaaggttcggccaagctagagaagttgttgaaacttttggaacctgataacttcaggcctaaacaatgtaaataggactcattttgcatgtagcattttgtgggtactgttcagaagccaaagtttgacgaaatctttctagttattgcggcagttaggcatacatacaagtgtgttgttgtatacttgcatctggaaagcttatctcaaaagtgatttgagaccatacatgtactactgcggtttcatcgcttccacggatgttaaacaaccgatgataatcagagacttcagcaattttcaggaagtcagtcttaggagattgttcgacgttttgttcctaccctgttccatctcttggaagtaaaacgcttcggtttgtgcggcagattttt

SEQ ID NO: 207147 - DNA, 1375 bp, Zea Mays
gagggagtgagtcaggatttagggtttgggggatttgtgggctgttttgcagcccgttttggcgtggagcccaaatttacacgtttttttggccaaagtgctttttttcgcccccagccgaaaccaccgaaatttcggaatttccatttggaaattgctaaccctggtaccaactaccgagttaatcaacttaatgtcataacatgagtgcagccagagcatcaagcccatcacagttgggtccatcttaatgtgtaacctaagggacaccaactgaattatcaagagcagtaaatgctggatctcaatattagtaggactggatgcaaaacggaagttgttcaagcttctggacttgctcaaaagtcttaagattgttaatatctatggatattttttttttcaaaacaaaaaagttatcaacctgttgttttgtagtacaacaattgtttgttcgaagtgctctacaaactggcacccccccaaaaaacaattattgaaactaatatttatgttgttgcccccatatttatcagacatccttcatatcctctcttacatgccaaaaggtctcaattttattgagcacacaatcaatattggttggaaagagcatcaaagagctcgacctatcattgtagatccagcactgcaggtcccaaataaaactgaggttgtaacgacaaaggagaaaaggagttcatcttgggtgatgcttagtcgatcgttcctggagttttgcttgcgatgggacaaccttcctcgcacactactgatagcattttgatgcgatggcaaacaacggggcgccatttgcacactctttcgccaatgacaattcagtcctggatatgattgacgccaagttgttgggccgggcacctggccgcttcaccccgggtggatggtgtttgggtagctcagtaggcgggaaagatccgtgcaccttcttgggaagatcctttattctcaggccgaccaaaggttcggccaagctagagaagttgttgaaacttttggaacctgataacttcaggcctaaacaatgtaaataggactcattttgcatgtagcattttgtgggtactgttcagaagccaaagtttgacgaaatctttctagttattgcggcagttaggcatacatacaagtgtgttgttgtatacttgcatctggaaagcttatctcaaaagtgatttgagaccatacatgtactactgcggtttcatcgcttccacggatgttaaacaaccgatgataatcagagacttcagcaattttcaggaagtcagtcttaggagattgttcgacgttttgttcctaccctgttccatctcttggaagtaaaacgcttcggtttgtgcggcagattttt

SEQ ID NO: 207148 - DNA, 1310 bp, Zea Mays
gtcatcaatagaaccttgtagttgtttgcgagttcctagtaatataaaaataaatgacgcaaaacaataaacaaagtgctaatctaaaaaatgactttccactagagaattaaaatttatacttccagtttgcatgtgagaactcaatagtgctaatctaatgctagaaagcgttaccatcggtagtaaccactcattcacgggcagatgatgattcaccaatacatggctgttttcccttgtcccgtacactgcctccttccatcacaatcaaaactgcaaacaaggcatttccatcacaaccaaaactcaaacacctgcatatcaatggcgtaagtgtagaagcgcagtgtggtcctcctagagttgtctcacataccagtccaagcctgcaggcatcaaagagctcgacctatcattgtagatccagcactgcaggtcccaaataaaactgaggttgtaacgacaaaggagaaaaggagttcatcttgggtgatgcttagtcgatcgttcctggagttttgcttgcgatgggacaaccttcctcgcacactactgatgtatttcaccaacttcctctcatcctcagagggctacttccacacagtgatctgcaactcagagcactaccagaacaccactgtcaacagtgacctgcggttcatggcctgggataagccccctctgacgcaccctgttaacctcacaacagagcattttgatgcgatggcaaacaacggggcgccatttgcacactctttcgccaatgacaattcagtcctggatatgattgacgccaagttgttgggccgggcacctggccgcttcaccccgggtggatggtgtttgggtagctcagtaggcgggaaagatccgtgcaccttcttgggaagatcctttattctcaggccgaccaaaggttcggccaagctagagaagttgttgaaacttttggaacctgataacttcaggcctaaacaatgtaaataggactcattttgcatgtagcattttgtgggtactgttcagaagccaaagtttgacgaaatctttctagttattgcggcagttaggcatacatacaagtgtgttgttgtatacttgcatctggaaagcttatctcaaaagtgatttgagaccatacatgtactactgcggtttcatcgcttccacggatgttaaacaaccgatgataatcagagacttcagcaattttcaggaagtcagtcttaggagattgttcgacgttttgttcctaccctgttccatctcttggaagtaaaacgcttcggtttgtgcggcagattttt

SEQ ID NO: 207149 - DNA, 2892 bp, Zea Mays
caatattgtggtgcaaaggcgccaccacatccaaaaatagttggtttacctttggtttgctcctgctccttctccttctcccatgcggcaatgccgcctagcctagctacctcttctttttttcctttctcttcccaacttggcccgtatctgattttttttttcttcatcccttaccacatgccatgaacggagataatgaaagcggatttcaatgaggtaccctacgtcaagtctatccatgataattttctaaactggacattctgtaaactcttgtatcctacagaatggatgaagtgaatgaggaaaatgggccacagatacttgttccttctgaatctattgatctagtgacaagtttgtttgattcagaacctcctacatcctttgatttctctaaaagtgtcccggttgttcatagtagacatttaagtgaggatttaagtgcccttacaattaatgatctacgcttgaacaatggagacaacaattgcaatgaccagattgaacagaatggcataaataatcactctagacattttagtgaagatttaagttgccttgcaactaatgatttttatgtaaacaaagaagaggagaatgatcattactcgagtgaacaaaaggtagaaagtctccctaactctgctgaaagaaacatttataaggcagcagagattgctgagaggttcattcagtctatgaataatagggtgtttgtcgacaccggagcaccaatagaatctgtcaaagatgctgtaagcaaatttggaggcattcttgattggaaagagagacgtaagcatgtccaaattgaacttgacaaagcactagaagatgctcctaagtaccaaaaaagagcggaagttgcagaagttgagaaaaataaagttgtcatggaattgtgtaacactaggagagccattgaagggttgaagctaaatttggagaagacacaaaatgaggcaatacaagcacaacaagattcagagcttgctgatgtacggttcaaagagattcaacagggaattgccttcagagagagtgccgcagcaagagcagagattgagcttgcaagatatcgctatgctagtgccatggcagaactacatttagtaaaggatgagattgaacaacttcagaaggagtatcaatccttaaacactatgaggtacaatgctgaaacaaaagcatgtgaatctaatgttgcatctcagaagattgaggaaactgtggatgaccttaccctcgaaattattagattaaaagaggagctcacctcttcacaagctactcatattatagcagaggaacaaaaattgaatgttgctttagcaaatcaacaagaaaaggagaaatggcagaatgaactaaggcaagctgatgaagaggtccaaagtttgcgtcatgcaacatcggtcaacaaagatcttgaatctaagctaaaaaatgcctctacacttttggtgaagttgcaagatgagttttctagttatttgaaaggggaatgcacacaagaggttagtatagatggagatgcagagagacaaccattggtgtttatcaagatgaagctagcaaatgctaggaaggagcttgaggacatgagagcagacattaaaaaatccaaggatgatgttaggaaactttggaatgtcgcagctacatttcgggctgatatagatagggaggaggcaggtctactagcattagagcacaaagagcaccttgcttcgatttctgtatcatctcaccaggaagagctaagcaacattacatatgagctcaacatcatccatgaaagaacaaaagcaactaagatgcctatagagctacaacaagcaactgaagttgtggaacaagcaaaagctaaggctttgatggcccattatgaggtggcaaaagctagggaagatgcagatcaagttaagtcacaattaaatgtcattaaattgagactagaagcggcgtcaagggagatacttgcagtgaatgcatctaaagaaattgcaaccacctcagcaaatgcattgcaagaatacaaagatgaagcacatatagagccccaagatgagcagataagaaataactatatgacattatcacttgaagagtatgacgccttgagcaagaaatcccaagatgctgaacgcctcgctaagaagcgagtcatcaaggctattgagaaaatcaaagaagccaaggatgcagaggtgaggagcttgaatcagctagagcagtcgaccaagaagatctatgagaggaagttggagctaagggttgcgcaggagaaagccaattcagcgcaatatgtcaagctaaccatggagaacgagctgagaaagtgcaaggccaagcatgagcaacagaagaaagtgggcgagtcagtccattccatttctgacgtccccaatttgaagagtggatcattgtcttttgacgcagcatcttcaacctccaatcctcacatggttggagcattgtctagagctgacactatagcaacaactagagtgaaagagccaaaaccacgaaagtcactctttccaaggtccgtagtggccatgttcgtgtctaggaagaagacacgttgaccattacattcctatccactaataatattgtgctaaattcttcggtatggttcattcgtaaatgtactcatgtagcacataggttacaattggaacatatgtgtagagttgcttcagaaatatagttcaatttatgttatagattatattgagcaccacacattgagttgaccctcttacctctatgtgaatattgtaagaagcatattgtcacacccagatttaaggacaaatccagatgcatcccatatgtgtgctaggattagatttcacacatacgatgactccatgtata

SEQ ID NO: 207150 - DNA, 255 bp, Zea Mays
gaattttagatctctgcgtttgtttactcagacaaggcttgatcaccaagaagggttttaagggctcattcagcaatgcagggtcctctgccaagacttttgcaattctctctggcgttcagagtttggttttgtgcttgttgcgaaggctacgtggcaaggatgacagtacgtataccttgttatccggtcatatatttgttaacatatctgaacttgtatgtgtaaatatgaactgacatgttctgtcggcag

SEQ ID NO: 207151 - DNA, 2343 bp, Zea Mays
tttctgcaaaaggccgcgcatcctttttatatcttgcctttcccctcccgttccgttcccgtctcgctctcgcatcggccaacaacgcttcacggcaaaatccttccacaggcgggggagtcgcctcacctcacttcaccccgttcatccccagcgaagaagcaaaatacttagcacaccagtgatggcggctacttaccaaactggccttgtggccgagccacagttgctgaacactgaaattatcactcggagggccaccaactctgttgctgacactaacagaaaagacaaatgcgtcggctacttggatgtgtttgtacaccaagcacgcgacatccacaatgtttgtatctatcacaagcaggatgtgtatgcaaagctgtgcctcacgagcagccctgatgtttcgtgctcaaccaaggtgatcaacagtgctgggcgcaacccagtatttgaggaaagcctacgccttgatgtgcaaactgtggatgcttctctcaagtgcgagatatggatgttaagcagagtgaggaactacctggaggatcagctccttggctttgcccttgttcctctggtagacattgtaattggtaatggaaagctggtccaggagttctccttgacatctactgacctattccacacaccagctggatttgtgcacttgtccttgtcatatgctggttgttccccagatgttgtcctcatctcatcacccaataagtccccatcaacagtggatgattctggaaatgatcatgtggttcctgctcagcttgagaagattgtgttcccagacctaaatgtggagaaggaagacgagattatggtctcaaagtatctcgagatgacttcagactctgaaacccctataaaagttgagaacgtcatgtcactgcattctgcaaatgatgatgatgttccttctaaacttgaaaagatcaagttcatagattctgagagccgtgcgaaagctgaaaatggcaagatgctactatttggtgtagctgtgcctagtactgcaatttgtgcagataaggttgaggaacaccgcgatgaaagccctctaagttgtgtctcaaccacaggctcctccactaccctttctgcaacaacacaatcagtttctgagccttcggagaccagtgtcgaggcatcccctagacaatgccatagggagaaaagccaagatgttacaggtggtgaggctaattcttctgaaacaccagcaaaggatgaagttatcaagcctgtgatctgcgttaaccttcagccagagcagtcagttgtccaacaggacatagttgacatgtacatgaagagcatgcaacagttcacagaatctcttgcaaaaatgaaacttccattggacgttgagaatactagtccctcaaacgatgattcatactccagtacaattgagaagacatccccatccccatcttcatctgcagcaaagggttctagggtcttttatggaagcagggccttcttttaagtttctaatgcaaagtagtacactagctcgttactatctcctacatacatatacatggttccaggtttatcagatatcttctggcatgtaatcacatactttctgtctccataatatgcttctaggactcactcctggtattgctattagtgttatgctttgttagaagataataatttcatctcatagtaatcccatgtactaatacatacccatgaaatataatgtcatgaaatcagttctgactcgagattaattcctgcactgtattgtgaccaggtggggactcttcgtcccccccgttgccctgtcaaaaagaagtattgtgtttatctgaaggtctgggtgacaggtgaatcatattctgcttctcagaaataggtagaggcacgaccatgacagagcactagagcagcaatggctgctgggtgaaacattttattttcatcaagaaaagcaggaactggaagctgcgattgtttccttgtcataatttacattgcaactttaaaaagatggtgctaagtgataacgtgatatcacgggcacttgtttctagtgaagtagcatttgaggaaaaaccatgtgacttctgtagttctgttcttgaataatgtaggagagctgcctaccttgtattgtgatttgtgaaaggaagagaatatttgtacagagctccttaggagaagaaaagggggaggggcacggaatgtgcactttatttgccttattatcagttaatcatgcttcctaggtgctgccactttttagcaatctcattttgttctcaaatatttggctggtaatatatttcctcatgtgttctattacttgtcttg

SEQ ID NO: 207152 - DNA, 2311 bp, Zea Mays
cagaccacaacttcttcgttggttccagtattggggctgacactgacagtgggttccaattagatgtaccaaatgtgcgttcgcttgaacgcactctccgatctatggcagtcatgaatctaggctatcgcaaaatacttagcacaccagtgatggcggctacttaccaaactggccttgtggccgagccacagttgctgaacactgaaattatcactcggagggccaccaactctgttgctgacactaacagaaaagacaaatgcgtcggctacttggatgtgtttgtacaccaagcacgcgacatccacaatgtttgtatctatcacaagcaggatgtgtatgcaaagctgtgcctcacgagcagccctgatgtttcgtgctcaaccaaggtgatcaacagtgctgggcgcaacccagtatttgaggaaagcctacgccttgatgtgcaaactgtggatgcttctctcaagtgcgagatatggatgttaagcagagtgaggaactacctggaggatcagctccttggctttgcccttgttcctctggtagacattgtaattggtaatggaaagctggtccaggagttctccttgacatctactgacctattccacacaccagctggatttgtgcacttgtccttgtcatatgctggttgttccccagatgttgtcctcatctcatcacccaataagtccccatcaacagtggatgattctggaaatgatcatgtggttcctgctcagcttgagaagattgtgttcccagacctaaatgtggagaaggaagacgagattatggtctcaaagtatctcgagatgacttcagactctgaaacccctataaaagttgagaacgtcatgtcactgcattctgcaaatgatgatgatgttccttctaaacttgaaaagatcaagttcatagattctgagagccgtgcgaaagctgaaaatggcaagatgctactatttggtgtagctgtgcctagtactgcaatttgtgcagataaggttgaggaacaccgcgatgaaagccctctaagttgtgtctcaaccacaggctcctccactaccctttctgcaacaacacaatcagtttctgagccttcggagaccagtgtcgaggcatcccctagacaatgccatagggagaaaagccaagatgttacaggtggtgaggctaattcttctgaaacaccagcaaaggatgaagttatcaagcctgtgatctgcgttaaccttcagccagagcagtcagttgtccaacaggacatagttgacatgtacatgaagagcatgcaacagttcacagaatctcttgcaaaaatgaaacttccattggacgttgagaatactagtccctcaaacgatgattcatactccagtacaattgagaagacatccccatccccatcttcatctgcagcaaagggttctagggtcttttatggaagcagggccttcttttaagtttctaatgcaaagtagtacactagctcgttactatctcctacatacatatacatggttccaggtttatcagatatcttctggcatgtaatcacatactttctgtctccataatatgcttctaggactcactcctggtattgctattagtgttatgctttgttagaagataataatttcatctcatagtaatcccatgtactaatacatacccatgaaatataatgtcatgaaatcagttctgactcgagattaattcctgcactgtattgtgaccaggtggggactcttcgtcccccccgttgccctgtcaaaaagaagtattgtgtttatctgaaggtctgggtgacaggtgaatcatattctgcttctcagaaataggtagaggcacgaccatgacagagcactagagcagcaatggctgctgggtgaaacattttattttcatcaagaaaagcaggaactggaagctgcgattgtttccttgtcataatttacattgcaactttaaaaagatggtgctaagtgataacgtgatatcacgggcacttgtttctagtgaagtagcatttgaggaaaaaccatgtgacttctgtagttctgttcttgaataatgtaggagagctgcctaccttgtattgtgatttgtgaaaggaagagaatatttgtacagagctccttaggagaagaaaagggggaggggcacggaatgtgcactttatttgccttattatcagttaatcatgcttcctaggtgctgccactttttagcaatctcattttgttctcaaatatttggctggtaatatatttcctcatgtgttctattacttgtcttg

SEQ ID NO: 207153 - DNA, 1659 bp, Zea Mays
aagcgacatgttcacgcctgttggttcggttcggtttcggcatggaggtagctgagagaccgatggcctcgtcccacctggcagctctcgtctccctgctgatcccctgcctccttgcgcttctgctgctccgcctcgccgccgtgctggacccggaccccgacgccgccgtgccccgcatcaaggcggccgcgcccctccctctccggttccgccacgatggcgccttcaagatcctccaggtggcggacatgcacttcggcaacggcgccaccacgcgctgccgggacgtgggccccgaaggcggcggcgcgcgctgctccgacctcaacaccacgcggttcctgcgccgtgtcatcgaggccgagaagcccgacctcatcgccttcaccggggacaacatatttgggggcagtgcaactgacgcagcagaatcactactcagagcaatcagccctgctatcgaatacagggtgccatgggctgccatcttaggtaatcatgaccaagagtcgacaatgacccgggaggagctgatgaccttcatgtctctaatggactactcggtatctcaagtaaacccacctggttttttggtacatgggtttgggaattatcatgttggcatccatgggccattcggatccgagctggtcaatactagcctgcttaacctttacttcctggatagcggtgatcgtgaaatggtgaatggagttaaaacatatggatggatcagagagtctcaactcgcctggcttcgttctacttccctggagcttcagcattagcgttcttccacataccaatcccagaggtccgagggctctggtactcaggcttcaagggtcagtaccaggaaggggtggcttgctcatctgtacattctggtgtccttgggacccttgtctccatgggagatgtaaaatctgtctttttgggtcacgaccatcttaatgatttttgtggcaatctcaatgggatctggttctgttatggtggtggctttggttatcatgcctatggaagaccccattggccaaggagagctcggataatttacagtgaactcaaaaaggggcagaggtcgtggttggaagttgactcgatctcgacttggaagctgctagatgatgaaaagctctcaaaaattgatgaacaggttatctggagacatagcacagatgattctgaccacagagtctacttgtgaagaccatgaacctaaaactacttcctgtatgtgtcatgtgtataatgtttgtcgcaaagattcctccaattttataggtcgattgattattggtagtatgatgtggcacggacctattttaggtttcacatctggttcaatgttgatatgctaaccctggtttgggtcgctgacctgttttcgaccttcttgagaagctgccaattggtccccttgttttgggacttgggagcatcaccacatcataatctgtttcacaacagatgattcttaatttttttttttgtaattcacggcagatgatcctgaccacaatgtttacttgtcaaggccagagccataagacaacttccagcttgtgtcatctgttccatgtataatatctgtaaacaagtatggtccagttttgtttgtgggctcgttgaattattcttggcaatatgtgt

SEQ ID NO: 207154 - DNA, 4268 bp, Zea Mays
caagcaggagagcttcatctgtaccctgttcctgtcaggacacaatctggtgaaaagctcgagctgcagatgggtcagctcatcagttagaagactacaatgaaatatctgaaatagcagatataacttctggtggatgttcactggagatggttgctgcaatatatgatgagaggtctattaggtcacatctccgacgtgtgagggagttactatctctgtctactcttcatgtttccctatcgacatccttaactctgcagcaggagtctgcccagggaaaatctgcagattctggaaaaagccctattcaggagcttgatggtttaaattttatggaggatagtgctggtgctctcactaatttattggcatctacaccagcagagataaaatgtgttgaaagcatggttttttcttctttcaatcctccgccgacctatcggaggttacatggagatctcatctatattgatgttgctacattggaaggaaacaaatactgcattactggaagctccaaatctttttatgttaacagtagcaacaaaaatatatttgactcgaaacctacaaaacaaggactggaggccagcactctcgtaggcctactacagaagatcagtgccaaatttaagaaaggttttcgtgaagttttggatcgcagggcatcggctcatccatttgagaatgttcagtctttgcttccagtgacttcttggctaggagcgtatcctgtgcccgaacatagaagggatgcagccagggctgaagattctgttgtgttgtcatatggcactgagttaattggcatgcaaagagactggaatgaagaattgcagtcctgccgggagtttcctcatggcaatcctcaagaaaggatactgcggggcagagcgctctacaaagtaacatgtgattttgttgatgctgcagtaaaaggtgcagttggtgtcatcaatagatgcatacccccaataaatccaactgacccagaatgttttcatatgtatgttcacaacaatattttctttagttttgctgtcgactccgactatgaagacatttcaaaggaccacaagccagattgccaaaatgggtccagcagaagcaccaaggtttcctccccagatgtgataactaagccagatgcaaaccatggcaaatctgctgaggtagttgattcaaaatctgaagaggcacaactcgcagatagtgagcaggcgacatatgcttctgcaaacaatgacttaaaaggaactaaggcttatcaagaagctgatgtttctggccttcacaatcttgcgatggcaatagttgattacagaggtcacagggttgtagctcagagtataatacctggtattcttcaaggagacaagtccgattcccttctgtatggttctgttgataatggcaagaagatatcttggaacgaaacgttccattctaaggttgttgaggctgcaaagcagctccatttgaaggaacatgtggtattggatggttctggcaatcctataaaattagctgctacagtcgaatgcaagggtattgttgggagtgatgacagacattacattttggatctgatgagagtgactcctcgagattctaactacattggacaagagcaccgcttctgtgtgttgagacctgaacttatagcatcatttgttgaggttgaatccataaaacaatcgttgaagcaaaaggttccagatgctccagttgcaagtacttctgatgctaaggctacctctgttgaaggagatgacaagtctgaagaaagctctgttcatacacacgaggaaaatgacaactcaagctccgagattcttttcaatccgaatgtgtttacagagtacaagcttgctggcagtgcagaggaaatcgctgctgacgaagagttggtaaaaagggctggtacatatcttgtagatatagtgatcccaaagtttgttcaggatctttgttcccttgatatctcccctatggatggacagactttaacagatgcattgcatctccatgggataaatattaggtatctgggcaagattgcaggcatggtcaaacatttaccacacctatgggacttgttttctactgagataatagttagatctgcaaagcatgttatcaaggatatactgagacaaagtttggaccatgatattgcgccagctattgctcatttcttaaactgtttcgttgggaaagttttaggtgcttccacaaagagtagtcttagcaacgcacagtcaaaaactctgaagggtcacgaaaatagccaaactcaaaagtctactaaaggccctaaactgagccatgctgccgtttcaagaaaaagcttatcaacttattctcatctaacctctgatggaatttggtttagcattaaggaatttgcaaaatcaaaatatcagtttgaagtgccagatgaagctaggctttcagccaaaagggtagctgttctccgcaacctatgccgaaaggtaggaataacaattgctgcacgaaaatatgatatggatgcttcaagtccatttgaggcctcggatatgttaaatctccaaccagttgtcaagcattctgttccaacctgtacagatgcaaagaatcttatggaagcagggaaagtcaggatggctgagggaacattgaatgaggcatatgcattgttttctgaagccttttcactgcttcaacagattactggtcccatgcacaaggatgctgcaaattgttgccggtaccttgctatggttttgtaccatgctggtgatacagccggtgcaattgtgcagcagcatagggaactcatcataaacgagagatgtcttggtcttgatcatccggacacagcccacagttatggtaacatggccttgttctatcatgggctcaatcaaactgaattggcactgcggcacatgtcccgtacactgctgctgctaagtttggcgtcaggacctgatcatccagatgttgcagcaactctcataaatgttgcaatgatgtaccaggatgccagtaatatgaatactgctcttaggtatcttcaagaagcccttatgaagaatgaacgacttcttggccctgaccatgttcaaacagccgtatgctatcatgctcttgccattgcattcagttgtatgagcttatataagctttcaattcagcatgaaaagaagacctatgatatactggtaaaacaattaggggaaaatgactcacggactaaagattcagaaaattggttgaatacatttaagcttcgagaagaacaggtcaacgcccagaagcagaaggaccagggagctaatgcatctgataacgctgttaaattcttgaaggcaaaccctgcatttttacaagcaatgaaggctgctgcgctccaatcaggtgacaggtcagcaaatgtcaacaggtccctcaatgctgcagtagttggagaaggtgtaccacgactgagaggagtggatgagcgagctgctcgagcgaccgcagaagctcggaagaaagctgttgcaagaggcctgaatgtccgtaatggccctgcggcaaaccatgcgtctgatgaactagctcagattctcaaactcatcaatactgcttcggggtcttccacttcggcatctgcaaaaaccgaggaatctgcctctgaagggcaggcaacaaatggatctgttcaaaacggagctgcaaccgatgcgaagtctgcagatatcaacgtgccacctgcacctgccaaccaaccagttggattgggggcaacattggagttgaagaagcagaaatcaaagcaaaagtcgtagaaaacccgtgcctggaatttcttttatgactgcagttttggactttagggtgatttgtttttttacatttatagaaattccacgttcacgtggtggaagagttcatttgtttctgttggaggttcttaggagagttcaataatcattacgagaaagaagacaattgtttggaatcatcattgatagaccactgatgagataatggctaatccttaagctaataaatctgtagccggtacaacctgtttaatttttttttgtgcaagattagtatgctaatttgttgtccaacggaggtgttgcgcttatttctgttaatttttttagttcttctggtggtgcgtgactttgtgtgcagaacgattttttagtgatgcgcgtgccggcgtttgtgcagggttgtgttcgatatttcattttcagcatcgcgctgcccatgtgcaattg

SEQ ID NO: 207155 - DNA, 2624 bp, Zea Mays
tagaaaaaactgaaccaaacagccaatagacactgagcgatcatgtggcacgtgtagcgctgggacaggcccaccgccgccacctcgacgccgaacggccgaagagccactgccagtgccacaccacacgccgattctctgaacaccaatctgcgcaatcccggcaaaatcccaaaccctgcctcgtcgtcgcaccgcctccactcgtcccggatcaaccacctcctcggtccgcaaccacaaccacacccgccctcccgctcgccgcagccagaaccagctccaacccaaccagaaccagctcgccccggccgccgcgaccgtcccccctcatcgactcgaggcaacgaagcggccggatgggagcagcagcctgaccctgacgcgatgagcccgcccgccatgctgctgcccgtctgctccgccgcgcccagctgctcccccctctgcccggtgcggcctcgcccttcacgtgaccagacccaaacccacatccgccggcgatcagccggtccgcaccggtcttatccaatttgccgctttcccgggcgctgactgcccttgttgctcggcaggtgacggcctcgcacgtcgtcgcgcgggtggcgcggagggtggacgtcggcgccgcgctcaggtcctacgccgactcgctcgtcgcgcaggtgcccgaccgcccgccgctcgccgactcctccatactctccccctacatcgccgcgccggacgacatcgcgcgagccttcggcgcccccgcctccgagctcccgccgctccccagcgccgaccccagccctgggctatgttgcacgggcaccgaccagccgctggcggcagtcgcggacctggccgcaactgccgtggtcaactcggctcccaccgacgccgcggagcgggccctgtcggacgcgccgttccccagcacgttcccgtctgacgcgtccgaggtcgaggactccgtggccaggctcatcgataaggtcggcaagcaggtcttccaggcggaggacgcgctcaccgaggcctacgacaagctgaggctgtccgcgtacgacgcgctcggtgcgtggaggaagacggtgcgcgacgcgataggtgggctcaaggcgtcggtcgacgccggtaagcaacaggccgccggaggggtcacggatgcttccggcgcgttgcacgagaaggtggccggagctgggactgtggctgttgatgttctcaggaaggcgattgttgcagcagaggattcactgggcagtgctgccacattcgttgtgtattcttatgggtcggcgaaggagtctctaccaccaaatgttagagatctgttgagctcgtctgaggagaaagctagtctagtcttgagaccaatcggaaatgctctgcaacaggtctatgtagttgttgaaggtgttgagaagaatgttggtttggatccaagtgatcctattgttcaattggcagttgtgcttggaggttcagtgacaatagggacaacgtactggctcttcacatacagtggctattctggagacttgtcacctgaatcagcgtttgacttattgaaaaacgatgacaaagccgtactcattgatgttcggcctgaggcaagatattgatttgagggaaaaagatggtgttcctgatctacgcctcggggctaggtctaaatatgcaagtgtagcttcgcctgagatcaaagatccagtaaagagtatgctcaaagatgaaagagagtttgatgatgctttactggcagttgtcatccgaaacttgaaattggtgaagggcgattcaaaagtcatagttatggattctaatggagctcgatcaaaagccattgctaggttactgaagaagctcggtgtgcagcgaccttaccttgttaaaggtggtttccaagcatggtcaaagaaccttcgtgtcaaagaactgaaacctgagactgcattaacgtcaataaatgaggatgttgaggaaatcctagaacaaataaagcccaccccaactcttgtgtttggatctcttctgggcctctcagcactttcctatgctttactggaatgggagatgactttgcaatacatagctgttttaagcgttgggctgactatctacttgcgattctctacatatgaggactccgaggatttggagaaagacctaaagctgttgctgtctccagtaagagtaggcgcagacgccttgtcatgggcagctaagaagatagagccaaacaaggtgggcctgccaacgtctccttccacgacggcggtgaaagaccgggttcttcaggccgcggcgaagcacgagtcgcagccatcggatgccgacgagtcgtcggtccaaacagccgaggcatgacacgcgccgaaagcttgggagccagtcgagcggtcccgccgaatcctcaataagagcactcggtgggcgctccctggtaatttgtgaagtccatgtcgtttatgatgtaaagcactgtaaagcggttgtaaattaattgcgtgagcagcatctgtaagttgacatcaacttggttggttgtgtgtgtgtagattatagagaaagaggtgtcaatgtaacgttaattcctgagcctgtctgcgatcttgcccgtctggtactgctaa

SEQ ID NO: 207156 - DNA, 448 bp, Zea Mays
gcaagatattgatttgagggaaaaagatggtgttcctgatctacgcctcggggctaggtctaaatatgcaagtgtagcttcgcctgagatcaaagatccagtaaagagtatgctcaaagatgaaagagagtttgatgatgctttactggcagttgtcatccgaaacttgaaattggtgaagggcgattcaaaagtcatagttatggattctaatggagctcgatcaaaagccattgctaggttactgaagaagctcggtgtgcagcgaccttaccttgttaaaggtggtttccaagcatggtcaaagaaccttcgtgtcaaagaactgaaacctgagactgcattaacgtcaataaatgaggatgttgaggaaatcctagaacaaataaagcccaccccaactcttgtgtttggatctcttctgtgttgtccctcttttttgtaacag

SEQ ID NO: 207157 - DNA, 1386 bp, Zea Mays
gcaagatattgatttgagggaaaaagatggtgttcctgatctacgcctcggggctaggtctaaatatgcaagtgtagcttcgcctgagatcaaagatccagtaaagagtatgctcaaagatgaaagagagtttgatgatgctttactggcagttgtcatccgaaacttgaaattggtgaagggcgattcaaaagtcatagttatggattctaatggagctcgatcaaaagccattgctaggttactgaagaagctcgcgaccttaccttgttaaaggtggtttccaagcatggtcaaagaaccttcgtgtcaaagaactgaaacctgagactgcattaacgtcaataaatgaggatgttgaggaaatcctagaacaaataaagcccaccccaactcttgtgtttggatctcttctgggcctctcagcactttcctatgctttactggaatgggagatgactttgcaatacatagctgttttaagcgttgggctgactatctacttgcgattctctacatatgaggactccgaggatttggagaaagacctaaagctgttgctgtctccagtaagagtaggcgcagacgccttgtcatgggcagctaagaagatagagccaaacaaggtgggcctgccaacgtctccttccacgacggcggtgaaagaccgggttcttcaggccgcggcgaagcacgagtcgcagccatcggatgccgacgagtcgtcggtccaaacagccgaggcatgacacgcgccgaaagcttgggagccagtcgagcggtcccgccgaatcctcaataagagcactcggtgggcgctccctggtaatttgtgaagtccatgtcgtttatgatgtaaagcactgtaaagcggttgtaaattaattgcgtgagcagcatctgtaagttgacatcaacttggttggttgtgtgtgtgtagattatagagaaagaggtgtcaatgtaacgttaattcctgagcctgtctgcgatcttgcccgtctggtactgctactctgcttgcttgcttgtttggcacgcgatcaaggtgaattaagtaaaaatggtccgtggtccaagtccagccccacaacttggctgtcaggcgtagtgtaacctttgttggtacggaaatgaaatcctggagtacggctgtttttaaccaccatagtgcctgccgaaatgctgctcggtagtaaacgggtacagaatttaatcccgcatcatttggaagctccaccccaatagccacagcccacaggccccagaagacgaaaggaaacgatgcgctcgctgctcgcataggatcaaagggacgggaatcccaatgtcttgttttcaaaattttatcgtattttcttaaaaacagtataaaaaacatagaaa

SEQ ID NO: 207158 - DNA, 1304 bp, Zea Mays
tattgatttgagggaaaaagatggtgttcctgatctacgcctcggggctaggtctaaatatgcaagtgtagcttcgcctgagatcaaagatccagtaaagagtatgctcaaagatgaaagagagtttgatgatgctttactggcagttgtcatccgaaacttgaaattggtgaagcgaccttaccttgttaaaggtggtttccaagcatggtcaaagaaccttcgtgtcaaagaactgaaacctgagactgcattaacgtcaataaatgaggatgttgaggaaatcctagaacaaataaagcccaccccaactcttgtgtttggatctcttctgggcctctcagcactttcctatgctttactggaatgggagatgactttgcaatacatagctgttttaagcgttgggctgactatctacttgcgattctctacatatgaggactccgaggatttggagaaagacctaaagctgttgctgtctccagtaagagtaggcgcagacgccttgtcatgggcagctaagaagatagagccaaacaaggtgggcctgccaacgtctccttccacgacggcggtgaaagaccgggttcttcaggccgcggcgaagcacgagtcgcagccatcggatgccgacgagtcgtcggtccaaacagccgaggcatgacacgcgccgaaagcttgggagccagtcgagcggtcccgccgaatcctcaataagagcactcggtgggcgctccctggtaatttgtgaagtccatgtcgtttatgatgtaaagcactgtaaagcggttgtaaattaattgcgtgagcagcatctgtaagttgacatcaacttggttggttgtgtgtgtgtagattatagagaaagaggtgtcaatgtaacgttaattcctgagcctgtctgcgatcttgcccgtctggtactgctactctgcttgcttgcttgtttggcacgcgatcaaggtgaattaagtaaaaatggtccgtggtccaagtccagccccacaacttggctgtcaggcgtagtgtaacctttgttggtacggaaatgaaatcctggagtacggctgtttttaaccaccatagtgcctgccgaaatgctgctcggtagtaaacgggtacagaatttaatcccgcatcatttggaagctccaccccaatagccacagcccacaggccccagaagacgaaaggaaacgatgcgctcgctgctcgcataggatcaaagggacgggaatcccaatgtcttgttttcaaaattttatcgtattttcttaaaaacagtataaaaaacatagaaa

SEQ ID NO: 207159 - DNA, 642 bp, Zea Mays
cccacacccacgtgagcagaggatatttccgccgccaggagagaaggtgatggccatcaccttggtgcttcacctgcgacgccacatggtgctgacccacgcccccaccattgcatagcctagtagtgtggttctggagaatcttcagtgtgcacggatcctgtgttcagtcagatgagccccatagccaagatcaccgtcgttgtggagcgtgggacgcgatgatgggttactgcggcatcgggcttattgggtggtcctggaaagtcaccataccactccgcacctcttcatggcctccccgtgcgaagctatcgaccaaagcgccaccagtttcacgccggagttggtgctccaccgtgatgcctccttgctccgcggactggctactccacaacacattcgcaggttatgagtcatctgaagatcatcctggtatctggaatctcaagtcccaggtaagttgtgcccttgaccactttttacccaataatgttctttaatatcatttattcatgcctaggttaattttgatgggacccaataggttaccctagattgtttatctcattaccttctttacccctgaatcacttgggtagtttgctattgctttacatggatttgggataattatttatc

SEQ ID NO: 207160 - DNA, 481 bp, Zea Mays
cccacacccacgtgagcagaggatatttccgccgccaggagagaaggtgatggccatcaccttggtgcttcacctgcgacgccacatggtgctgacccacgcccccaccattgcatagcctagtagtgtggttctggagaatcttcagtgtgcacggatcctgtgttcagtcagatgagccccatagccaagatcaccgtcgttgtggagcgtgggacgcgatgatgggttactgcggcatcgggcttattgggtggtcctggaaagtcaccataccactccgcacctcttcatggcctccccgtgcgaagctatcgaccaaagcgccaccagtttcacgccggagttggtgctccaccgtgatgcctccttgctccgcggactggctactccacaacacattcgcaggtcaagaacaggtaccacaggatgaggcgcttggaggatgatgtgatgtgttcgtaagaggtctaggtcgtcg

SEQ ID NO: 207161 - DNA, 1597 bp, Zea Mays
cccacacccacgtgagcagaggatatttccgccgccaggagagaaggtgatggccatcaccttggtgcttcacctgcgacgccacatgtcagatgagccccatagccaagatcaccgtcgttgtggagcgtgggacgcgatgatgggttactgcggcatcgggcttattgggtggtcctggaaagtcaccataccactccgcacctcttcatggcctccccgtgcgaagctatcgaccaaagcgccaccagtttcacgccggagttggtgctccaccgtgatgcctccttgctccgcggactggctactccacaacacattcgcaggttcctggaatcacagtcccgaggtgagaggttgtgtcaaatttttccttgtagcccgcagaaccttggtgtttcagggagagtatatactactatgcagaggggctcgtcgtcgcagttggactacgtcctggtgccgctggggctggctgtgatggtgggctaccacgtgtggctgctcctccgcatccgcagccggccggagactaccgtgatcggcatcaacgccgtgaaccgccgcatctgggtgcgccacatcatggaggacccgtccggcaagcacgcagtgctggcggtgcagacgctgcgcaacaccatcatggcgtccaccgtgctggcctccgtggccatcacgctcagctcgctcgtcgccgcgctcatggccagcggcgccgccgcccacgggggcctcctcctctccgcccccggcggcggcagcgaggccgcgctggccgccaagttcctcgcggtgctcgtgtgcttcctggtggcgttcctcctcaacgtgcagtccatccggtactacagccacacggggctgctcgtcaacgtgccgctcgccgcgcaccgccgccccgcgcgcgccgtcggctacgtcaccgcagcgctcaaccggggcttctacttctggtcgctcggcgtccgcgcatactacttctcctgccccgtcttcctctggctcttcgggcccgtccccatgtgcgcctcctgcgtcgccatggtcgccgcgctctacttcctcgacgtcaacaaggagtgggaggacaaggacgacgacggcagcgaggatgaagcggacggcgatggaagaagcacggccaccgtgtgcggcggcgtctgaattcaagccgtgtcagtgtgtcacgcgagggcatatgaatcccgccaattagaaaaaaaaaatctcgcaaagaaggaagacttaacaagcaaccggatccaatgatcgttgaatccagcttacaaatcactctaccgtactgcactagtatacgtagaaattaataaatttgtctccttggtgttaatttggatccaggactttcttgagcctcgtgccactatagtatccgatgtcgctgatgtgaagtcaacttcagtgtcgtgtcgtgttgttttacgtttttgtttgtgtctcaataacaggtatcaaccatcagggtctgatggaagtatgagttcatatcaaaactcataaggtttcttttggtgtagctctagccctgctctgaccggtgaaatccatttcttggttgaataaagcacacttg

SEQ ID NO: 207162 - DNA, 1674 bp, Zea Mays
attgcaaaaaaaaaaaaaagttggtccgctcccaccctccgtccgaccgtcctcgacctcccgtcccgccgcctcccacagtcgcaaccctagtcccacccgccgtcctcccgccctcccgcttcccattttcagtcgccgagccgcgtacagcgcacgcactgcacgcgcatcggcacttccagcgacgcgtcgtgagctcctcccttcgacccttcctgtggcgcgtcgtaagctctgtgcaggcgacggcggcgcgctaccagtgacggggggatacggcggcatcgtccccctcggcccctcctccatcccggtgcggcggcgccagcctacaggagtaccaccaagcgagcgcgatggtgagctccgcactgaggcgctgtctcccctgccatgcctctctctgtcatgccttccctccccatccgctgctggccgctgccggcgtcttccgtcgttcattccagtccggggatggtgagactatggacgaattcgaagaacggttgtttgggggcaaggacacagacaaaggatcactctacgagaagctcgatagggctgagaacactggtaggagatacaatatgggctctgggatgggtggtttgactgggttaagtgacaagagcagatctgggttgtccaagggtggtttcacttggttaagtgacagtagcagctctggtttccctgggtttcctgcatctggcgacaggagcaattcaggatggatggatggttatgattcttttaatgatggcttaaatgatacgattgctaatgcggcacgcaacatccaaatggaggaggacgaggacgtcgacggtgactgggaagatgactttgagttcaggcctgatgtgcggtttaggcaaggttcaacgtattctgttcgggaccttgaccttagaaaacctgcagccgcaaagaaccctcctagacgacagtttgaaacaactacagcggaggtactgaagaaggctgattttaggaatgttagattcctctccaactttcttacggaagctggaattatcatcaagagaagccagacccgtataagtgcaaaagctcagcgtaagattgcaagagagatcaaaaccgcacgtgcgtttgggttaatgccttttacaacaatgggtagaagaccattcatttttggcagaagtgcggaggagcattattgggatgatggatatttcggctatgtgaagcagaaggatggtgagcctgttgagaatgaggatgctgagccaaatgtggaggctgtgtaaacattctgaagcatccttttgcaagcgctccgttcagtttcttctggtgccttcatgacacaagtcacacaatgcttgttttgcgtcttcagatcatagcgtagctcagcttgaataaaactgtaacatcacgcaagttttgtgaaactcgtgccttgctcaattgtgccactttagcagacatccccagctcacctcatcctggctggagatcatatgcagatatgaaatggaacgtgggatcagagttttagttgacgctcaaaattttgagatagcagcactgatttcagtttctgttggataatgattgtttggctgttcaacgagaaaaatattgtatgcacgtacaaaacgttagattttttaacaacgaaaatattttcttcaaatt

SEQ ID NO: 207163 - DNA, 1398 bp, Zea Mays
gtacgctcctctcccttcgctcgtttcttccccaaccttctctgtcgccgcatcctaccctctcgtcgtcgtcccctggtctccacgatggccatgtgatttgctttttctggaatagatctggtctccatgcgcataaactcgcggccagatctggtctccatggccgccgagtagtccttgccgagcagccagatctacacagctggcttgtgattttcttttttgtccttttgtgatttgagaacagcacaagtccattctttctacaattagcatatttcttgttcctttttcttggcgtggacacctatgctctgttcaattcttggcccacaccatcttgcatactagctaattcttttgtttttttacaggtcatccggttgcaagtattcagggcacaaagactttagagcttaagtcggtatttcaacaaagtacttcatgctgttggggagttacgacatgacttcattaagccaccatcatcagcaacaccgaccaaaatcactggaaacccacggtgggatccttactttaatgattgcatcggggccattgacggcacacatgttcgtgcctctgttcctaaggaaatggaggctgcattccgtggtagaaagagtcaccctactcaaaatgtaatggcagcagtagattttgatctaaggttcacttttgtaatggccggatgggagggtacaacccatgatgccctcattttaagagatgctttagaatgagaaaatggtcttcgtgtccctgaaggcaaattctacctagttgatgcgggatatggagccaaaccaggttttttaccccctttttgtggtgtgaggtaccacttgaatgagtgggggcaataatccagttcaaaatgagaaggaattgttcaaccataggcactcatccctcagagttacagtagagcgtgcctttggatctttgaagaggcgattcaaaattttagatgatgctataccatttttccccttcccaacacaagtagagattgttgttgcttcatgcattatacataattgggtcatagaagatgggggtgatgagttcattgtacctgaggccgaagatgagctacctagtattaatcatcaaagatcatcacatggacaagcaatggaacatgcctttatggttaactttagacaacaaattgctaatgccatgtgggaagatcgtcagcaataccaaaatactacatgaatgctatgttatctgctatcactatgtatctttgctttatatgaagctttgagcttatgatttgtatgaaacaatgtatctttgatttatgtggaactatgtacctttcatttgtatgaaacaatgtatcttagatttatgtggaactatgtaacttctatgttgttttgg

SEQ ID NO: 207164 - DNA, 4697 bp, Zea Mays
atcaccgaaacgaaaaaattcttgaaaccgccgaccgcgggaaacattttgcgcgccgcgcccagctcccttcacaaataatcccttcccggttcacctcttcctctcccccaaatctccaaatctccggtcgtctccagttcccacctcgcgccccaaatccgtatccaccgccaccgccaccgcccaccaccccgccgccaacgctgacgccgcctcctccggctgcacccgtcacgccaggtgcttggacttcgggaatctgcaggttcagtagagtagacaagtgtttgagcaaggactggatagaggaatgcgctgcttgttcctagagtagcacccgcaagatccaagtcttcccgcgatggaaagcggcgccatggtactcggtgttgttcgtcccgaggagtcccctgaccgcaacggcggtgggccacgggacgatttgggcccatcgcagatgcaggtcgatggtcccgttgttctcaaccaatccgctgagctcgtctcggatgattcgatggccgtcgatgacgtcccagttcaacaaccatcaggccagccggtggaggcaacacaacagtctcctgcgacgctgattgatactatcatggaggtgcagaagcagctgaagcggaagagggcttctaatagcccagtgattgatgccgccgataaggacgctcttgttgctgggtgccggcaggagctcgaggggctcttccagtattacaaggaggtttctgaccgcaagatgcagcttgacggcgggaacctgtccttcaacgggatggttggctgtttgcttgaggagagcagtctcgggctgactaggttggtggacgaaatatatcaacagctgaagggattggagggtgtgtctgtggcttcagtccgcagctctgtgctgctcgctggccagaggatgatgtacgggaattcttcactggacgctgatgtgttagaagatgaatcggagtcggctctttggtgctgggagataagagatctgcgattgttgcctgtgaaagtacgcagcattctgagtacacggagatctgtcagaaagaaaatccatgagagaatcactgccatatattcgactttgtcggttcttgaaaattcaggagcttacatccaagtaaatgatctaaaaaaagcatcattgaaattaaacaaatcactgaacctggaagggatcagatcaatggtggaaagagcgacacaaaagaacacagaacggggtgtgaaagatgctgtatcagcagttaaggaattgatgcaagagacagataaaaatgaccaaaatgttagaaggcttgaggatactagtgtctctgagccgcagaatgggaactcacttggtaatgagaaagagattcagaaagcacaaaaacaagtggagaaggaaataaagcgccaggagaaagaagaagctcagatgagaaaacttcaaaagaaacagcaagaagaggccctaagagaacagaagagacatgaaaaggaggaggctgaagccaagaagcaacaaaagaagcaggaagatgaagctctgaaagaacagaagagacgtgaaaaggaggaggctgaagctaagaaacaacaaaagaagcaggaagaggaagttctgaaagaacagaagcgtcgtgaaaaggaagaagctgaaatgaagaaacaacagaaaaaacagcaagatgaagctgagaaagaacagaagcgccttgagaaggaagctgcacaactcaagaagcaactggtcattcaaaaacaagcttctatgatggaacgctttttcaaaagtaagaaagacaatggaaaacatcaaaaacctggagagaacaactcagctgaagatccatgcaatgacaacaaagagacaataccagcaaccacatcaaaaattgattcttcattgtatcaacaagagggatgggttttagatgatcttcggaggttgcaggtcactggttggaagaagctatctagctacaataggtcctccagatggggtacaagatgcaagcccaagatggaggcatttaaagagctgaagcttcagaaatcctcagatgatatggttgatgaaatactttccactccaaatgaagatggtggccgcaatccaattcaggagaacgaacatgataagcttgaaagtgatattgacatgatacaggctagtgaaatgcaatgccatggtgctagtaaccctaaacctctgcaaacgagattaattagaatgaagcttctgcaatttgacaaaagtaacaggccagcatattatggatcctggaggaagaaaagtgctgctattagtccaaggtgtccatttaagatggatcctgatcttgactacgaggttgatagtgatgatgaatgggaagaggaggatcctggtgagagtctttctgactgtgagaaggataatgatgaatttatggaggaagattccaaaattacagatgaagaggatgaagatagctttgttgtgcctgatggctatctctcagacaacgaggggatacaaattgaaagcctattggacgataaagaagaggaggccaatagctccccaaatggtcagtgtacagaagttgaagagttcaggtctctgctccgccaacaaagagtcctgaacactttgactgagcaagctctccggaagagccaacctcttattatatgcaacctaaatcacgaaaaagctgaattactgactgctgaagacctcaagggaacggaaaagattgagcagctatgcttgcaagttctttcaatgcgcatctgtccaggaggtgcaattgttgatgtgcctctaactgacagctcatctgcaactgttgaggaaattaaccaacccaatgtgaagaatggctctcctgaggctgcatctgctataccagaaacagacctgccagaatttgtacaggtgataagatcatgtcgagatggtatccacaaggtggtggaattactgcagcacaagtttccaaatgttccaaagactcaactgaatcgtaaagtgagggagatatctgacttcattgacaatcattggaaggtaaagaaagagattcttgacaagctagggttggattcgtcaccagtgaaacccaagaagaataaaagcatagctatgtacttctcgaagagatgtttacctccggaagaggctgtcaatgctctggctgcttctcctgagttgcggttgaaatctagaaatggtggccgcgaagctccccagatcaatctgttcccctcagagcagtaaagtttctaataaaggtcccctgaaagttggattaggggtcaatgaagctacgaacccagatgagcagaaagctcagctatccatgtaaaggctaggaagtgcaactcggttttgcatcgtcaccaatggaagatggtcttagtgcaacatgggtttttgtcaacatctggattatgttttcagtgctggacatgtaattttagcctgaaagtaggtttttattcaattatttggccttgatgtgattaacatgtatgtgtcctgttgttagcgcaaggaattgctacaaagttggccatctgccgcttgtgtgttgttaacattattctgattctggcaaggcaaataagcaaacatgtcttgtgactgctcaattgacagctttgggcagaaattaatttttgcaacctgtttgcatcaaatctgatgaatgcacatgttaatagtagcaaaggtaacaaaagcaataatatatatttgctttggtatttatttattttggttgaacagtcataacagtacaccgtagtacaaaagaatgacagcaatagtacaataatagaatagacatcaaagaatctcattttgaaggagcccaggccagcagtggatgggatcagacatggtacgattgccagttcttggcctggaggtcgtcgtcgtcgtcatcctcgtcgaggcggagggagaaggcaagcgcgagcgcggcccactcgaggacgaagatggcggtgccgagccctccgaccatcttgaggatgacggcgccgtcctcgtcgcggacgtaggactggagctcggcgaggaagtcggaggtgcgggtgaacgcgagcagcgcgatggcgccctggaagatggcggtgagcgcggctcccgcggtgtgcgcgttgtgccactgcgcgggcgtggcgggcgccgtgaaggagcccgagcagccggccgcggagaagacggcggtgagggcgtggaggaagagcaggagcaggccgcacggggacggcagcaggcgcagcgacagcgtgaggaagatgcagctggaggaggcgcccaggaggacgtagttgcagaggaggaacgccttgcgtgtgtgcgacttggccgccatcgtcgccgccgccgtactcgctcggaagctgttgggttgggtcttggaagcctgccgaggaagcgggatgccgctggcttgcggggctttgcgggcgaggggtcgaggtcgagagagggaggtttggagtggggtgggagcggcggagtggcgggtacttatgcggggtggcgcggaggatttggccgttgaggctgggggcgcggcggtggcgcggcggtggtgaggactgaggagtgaccgagtgagtccgacagggcaacgggcaacggctagtctggtggtggggctcgtgggggcccgcccgctcgctcgcatgag

SEQ ID NO: 207165 - DNA, 2974 bp, Zea Mays
gtcggcacccgactcctaagctagaatcgcactccactccactccactctccagtcctcactcccacacccgtacgcttcgcggcgcgtcacttttgccagccatacgccagcctgagcgcccgacgtcgcgggattcgccgggaacgcccacaccaccggccgcagccgaccaggcagacgagtagggtggtggtggtggtagcggtagcgcgggggcggggcggcgctgcgtgaccgacgccacgggagatgaaggccaaggccctccctttcatcgccttcgagcacaagcgagacgcctatggcttcgccgtgcggccacaacacctgcagcggtacagagagtatgcgaacatctataaggaggaggaagaggagaggtccgacagatggaagaattttctggatcggcaggctgaggatggagaatcatctggagaggatgccaaggttgcgccatccaacgaggaagatggagttgctgccaaggatggcaggacagagccaagaccacataaaatccaaatatggtctgaaatcaggccctctttgggccatattaaggagatgatgaactcacgcgtgaaaaagcaatcttcttctgttaatgacgggtacacgagggatgaaccacaccctggtaattctgaagggagcaagccatcggaggattcagatgatgagttctatgatgtagagaaggttgatcctagccaagaagtgcctgcaactgacatagccaatgctgagtcaggtacaaatagaggtgcagaacaagaacattatccttggaaagaagaattagaatgcttagtccgtgatgggcttccaatggccctgagaggagagctgtggcaagcttttattggtattggagctcgtcgggtcgaagggtactatgagggcctccttgcagcggacagtgaaagtcaagacaacaaatatccgggatctccaacttcggaatgtggtgacggaaaaccaaaaccatctcaaacattttcttctgaaaaatggaaagggcaaatagagaaggatttgcctagaacatttccaggacaccctgcactagatgaggatggcagaaatgccttaaggcgcttgctcacagcttatgctcgacacaatccaccagttggttactgccaggcaatgaacttctttgctggcttgctacttctgctgatgccagaagagaatgcattttgggcattgacaggcattatggatgactattttgatggttacttctctgaagaaatgatcgaatctcaggtggatcagcttgttttagaggagttagtccgagggagattcccaaagttagtaaatcatcttgattaccttggtgtacaagttgcatgggtcactggtccatggttcctatctatttttatgaacatgcttccctgggaaagtgtgcttcgtgtgtgggatgttcttctctttgagggaaaccgtgtgatgctgttccggacagctcttgcactgatggagttgtatggtcctgcacttgtgacaacaaaagatgctggggatgcagtaacccttttgcagtctttagctggttccacttttgacagtagccagcttgttttaacagcttgcatgggatatcaagctgtaggtgaagcaagactgcaagaattgagaaataaacaccgaccatctgttatctcctcaatggaacagagagcaaaaggtcttcgtgtctggagggatacgaacaggcttgcatctaggctatataattttaagcgtgacactgaaccattggtgtcgttatcagaagaacagtcaaatgacttgacagatggcgataagaaccaagaagccaattgtagtaatgtggatgatatgtatcatggcctcactgtcaactctgagattgattctctgcctgatcctaaagaccaggtagtctggctgaagggtgagctgtgccaactgctagaggagagaagatccgctgttctgagggctgatgaattagagacagcacttatggagatggttaagcaagataacagacgcgaattaagtgcaaaggtcgagcaattggaacaagagttatctgagcttaggcaagctctatcagacaagcaggaacaggaacaagcaatgcttcaggttctgatgcgtgtagagcaagaacagaaagtcacagaggacgcccgtatctttgcagagcaagatgctgctgctcagaaatatgctgcacatatacttcaggagaagtacgagggagctatggcttcacttgctcaaatggagaacagagcagttatggcagaaactatgttagaggcaaccattcagtaccaatctagtcagcagaaagcacagcttccatcgccctctccttctccaaggaccccaactcgagatgcatcaccaggccaagggaaccaagattcatcgcaggagttccagcctagaagaataagcttgcttgccccattttcttccctcggatggcgagacaagaacaagggcaagcagaacggctctgatgagtcaacaaacggtaagctcaataatagcaccgatcaaggggttgaaacacccaaaaaggacgacgaaaagaaggccgactcgccaaaagagagtgaacagattgtccgaacaccggaaagagacaatgaactgagactagggacacccaagatggatagtgaggtaccaagtgtggaaatggcggcaaacagtacgaatgggctggaggaccagttggaggagataaaattggattgatatcctttggctggtcgctaagccgcaacataaggtctgttgatcgcctgtaagctatcataagtacacatgaaaaagacgtaccaaatagaagattaccacgaaagcaatttttggaacagatcgcgccctaccgttgtcctggtgactttgtggttgtttgtatcgctaaattatcttgttggccagtggccactgcgtcgccaagggcctttttg

SEQ ID NO: 207166 - DNA, 3044 bp, Zea Mays
atcgcactccactccactccactctccagtcctcactcccacacccgtacgcttcgcggcgcgtcacttttgccagccatacgccagcctgagcgcccgacgtcgcgggattcgccgggaacgcccacaccaccggccgcagccgaccaggcagacgagtagggtggtggtggtggtagcggtagcgcgggggcggggcggcgctgcgtgaccgacgccacgggagatgaaggccaaggccctccctttcatcgccttcgagcacaagcgagacgcctatggcttcgccgtgcggccacaacacctgcagcggtacagagagtatgcgaacatctataaggaggaggaagaggagaggtccgacagatggaagaattttctggatcggcaggctgaggatggagaatcatctggagaggatgccaaggttgcgccatccaacgaggaagatggagttgctgccaaggatggcaggacagagccaagaccacataaaatccaaatatggtctgaaatcaggccctctttgggccatattaaggagatgatgaactcacgcgtgaaaaagcaatcttcttctgttaatgacgggtacacgagggatgaaccacaccctggtaattctgaagggagcaagccatcggaggattcagatgatgagttctatgatgtagagaaggttgatcctagccaagaagtgcctgcaactgacatagccaatgctgagtcaggtacaaatagaggtgcagaacaagaacattatccttggaaagaagaattagaatgcttagtccgtgatgggcttccaatggccctgagaggagagctgtggcaagcttttattggtattggagctcgtcgggtcgaagggtactatgagggcctccttgcagcggacagtgaaagtcaagacaacaaatatccgggatctccaacttcggaatgtggtgacggaaaaccaaaaccatctcaaacattttcttctgaaaaatggaaagggcaaatagagaagaacatttccaggacaccctgcactagatgaggatggcagaaatgccttaaggcgcttgctcacagcttatgctcgacacaatccaccagttggttactgccaggcaatgaacttctttgctggcttgctacttctgctgatgccagaagagaatgcattttgggcattgacaggcattatggatgactattttgatggttacttctctgaagaaatgatcgaatctcaggtggatcagcttgttttagaggagttagtccgagggagattcccaaagttagtaaatcatcttgattaccttggtgtacaagttgcatgggtcactggtccatggttcctatctatttttatgaacatgcttccctgggaaagtgtgcttcgtgtgtgggatgttcttctctttgagggaaaccgtgtgatgctgttccggacagctcttgcactgatggagttgtatggtcctgcacttgtgacaacaaaagatgctggggatgcagtaacccttttgcagtctttagctggttccacttttgacagtagccagcttgttttaacagcttgcatgggatatcaagctgtaggtgaagcaagactgcaagaattgagaaataaacaccgaccatctgttatctcctcaatggaacagagagcaaaaggtcttcgtgtctggagggatacgaacaggcttgcatctaggctatataattttaagcgtgacactgaaccattggtgtcgttatcagaagaacagtcaaatgacttgacagatggcgataagaaccaagaagccaattgtagtaatgtggatgatatgtatcatggcctcactgtcaactctgagattgattctctgcctgatcctaaagaccaggtagtctggctgaagggtgagctgtgccaactgctagaggagagaagatccgctgttctgagggctgatgaattagagacagcacttatggagatggttaagcaagataacagacgcgaattaagtgcaaaggtcgagcaattggaacaagagttatctgagcttaggcaagctctatcagacaagcaggaacaggaacaagcaatgcttcaggttctgatgcgtgtagagcaagaacagaaagtcacagaggacgcccgtatctttgcagagcaagatgctgctgctcagaaatatgctgcacatatacttcaggagaagtacgagggagctatggcttcacttgctcaaatggagaacagagcagttatggcagaaactatgttagaggcaaccattcagtaccaatctagtcagcagaaagcacagcttccatcgccctctccttctccaaggaccccaactcgagatgcatcaccaggccaagggaaccaagattcatcgcaggagttccagcctagaagaataagcttgcttgccccattttcttccctcggatggcgagacaagaacaagaacggctctgatgagtcaacaaacggtaagctcaataatagcaccgatcaaggggttgaaacacccaaaaaggacgacgaaaagaaggccgactcgccaaaagagagtgaacagattgtccgaacaccggaaagagacaatgaactgagactagggacacccaagatggatagtgaggtaccaagtgtggaaatggcggcaaacagtacgaatgggctggaggaccagttggaggagataaaattggattgatatcctttggctggtcgctaagccgcaacataaggtgccattaaattatgtattggtgtatccatcttccacctctattcttttaggtttatagattcttgtataacttgaggagagagaatgaataaactatgtttgccctcttataggtctgttgatcgcctgtaagctatcataagtacacatgaaaaagacgtaccaaatagaagattaccacgaaagcaatttttggaacagatcgcgccctaccgttgtcctggtgactttgtggttgtttgtatcgctaaattatcttgttggccagtggccactgcgtcgccaagggcctttttg

SEQ ID NO: 207167 - DNA, 2777 bp, Zea Mays
tttcgttgaagccgcatccgtcgcgtttcataatgtcaaatctctcgcgagcgaggcagacccacgggccgcggccatctcacggtggaagcagccaagcagccggcctggcgcccctccccttccgtcccgccgctgctgccgtgcctcgtgcctgccagcggcggatgccgccccgccccgctgctgaccaccgccgctgctgagcatggccgccgctcccgcgggcgctcagaaccgctgcgtcttcgttggcaacataccatatgatgcgacggaggagcagctcgtgcagatttgcgaagaagtcggcccagtcgtatccttcaggtgtgcttttgctcacccgcatgagcactcatctaaagtcgtccatttactccacatcttatgcaacaatacttgaattttaaatatgcatacctcatgggttggtagaaattatcgcttactgtcaaaatgtctgttttgcccttttttcctgtttatttaaaaacaaggaatatgttcaggttttggcattacgcctacaaatgtaaaaaaaaccatgattggattctgcctatgggaatatatttactgaaattgattctggtttggtaacactgattaacatgtttactactactgttaagtttttcagcatttgaatttgattttggtaactgactgctacaaattgcttgtagattggtgattgacaaagagaccggcaagccaaaaggttatggcttttgcgagtacaaggatgaggaaactgctttaagtgcacgccggaaccttcagggttacgagattaatggtcgtcagttacgtgttgattttgctgaaagtgggaggaacactgatagaaatagagaaaagggtcgtggaggaccagggatggcatctaatgttggttggttttttttgttcaccatttagtttatgtatattctttcaatttctatgcgtattttatgtttatggatgctatcactggttttttgatggagtggcacagatagtcaaaaacggttagctgggacttctgttgttggagagacaaactttcatcagcctgttggtctcccaccggcaatacatgctgcatctgtgatggctggtgtccttggtggagctcagactgcaaatgttcaaaacggtttacctgtccagtatggacttggaaacgaccctcttactcattatttggccagaatgtcaaggcatcagttgcacgaagtcatggctgaattgaagttcctaactactcaaaacaaagaacattccaaaactttgctgcaaggaattccacagctgccaaaggccttatttcaggcacaaataatgcttgggatggtgacaccacagatgatgcagatggcaaagagccaacagccgttgggctccttagcacaatcttcatctcacctcaatgagccatatccacagccagagccagatgctatggttccagtagtctcaagaccatcaagtttgccaactaacgtactaccaaacccagttatcctacaggaacaaacagctgcaatacatagttttcctcagcatcaacatgcatctcagccccaagtcaaaatgtttccacatggacaaccgtctgggatcaccgcacaatctccaatgctacatcagccccttggtggttcttccagtgttcctattcaatctcttgtgacctcagtaggcttaacctcacaggttcagcctccatttgtgccagagcaccctggaccacctgtcatgcctacaagtgtacaacagctacctttgacccaccctcatcttgctctggtagccgccgcacctgagactctaccaaatgaaataagggttgctgatcaagcaagtcatttgacagagtttactcatccttcaaaattgagaaaattggaggatggaacctcggtgcctggaatggtgaacagcagccatgctatttatacagctccactgcaagcagtgggccctagtggaccatcagggagctatagtgctggtgctggtagcttacaacaaccagggaatgaagggcagattacgcctgatgtggagtcagctcttctgcagcaagtcttgcagctgacacccgagcagctgagttcgttgccaccagagcaacagcagcaggtgattgaactccagaagatgctttcagctggtaaatagaagcaaccgagctagtgcagcaatattgccggtcgaggatctggcacgtcacataatggcgagttggcaactagtggaagctggaagtgatcctcagatttgttatcaagtcactaggccgcttcataacctgtcagcattttcttgtgggcatcttgatgccatcagttttgctcagaagtatccatatggctttctttcttcagatcagagataaaagaaatgttacaggagatggtagtttaaagaaagggatacacattatccatcactgctgtatcattatagggagaaaataacaataatctgtatccaaaggagctgtttttttttctgcttctccaaaatgggatatagcatcagatttttgtcctttccatttcgtgcaacagttgcaggtaggaaatgaattttgcgtaagcttgttatgttatcgagtagcatcctttatatttattctttatatcccttctttttctttatatcccttctttaccatttcttctaatgctccgtttggatatcggtattggaggacatgaagttgaattgatttcaataccaaatcagctatgatattaaaatgagatgcaatttcaattcta

SEQ ID NO: 207168 - DNA, 545 bp, Zea Mays
taatgtacatattgcctaggagggcaggcacaagatttcagacagcagggaacaaatgtcaggagaaagatgtggttacagaacatgaaaatcaagctcatcgtcctgggaataatcatcgcactcattctgatcattatcctctctgtctgtcatggtttcaaatgccattaagcacagaccagaatactgatacattcaactgcacctattatactgctgcttggagcaaaaaaaagtatgatcttttgttgtttcgctagtgtgctgtggcccggtcattatgcataggtgttttacattgtcgtagtgtttgataaatgatggatggtgactgggtttgttgtgtcaactgtcataactattgtgcatttttggacgctatatgtgtagccttgatatgaatagatttactgtacttataagggctggtgtgactcagccgtttgctcctttgggcaatgtgcgcatttgggagcatcttgcatttacctcgtttacctcagaaatgcagcttggaaaatatgagcacggaatcgattttc

SEQ ID NO: 207169 - DNA, 1840 bp, Zea Mays
ctgggccacctcgcagtgaaatacgcctcacaagccacgccagcgacgcgaagagggcagcagcaagcagccgttcccccaaaaaaggccagagctcagcagagccccgcaggccgcacccaccagaaaccccagtcgatcggcggcggcgatgtcgctgtcctcggtgaagatcggcgaggaggtttggctcacatgcctctcccacgccctcactaccgagaccgaggaggtcatgggcctcctcctcggcgacatcgagctttccagcaagggcgccaccgcccttatatggggagcgtctccgcagatgaggtgcgagcggaagaaggaccgcgtcgaggtcaacccggagcttctcgccgccgcatccgcgcaagccgagaaaatgacggccaccatcaagaagactacgagggtgatcggatggtaccactcgcacccacatatcactgttctgccgtcccatgtagatgttcgtacccaagcgatgtttcagttgctggatacaggctttgtgggccttatattttcttgttttagtgaagatgctcaaaaggttggaaaaatccaagtgactgcctttcagtcagagggtggacaacagcatgcccttcctcttgccattgctccagttattgaccttgattcatcccttagttcatcagataatgcactcacttcacattctgcattggttgaaggcatggaacaggacacaggggattccagggcctcaaagcataacaaggcctggaaaagatctttggatttctactctcatcctgacacaaatcattccacgaattatcaacccaatgaaaacactctcgctctgtacaatcctgataacacacaagaagcgcctgttgatccatacgattcagatatgactcaaagcctccaggaggctttgcaccggtcaactatggacataagtggtgcagagtatagagggaaggaggtgccactttttgtgctcccgacaaggtatctcctcaagctggacaccacgatgacctcgtactgtgatatgcaacgagtcctgtttgaagaggagcaatcagcatataatcaagctatgcaacaaaatatttgtgatgggaaaattcaccctcttacatccattcactgtacgtctacatacaactcctctctatgcaaactaatggagtattgtttgagtccagctgttattacgcttcaggaccgcctgaaggaaaatgaacttcggctatctatgttaaaagaggagtgtaagcaactggaggctgatacccaaggcatgagaaatggttctcctcgtcgcctcatgaatcacggagctggtggcagcggttcacctatggctcagagcaggcatcctttctccagccaagggagccctagaagcccgagcggcggcagccggaggagggcttgatgatgatcttgctccgcctgatgcgttgatgaactgtccgttgtggcttaaccagatgcttcctgaaaacccagatatttgacggacgaagtgcccccagacaacagacactgtaccttattgggggggttccttatcctgttgccggagctgtgccattatcctttccatggttcatggttggcatgagcttttatagcctgtacactgtagactctgtactagaggttttccagaaaggctgaactgccgctgctgggatgtgttgttccgggcatattcaaagatgaaggctttctttgcttttgtaattgaaaaaaaaacccgacttcggtagcaatacattttcttgaaatgctataactctaagctacagccacagtgccacaccttgcctggatagtgccatagctgttt

SEQ ID NO: 207170 - DNA, 1792 bp, Zea Mays
gcgacgcgaagagggcagcagcaagcagccgttcccccaaaaaaggccagagctcagcagagccccgcaggccgcacccaccagaaaccccagtcgatcggcggcggcgatgtcgctgtcctcggtgaagatcggcgaggaggtttggctcacatgcctctcccacgccctcactaccgagaccgaggaggtcatgggcctcctcctcggcgacatcgagctttccagcaagggcgccaccgcccttatatggggagcgtctccgcagatgaggtgcgagcggaagaaggaccgcgtcgaggtcaacccggagcttctcgccgccgcatccgcgcaagccgagaaaatgacggccaccatcaagaagactacgagggtgatcggatggtaccactcgcacccacatatcactgttctgccgtcccatgtagatgttcgtacccaagcgatgtttcagttgctggatacaggctttgtgggccttatattttcttgttttagtgaagatgctcaaaaggttggaaaaatccaagtgactgcctttcagtcagagggtggacaacagcatgcccttcctcttgccattgctccagttattgaccttgattcatcccttagttcatcagataatgcactcacttcacattctgcattggttgaaggcatggaacaggacacaggggattccagggcctcaaagcataacaaggcctggaaaagatctttggatttctactctcatcctgacacaaatcattccacgaattatcaacccaatgaaaacactctcgctctgtacaatcctgataacacacaagaagcgcctgttgatccatacgattcagatatgactcaaagcctccaggaggctttgcaccggtcaactatggacataagtggtgcagagtatagagggaaggaggtgccactttttgtgctcccgacaaggtatctcctcaagctggacaccacgatgacctcgtactgtgatatgcaacgagtcctgtttgaagaggagcaatcagcatataatcaagctatgcaacaaaatatttgtgatgggaaaattcaccctcttacatccattcactgtacgtctacatacaactcctctctatgcaaactaatggagtattgtttgagtccagctgttattacgcttcaggaccgcctgaaggaaaatgaacttcggctatctatgttaaaagaggagtgtaagcaactggaggctgatacccaaggcatgagaaatggttctcctcgtcgcctcatgaatcacggagctggtggcagcggttcacctatggctcagagcaggcatcctttctccagccaagggagccctagaagcccgagcggcggcagccggaggagggcttgatgatgatcttgctccgcctgatgcgttgatgaactgtccgttgtggcttaaccagatgcttcctgaaaacccagatatttgacggacgaagtgcccccagacaacagacacttattgggggggttccttatcctgttgccggagctgtgccattatcctttccatggttcatggttggcatgagcttttatagcctgtacactgtagactctgtactagaggttttccagaaaggctgaactgccgctgctgggatgtgttgttccgggcatattcaaagatgaaggctttctttgcttttgtaattgaaaaaaaaacccgacttcggtagcaatacattttcttgaaatgctataactctaagctacagccacagtgccacaccttgcctggatagtgccatagctgttt

SEQ ID NO: 207171 - DNA, 1316 bp, Zea Mays
cagggctccatgaataccattaatctactcgtgatttattaaggcttcgtacactgtgcgccatttgactcttctcttaggcactaaagcaaagattttcggagccagatcctctaaacgccgaccgtgcagccacctctctttccaaaacaaggcctggaaaagatctttggatttctactctcatcctgacacaaatcattccacgaattatcaacccaatgaaaacactctcgctctgtacaatcctgataacacacaagaagcgcctgttgatccatacgattcagatatgactcaaagcctccaggaggctttgcaccggtcaactatggacataagtggtgcagagtatagagggaaggaggtgccactttttgtgctcccgacaaggtatctcctcaagctggacaccacgatgacctcgtactgtgatatgcaacgagtcctgtttgaagaggagcaatcagcatataatcaagctatgcaacaaaatatttgtgatgggaaaattcaccctcttacatccattcactgtacgtctacatacaactcctctctatgcaaactaatggagtattgtttgagtccagctgttattacgcttcaggaccgcctgaaggaaaatgaacttcggctatctatgttaaaagaggagtgtaagcaactggaggctgatacccaaggcatgagaaatggttctcctcgtcgcctcatgaatcacggagctggtggcagcggttcacctatggctcagagcaggcatcctttctccagccaagggagccctagaagcccgagcggcggcagccggaggagggcttgatgatgatcttgctccgcctgatgcgttgatgaactgtccgttgtggcttaaccagatgcttcctgaaaacccagatatttgacggacgaagtgcccccagacaacagacactgtacctgtacatacccattgccgttcagcgctgtgctattgtggaactccaacggtctcattgtgctttttttttgtagtattgggggggttccttatcctgttgccggagctgtgccattatcctttccatggttcatggttggcatgagcttttatagcctgtacactgtagactctgtactagaggttttccagaaaggctgaactgccgctgctgggatgtgttgttccgggcatattcaaagatgaaggctttctttgcttttgtaattgaaaaaaaaacccgacttcggtagcaatacattttcttgaaatgctataactctaagctacagccacagtgccacaccttgcctggatagtgccatagctgttt

SEQ ID NO: 207172 - DNA, 1001 bp, Zea Mays
tgtaaattggcatcctgaacttgaattttggtggatcaacttgagggtaccgttccaggaagtgtacggggacgtccgctgcaacctgaaggaggcagtccagctggccgggctcacatgggaggggcgcgctcactgcgggctcgacgacgcccgcaacaccgctcgcctcctggcacttctgatgcaccggggcttcaagttctccatcaccaactcactggtgtggcaacctgccgccgctccgcagtcaaccgccgccacctgccacttctccccggaccgctctccggacccagtcgtcgtccagctccagcaccagcagcagcagcacaagccgaaggaggcgctggggtctcccgcgtcgctggtgaacccatcgtacgccacccccgcgggagggaaggacagagccatgtactgctactgcggggtgctgagccggtggagcgtcgtgcgcaagccgggacccatgcaggggcgctacttcttcgggtgcgggaactggaccgccacccggcgcgccatctgcccgtacttcgcatgggcctcgtgaatagcaaagcaagcagagatctgggctggtgctttaaccgagggaggcgcgccatgttgctgcggctggctgctgcgcctcccagttccgtatatattattattgttattattatggtataataactttgctcgcgagacaatggaggttatctaggtagtgtctctaacctgtcgtactgacttctgtcgatagaagagaatggggccagatgctgcttaggtgtgatctatcctatccatccatggataataaagaagtttgtggattgctgttttattaacttgatggaactcctccgtaggtgtggtttgtgcaacttggattttgaaggcttgtgcgtctgtgagtgtttgatcaaatcgaaggtggtgtttgtttgctgaatgaaatggttatggaaggtgcctattattcctgacaagctctgttcagtgagaggttc

SEQ ID NO: 207173 - DNA, 1766 bp, Zea Mays
atttcaataagtttctatcccaaatgttatagaggaaatgcaagttaataatgaggcaccactagggtgcctcaagccaaatatttctcagtataactctccagagcagataggtggtgttgaagggtttcctgagaataatgaaaaaaggaatgatattgttgctgcggaaaaaatctgggaggcgactccaaaccaaggccttagcaggcccatctaccgacaagaattttatgcctggccatatatttattcagattatcaaatcgtgcgtcagccactaccttatggttttgacaaccaattttatcagataaatagggaccacggtttccctattgagaacagggttcaatatcttccattcaagatgctccctcaaggtcacccccatgatgcacagcttcaggaatttcagtattttgtggttattgactttgaagcaacctgtgacaaggtgaacaatccatttccacaagaaatcatcgagtttccatctgtcttggttaacagtgcaactggaaaactcgaagaatgcttccaaacatatgttcggccgacgtatcatcaatttttgactgatttttgcaaggagcttactggcatacaacagattcaggtggacagaggtgtgcctctaggtgaagccttactcatgcacgataaatggctagaggacaagggcatcaagaacacaaactttgctattgtgacctggtctaactgggactgccgtataatgctggagtcggaatgcagatttaagagaatcaggaagcccccttattttaacaggtggatcaacttgagggtaccgttccaggaagtgtacggggacgtccgctgcaacctgaaggaggcagtccagctggccgggctcacatgggaggggcgcgctcactgcgggctcgacgacgcccgcaacaccgctcgcctcctggcacttctgatgcaccggggcttcaagttctccatcaccaactcactggtgtggcaacctgccgccgctccgcagtcaaccgccgccacctgccacttctccccggaccgctctccggacccagtcgtcgtccagctccagcaccagcagcagcagcacaagccgaaggaggcgctggggtctcccgcgtcgctggtgaacccatcgtacgccacccccgcgggagggaaggacagagccatgtactgctactgcggggtgctgagccggtggagcgtcgtgcgcaagccgggacccatgcaggggcgctacttcttcgggtgcgggaactggaccgccacccggcgcgccatctgcccgtacttcgcatgggcctcgtgaatagcaaagcaagcagagatctgggctggtgctttaaccgagggaggcgcgccatgttgctgcggctggctgctgcgcctcccagttccgtatatattattattgttattattatggtataataactttgctcgcgagacaatggaggttatctaggtagtgtctctaacctgtcgtactgacttctgtcgatagaagagaatggggccagatgctgcttaggtgtgatctatcctatccatccatggataataaagaagtttgtggattgctgttttattaacttgatggaactcctccgtaggtgtggtttgtgcaacttggattttgaaggcttgtgcgtctgtgagtgtttgatcaaatcgaaggtggtgtttgtttgctgaatgaaatggttatggaaggtgcctattattcctgacaagctctgttcagtgagaggttc

SEQ ID NO: 207174 - DNA, 1760 bp, Zea Mays
agccaaccctgcatttttgcacagagaggaaatgcaagttaataatgaggcaccactagggtgcctcaagccaaatatttctcagtataactctccagagcagataggtggtgttgaagggtttcctgagaataatgaaaaaaggaatgatattgttgctgcggaaaaaatctgggaggcgactccaaaccaaggccttagcaggcccatctaccgacaagaattttatgcctggccatatatttattcagattatcaaatcgtgcgtcagccactaccttatggttttgacaaccaattttatcagataaatagggaccacggtttccctattgagaacagggttcaatatcttccattcaagatgctccctcaaggtcacccccatgatgcacagcttcaggaatttcagtattttgtggttattgactttgaagcaacctgtgacaaggtgaacaatccatttccacaagaaatcatcgagtttccatctgtcttggttaacagtgcaactggaaaactcgaagaatgcttccaaacatatgttcggccgacgtatcatcaatttttgactgatttttgcaaggagcttactggcatacaacagattcaggtggacagaggtgtgcctctaggtgaagccttactcatgcacgataaatggctagaggacaagggcatcaagaacacaaactttgctattgtgacctggtctaactgggactgccgtataatgctggagtcggaatgcagatttaagagaatcaggaagcccccttattttaacaggtggatcaacttgagggtaccgttccaggaagtgtacggggacgtccgctgcaacctgaaggaggcagtccagctggccgggctcacatgggaggggcgcgctcactgcgggctcgacgacgcccgcaacaccgctcgcctcctggcacttctgatgcaccggggcttcaagttctccatcaccaactcactggtgtggcaacctgccgccgctccgcagtcaaccgccgccacctgccacttctccccggaccgctctccggacccagtcgtcgtccagctccagcaccagcagcagcagcacaagccgaaggaggcgctggggtctcccgcgtcgctggtgaacccatcgtacgccacccccgcgggagggaaggacagagccatgtactgctactgcggggtgctgagccggtggagcgtcgtgcgcaagccgggacccatgcaggggcgctacttcttcgggtgcgggaactggaccgccacccggcgcgccatctgcccgtacttcgcatgggcctcgtgaatagcaaagcaagcagagatctgggctggtgctttaaccgagggaggcgcgccatgttgctgcggctggctgctgcgcctcccagttccgtatatattattattgttattattatggtataataactttgctcgcgagacaatggaggttatctaggtagtgtctctaacctgtcgtactgacttctgtcgatagaagagaatggggccagatgctgcttaggtgtgatctatcctatccatccatggataataaagaagtttgtggattgctgttttattaacttgatggaactcctccgtaggtgtggtttgtgcaacttggattttgaaggcttgtgcgtctgtgagtgtttgatcaaatcgaaggtggtgtttgtttgctgaatgaaatggttatggaaggtgcctattattcctgacaagctctgttcagtgagaggttc

SEQ ID NO: 207175 - DNA, 1810 bp, Zea Mays
tccatccacattttagaggctactaaggacatccagtgctcctaaatgagtggaatctggggaaggaacaaccaagaggaaatgcaagttaataatgaggcaccactagggtgcctcaagccaaatatttctcagtataactctccagagcagataggtggtgttgaagggtttcctgagaataatgaaaaaaggaatgatattgttgctgcggaaaaaatctgggaggcgactccaaaccaaggccttagcaggcccatctaccgacaagaattttatgcctggccatatatttattcagattatcaaatcgtgcgtcagccactaccttatggttttgacaaccaattttatcagataaatagggaccacggtttccctattgagaacagggttcaatatcttccattcaagatgctccctcaaggtcacccccatgatgcacagcttcaggaatttcagtattttgtggttattgactttgaagcaacctgtgacaaggtgaacaatccatttccacaagaaatcatcgagtttccatctgtcttggttaacagtgcaactggaaaactcgaagaatgcttccaaacatatgttcggccgacgtatcatcaatttttgactgatttttgcaaggagcttactggcatacaacagattcaggtggacagaggtgtgcctctaggtgaagccttactcatgcacgataaatggctagaggacaagggcatcaagaacacaaactttgctattgtgacctggtctaactgggactgccgtataatgctggagtcggaatgcagatttaagagaatcaggaagcccccttattttaacaggtggatcaacttgagggtaccgttccaggaagtgtacggggacgtccgctgcaacctgaaggaggcagtccagctggccgggctcacatgggaggggcgcgctcactgcgggctcgacgacgcccgcaacaccgctcgcctcctggcacttctgatgcaccggggcttcaagttctccatcaccaactcactggtgtggcaacctgccgccgctccgcagtcaaccgccgccacctgccacttctccccggaccgctctccggacccagtcgtcgtccagctccagcaccagcagcagcagcacaagccgaaggaggcgctggggtctcccgcgtcgctggtgaacccatcgtacgccacccccgcgggagggaaggacagagccatgtactgctactgcggggtgctgagccggtggagcgtcgtgcgcaagccgggacccatgcaggggcgctacttcttcgggtgcgggaactggaccgccacccggcgcgccatctgcccgtacttcgcatgggcctcgtgaatagcaaagcaagcagagatctgggctggtgctttaaccgagggaggcgcgccatgttgctgcggctggctgctgcgcctcccagttccgtatatattattattgttattattatggtataataactttgctcgcgagacaatggaggttatctaggtagtgtctctaacctgtcgtactgacttctgtcgatagaagagaatggggccagatgctgcttaggtgtgatctatcctatccatccatggataataaagaagtttgtggattgctgttttattaacttgatggaactcctccgtaggtgtggtttgtgcaacttggattttgaaggcttgtgcgtctgtgagtgtttgatcaaatcgaaggtggtgtttgtttgctgaatgaaatggttatggaaggtgcctattattcctgacaagctctgttcagtgagaggttc

SEQ ID NO: 207176 - DNA, 1867 bp, Zea Mays
cgccaccagaagtaagagaaaccacgcgtgtcagccagccattggatcaccaccattcgcgctgttcggcgtgcgcacccgatcccgtctccgtgcggctttgtgagtagagaagggaaggggaagcaggagcaggaggggttcgtcatcgcgtggtggccgcgccgctctgttcctccgtcccctcctccttccggctctcgctgtcacatgtcgtgtggtgtgggggcgctctgatccggatggtgcagcgccgcgggatcgcccacggccatgattgatcgcgaacgagcagtttatttgatgcagaggaaatgcaagttaataatgaggcaccactagggtgcctcaagccaaatatttctcagtataactctccagagcagataggtggtgttgaagggtttcctgagaataatgaaaaaaggaatgatattgttgctgcggaaaaaatctgggaggcgactccaaaccaaggccttagcaggcccatctaccgacaagaattttatgcctggccatatatttattcagattatcaaatcgtgcgtcagccactaccttatggttttgacaaccaattttatcagataaatagggaccacggtttccctattgagaacagggttcaatatcttccattcaagatgctccctcaaggtcacccccatgatgcacagcttcaggaatttcagtattttgtggttattgactttgaagcaacctgtgacaaggtgaacaatccatttccacaagaaatcatcgagtttccatctgtcttggttaacagtgcaactggaaaactcgaagaatgcttccaaacatatgttcggccgacgtatcatcaatttttgactgatttttgcaaggagcttactggcatacaacagattcaggtggatcaacttgagggtaccgttccaggaagtgtacggggacgtccgctgcaacctgaaggaggcagtccagctggccgggctcacatgggaggggcgcgctcactgcgggctcgacgacgcccgcaacaccgctcgcctcctggcacttctgatgcaccggggcttcaagttctccatcaccaactcactggtgtggcaacctgccgccgctccgcagtcaaccgccgccacctgccacttctccccggaccgctctccggacccagtcgtcgtccagctccagcaccagcagcagcagcacaagccgaaggaggcgctggggtctcccgcgtcgctggtgaacccatcgtacgccacccccgcgggagggaaggacagagccatgtactgctactgcggggtgctgagccggtggagcgtcgtgcgcaagccgggacccatgcaggggcgctacttcttcgggtgcgggaactggaccgccacccggcgcgccatctgcccgtacttcgcatgggcctcgtgaatagcaaagcaagcagagatctgggctggtgctttaaccgagggaggcgcgccatgttgctgcggctggctgctgcgcctcccagttccgtatatattattattgttattattatggtataataactttgctcgcgagacaatggaggttatctaggtagtgtctctaacctgtcgtactgacttctgtcgatagaagagaatggggccagatgctgcttaggtgtgatctatcctatccatccatggataataaagaagtttgtggattgctgttttattaacttgatggaactcctccgtaggtgtggtttgtgcaacttggattttgaaggcttgtgcgtctgtgagtgtttgatcaaatcgaaggtggtgtttgtttgctgaatgaaatggttatggaaggtgcctattattcctgacaagctctgttcagtgagaggttc

SEQ ID NO: 207177 - DNA, 2157 bp, Zea Mays
ccgccaccagaagtaagagaaaccacgcgtgtcagccagccattggatcaccaccattcgcgctgttcggcgtgcgcacccgatcccgtctccgtgcggctttgtgagtagagaagggaaggggaagcaggagcaggaggggttcgtcatcgcgtggtggccgcgccgctctgttcctccgtcccctcctccttccggctctcgctgtcacatgtcgtgtggtgtgggggcgctctgatccggatggtgcagcgccgcgggatcgcccacggccatgattgatcgcgaacgagcagtaactgcgtgaaatgctataccggagatgccattgtgcacggaggtggtttattttgaggaagagttgggacacagtttggtgaattttgttgtgtgctggtctgagagctagtgctgctgggattgaggaaatgcaagttaataatgaggcaccactagggtgcctcaagccaaatatttctcagtataactctccagagcagataggtggtgttgaagggtttcctgagaataatgaaaaaaggaatgatattgttgctgcggaaaaaatctgggaggcgactccaaaccaaggccttagcaggcccatctaccgacaagaattttatgcctggccatatatttattcagattatcaaatcgtgcgtcagccactaccttatggttttgacaaccaattttatcagataaatagggaccacggtttccctattgagaacagggttcaatatcttccattcaagatgctccctcaaggtcacccccatgatgcacagcttcaggaatttcagtattttgtggttattgactttgaagcaacctgtgacaaggtgaacaatccatttccacaagaaatcatcgagtttccatctgtcttggttaacagtgcaactggaaaactcgaagaatgcttccaaacatatgttcggccgacgtatcatcaatttttgactgatttttgcaaggagcttactggcatacaacagattcaggtggacagaggtgtgcctctaggtgaagccttactcatgcacgataaatggctagaggacaagggcatcaagaacacaaactttgctattgtgacctggtctaactgggactgccgtataatgctggagtcggaatgcagatttaagagaatcaggaagcccccttattttaacaggtggatcaacttgagggtaccgttccaggaagtgtacggggacgtccgctgcaacctgaaggaggcagtccagctggccgggctcacatgggaggggcgcgctcactgcgggctcgacgacgcccgcaacaccgctcgcctcctggcacttctgatgcaccggggcttcaagttctccatcaccaactcactggtgtggcaacctgccgccgctccgcagtcaaccgccgccacctgccacttctccccggaccgctctccggacccagtcgtcgtccagctccagcaccagcagcagcagcacaagccgaaggaggcgctggggtctcccgcgtcgctggtgaacccatcgtacgccacccccgcgggagggaaggacagagccatgtactgctactgcggggtgctgagccggtggagcgtcgtgcgcaagccgggacccatgcaggggcgctacttcttcgggtgcgggaactggaccgccacccggcgcgccatctgcccgtacttcgcatgggcctcgtgaatagcaaagcaagcagagatctgggctggtgctttaaccgagggaggcgcgccatgttgctgcggctggctgctgcgcctcccagttccgtatatattattattgttattattatggtataataactttgctcgcgagacaatggaggttatctaggtagtgtctctaacctgtcgtactgacttctgtcgatagaagagaatggggccagatgctgcttaggtgtgatctatcctatccatccatggataataaagaagtttgtggattgctgttttattaacttgatggaactcctccgtaggtgtggtttgtgcaacttggattttgaaggcttgtgcgtctgtgagtgtttgatcaaatcgaaggtggtgtttgtttgctgaatgaaatggttatggaaggtgcctattattcctgacaagctctgttcagtgagaggttc

SEQ ID NO: 207178 - DNA, 2183 bp, Zea Mays
ctccgcgccaccgccggtaaccgccaccagaagtaagagaaaccacgcgtgtcagccagccattggatcaccaccattcgcgctgttcggcgtgcgcacccgatcccgtctccgtgcggctttgtgagtagagaagggaaggggaagcaggagcaggaggggttcgtcatcgcgtggtggccgcgccgctctgttcctccgtcccctcctccttccggctctcgctgtcacatgtcgtgtggtgtgggggcgctctgatccggatggtgcagcgccgcgggatcgcccacggccatgattgatcgcgaacgagcagttgcagtaactgcgtgaaatgctataccggagatgccattgtgcacggaggtggtttattttgaggaagagttgggacacagtttggtgaattttgttgtgtgctggtctgagagctagtgctgctgggattgaggaaatgcaagttaataatgaggcaccactagggtgcctcaagccaaatatttctcagtataactctccagagcagataggtggtgttgaagggtttcctgagaataatgaaaaaaggaatgatattgttgctgcggaaaaaatctgggaggcgactccaaaccaaggccttagcaggcccatctaccgacaagaattttatgcctggccatatatttattcagattatcaaatcgtgcgtcagccactaccttatggttttgacaaccaattttatcagataaatagggaccacggtttccctattgagaacagggttcaatatcttccattcaagatgctccctcaaggtcacccccatgatgcacagcttcaggaatttcagtattttgtggttattgactttgaagcaacctgtgacaaggtgaacaatccatttccacaagaaatcatcgagtttccatctgtcttggttaacagtgcaactggaaaactcgaagaatgcttccaaacatatgttcggccgacgtatcatcaatttttgactgatttttgcaaggagcttactggcatacaacagattcaggtggacagaggtgtgcctctaggtgaagccttactcatgcacgataaatggctagaggacaagggcatcaagaacacaaactttgctattgtgacctggtctaactgggactgccgtataatgctggagtcggaatgcagatttaagagaatcaggaagcccccttattttaacaggtggatcaacttgagggtaccgttccaggaagtgtacggggacgtccgctgcaacctgaaggaggcagtccagctggccgggctcacatgggaggggcgcgctcactgcgggctcgacgacgcccgcaacaccgctcgcctcctggcacttctgatgcaccggggcttcaagttctccatcaccaactcactggtgtggcaacctgccgccgctccgcagtcaaccgccgccacctgccacttctccccggaccgctctccggacccagtcgtcgtccagctccagcaccagcagcagcagcacaagccgaaggaggcgctggggtctcccgcgtcgctggtgaacccatcgtacgccacccccgcgggagggaaggacagagccatgtactgctactgcggggtgctgagccggtggagcgtcgtgcgcaagccgggacccatgcaggggcgctacttcttcgggtgcgggaactggaccgccacccggcgcgccatctgcccgtacttcgcatgggcctcgtgaatagcaaagcaagcagagatctgggctggtgctttaaccgagggaggcgcgccatgttgctgcggctggctgctgcgcctcccagttccgtatatattattattgttattattatggtataataactttgctcgcgagacaatggaggttatctaggtagtgtctctaacctgtcgtactgacttctgtcgatagaagagaatggggccagatgctgcttaggtgtgatctatcctatccatccatggataataaagaagtttgtggattgctgttttattaacttgatggaactcctccgtaggtgtggtttgtgcaacttggattttgaaggcttgtgcgtctgtgagtgtttgatcaaatcgaaggtggtgtttgtttgctgaatgaaatggttatggaaggtgcctattattcctgacaagctctgttcagtgagaggttc

SEQ ID NO: 207179 - DNA, 2064 bp, Zea Mays
ctccgcgccaccgccggtaaccgccaccagaagtaagagaaaccacgcgtgtcagccagccattggatcaccaccattcgcgctgttcggcgtgcgcacccgatcccgtctccgtgcggctttgtgagtagagaagggaaggggaagcaggagcaggaggggttcgtcatcgcgtggtggccgcgccgctctgttcctccgtcccctcctccttccggctctcgctgtcacatgtcgtgtggtgtgggggcgctctgatccggatggtgcagcgccgcgggatcgcccacggccatgattgatcgcgaacgagcagtttatttgatgcagaggaaatgcaagttaataatgaggcaccactagggtgcctcaagccaaatatttctcagtataactctccagagcagataggtggtgttgaagggtttcctgagaataatgaaaaaaggaatgatattgttgctgcggaaaaaatctgggaggcgactccaaaccaaggccttagcaggcccatctaccgacaagaattttatgcctggccatatatttattcagattatcaaatcgtgcgtcagccactaccttatggttttgacaaccaattttatcagataaatagggaccacggtttccctattgagaacagggttcaatatcttccattcaagatgctccctcaaggtcacccccatgatgcacagcttcaggaatttcagtattttgtggttattgactttgaagcaacctgtgacaaggtgaacaatccatttccacaagaaatcatcgagtttccatctgtcttggttaacagtgcaactggaaaactcgaagaatgcttccaaacatatgttcggccgacgtatcatcaatttttgactgatttttgcaaggagcttactggcatacaacagattcaggtggacagaggtgtgcctctaggtgaagccttactcatgcacgataaatggctagaggacaagggcatcaagaacacaaactttgctattgtgacctggtctaactgggactgccgtataatgctggagtcggaatgcagatttaagagaatcaggaagcccccttattttaacaggtggatcaacttgagggtaccgttccaggaagtgtacggggacgtccgctgcaacctgaaggaggcagtccagctggccgggctcacatgggaggggcgcgctcactgcgggctcgacgacgcccgcaacaccgctcgcctcctggcacttctgatgcaccggggcttcaagttctccatcaccaactcactggtgtggcaacctgccgccgctccgcagtcaaccgccgccacctgccacttctccccggaccgctctccggacccagtcgtcgtccagctccagcaccagcagcagcagcacaagccgaaggaggcgctggggtctcccgcgtcgctggtgaacccatcgtacgccacccccgcgggagggaaggacagagccatgtactgctactgcggggtgctgagccggtggagcgtcgtgcgcaagccgggacccatgcaggggcgctacttcttcgggtgcgggaactggaccgccacccggcgcgccatctgcccgtacttcgcatgggcctcgtgaatagcaaagcaagcagagatctgggctggtgctttaaccgagggaggcgcgccatgttgctgcggctggctgctgcgcctcccagttccgtatatattattattgttattattatggtataataactttgctcgcgagacaatggaggttatctaggtagtgtctctaacctgtcgtactgacttctgtcgatagaagagaatggggccagatgctgcttaggtgtgatctatcctatccatccatggataataaagaagtttgtggattgctgttttattaacttgatggaactcctccgtaggtgtggtttgtgcaacttggattttgaaggcttgtgcgtctgtgagtgtttgatcaaatcgaaggtggtgtttgtttgctgaatgaaatggttatggaaggtgcctattattcctgacaagctctgttcagtgagaggttc

SEQ ID NO: 207180 - DNA, 908 bp, Zea Mays
attcaggaccatagtgatggttcagaggaaatgcaagttaataatgaggcaccactagggtgcctcaagccaaatatttctcagtataactctccagagcagataggtggtgttgaagggtttcctgagaataatgaaaaaaggaatgatattgttgctgcggaaaaaatctgggaggcgactccaaaccaaggccttagcaggcccatctaccgacaagaattttatgcctggccatatatttattcagattatcaaatcgtgcgtcagccactaccttatggttttgacaaccaattttatcagataaatagggaccacggtttccctattgagaacagggttcaatatcttccattcaagatgctccctcaaggtcacccccatgatgcacagcttcaggaatttcagtattttgtggttattgactttgaagcaacctgtgacaaggtgaacaatccatttccacaagaaatcatcgagtttccatctgtcttggttaacagtgcaactggaaaactcgaagaatgcttccaaacatatgttcggccgacgtatcatcaatttttgactgatttttgcaaggagcttactggcatacaacagattcaggtggacagaggtgtgcctctaggtgaagccttactcatgcacgataaatggctagaggacaagggcatcaagaacacaaactttgctattgtgacctggtctaactgggactgccgtataatgctggagtcggaatgcagatttaagagaatcaggaagcccccttattttaacaggactgatgcacgggtcacctggttggtactggccctcgccgtcatgattctcaacatctttgggagcttgactggcttaatcttccttccgccgcgtctgtcggtcttgctggatccgct

SEQ ID NO: 207181 - DNA, 1207 bp, Zea Mays
gttcctctctccgcgccaccgccggtaaccgccaccagaagtaagagaaaccacgcgtgtcagccagccattggatcaccaccattcgcgctgttcggcgtgcgcacccgatcccgtctccgtgcggctttgtgagtagagaagggaaggggaagcaggagcaggaggggttcgtcatcgcgtggtggccgcgccgctctgttcctccgtcccctcctccttccggctctcgctgtcacatgtcgtgtggtgtgggggcgctctgatccggatggtgcagcgccgcgggatcgcccacggccatgattgatcgcgaacgagcagaggaaatgcaagttaataatgaggcaccactagggtgcctcaagccaaatatttctcagtataactctccagagcagataggtggtgttgaagggtttcctgagaataatgaaaaaaggaatgatattgttgctgcggaaaaaatctgggaggcgactccaaaccaaggccttagcaggcccatctaccgacaagaattttatgcctggccatatatttattcagattatcaaatcgtgcgtcagccactaccttatggttttgacaaccaattttatcagataaatagggaccacggtttccctattgagaacagggttcaatatcttccattcaagatgctccctcaaggtcacccccatgatgcacagcttcaggaatttcagtattttgtggttattgactttgaagcaacctgtgacaaggtgaacaatccatttccacaagaaatcatcgagtttccatctgtcttggttaacagtgcaactggaaaactcgaagaatgcttccaaacatatgttcggccgacgtatcatcaatttttgactgatttttgcaaggagcttactggcatacaacagattcaggtggacagaggtgtgcctctaggtgaagccttactcatgcacgataaatggctagaggacaagggcatcaagaacacaaactttgctattgtgacctggtctaactgggactgccgtataatgctggagtcggaatgcagatttaagagaatcaggaagcccccttattttaacaggactgatgcacgggtcacctggttggtactggccctcgccgtcatgattctcaacatctttgggagcttgactggcttaatcttccttccgccgcgtctgtcggtcttgctggatccgct

SEQ ID NO: 207182 - DNA, 1781 bp, Zea Mays
ctactcgattggatttaaacccgggtttgggtggcgtcgcctttcatcatttcccccctcgtgctctctctcgaaccttcttccaaagcacccgaaccctagtgatctcggaaccctagccgcgcgcggatctcggcttttccccttcctccacgccagccatggacgaggacttcgagatgcctcccgccggcgccgatgagatgatgggcgacgacgagatgggcgacttcggcggcgacgagggcccggtgatgaaggtgggcgaggagaaggaggtcggcaaggaggggctcaagaagaagctgctcaaggagggcgagggctgggagactcccgaggtcggcgacgaggttgaagtgcattacacgggcacgctccttgatgggacaaaattcgactcaagccgtgatcgtggagaacccttcaagttcaagcttggacaaggtcaagtgataaagggttgggatcaaggaatcaagaccatgaagaaaggagaaaatgctatttttaccattcctccagagctggcttatggagcatctggttcacctccaactatcccacccaatgcaaccctgcagtttgatgttgagctgctttcatggaccagtgtcaaagacatttgcaaagatggcggcatattcaagaagatccttaaagagggagagaaatgggagaacccaaaggatcctgatgaatgaaatatgaggcccgtctggaagatggtactgttgtatccaagtctgagggggttgagtttactgtgaaaagggtagaccagcagctggagaggaaggtgctgtgccgccaaatgcttcgctgctcattgaccttgagttgatttcatggaagactgtcacagaaattggggatgataagaaaatccttaagaaggttctcaaggagggagaaggttatgagcgtcccaacgagggtgctgttgttgaagtcaaaattatcggaaagcttcaggatggcgcggtgtttacaaagaaggggcatgacgaagagccatttaaattcaagaccgatgaagaggaagttattgccggtcttgatcgtgctgtgttgaacatgaagaagggcgaggttgctcttgtcacaattcctcctgaatatgcatttggttcaactgagtcaaagcaggatcttgctgttgttccacctaacagcacagtaatatatgaagttgagcttatttcatttgtgaaggacaaggagtcgtgggacttgaacaatgaagagaagatcaaggagtacaacaagaaggacgccaaattctacagcaacatgttcgccaagatgacaaagtagcttttggggtggaggatgttgtggtgaagcgaagggattaaaaacaccgatttctgctgccgaaggacttcgcccgttgcttaacttctcgcttttcgcatactttgtagtcaattagtgtgcacggatgcttggatatgtgaaactgaggaacatgtacttcgaggattattattggttctgaatttttatgttttctggttcttgttaggaccattgaatgttctctctatataattttcggacacatgttcttaataaaccacgggagcaaaagtttatgctaagaacgtctgctcatcgtaactaacaacagctgcctcaccgtcacgcactgccgtgtcaggatgtgtcaacctgaagatcacagaaactgcacaacgtttgcagatcaatgaatgggcactttggattagaggtggtaatgagctctaaattctatataaaattaattaaggttttaa

SEQ ID NO: 207183 - DNA, 1783 bp, Zea Mays
cgagagaaaggcagactgggggagagagaggaatcgagagaccacacgccggcgccacgtagcttgatctaggcgatggaggtggcgcttgtggagcggttggaggcggcggtgaagatcggcgggaaggtgctggacgcgaccaaggtgctcgccgaggcatttgccgtcgccaaggacatgctcgtacaggccaagcagcaccagaaaccagcatcaatggctgatgcgcagggcttcgttaagcccctcagtgatgttatggcaaaagcaactgcaatgaccgaaggaaggagaccagactatttcaaccatttaaagagtgttgctgacagtctacctgctttggcttgggtggcattcttaggaaaggactgtggcatgagtttcccaacggcacatgtagaggaaagctggcagatggctgagttctataataacaaggttcttgtggagtacagaaacaaagaccctgatcatgttgaatgggctaaagcattgaaggatctatatatgcctggtttgcgggattatgttaaaaagcactaccctcttggtcctgtctggggtcctgctggaggcgctgttgtttctcaaccaaaggctgctgctcctacacctaaagctccagcggttaaggctccccctccaccagctcctcctgcagcgcctctgtttagcacagagaagtctccaaaatcttcaaagcctaaagaagggatgtctgctgtcttccaagagattagttcaaaacctgtgactgcagggttgcgaaaggttaccgatgacatgaagtctaaaaaccgcgctgatagaagcggtgttgtcagcagcactgctcctgctcctgctgcagctcctgaaaagacttcccgtgcagggtccttctctttcaaatctggaccccctaaactggaacttcagatgggacgcaaatgggtggttgagaatcaggttggcaagaagacccttgctattgatgattgtgattccagacaatctgtctatgtgtatggatgcaaggattctgtccttcaagtaaacggcaaggttaacaatatcactgttgacaaatgcactaagtttggaattgtattcaaggatgttgtagcagcttttgagattgtcaactgcaatggcgttgaggtccaatgtcagggtacgtcaccgacaatatcaatcgacaacacatctggatgtcaattatacttaagcaaagattcgctgggagcttcaattacttctgccaaatctagcgaaatcaatgtgatggttccaagtggtggcgctgatggtgattgggtggagcatgcattgcctcaacagtacatccatagtttcaaggatgggcagttcaccacttcaccagtttcacactcaggagcgtgaatacaattgttactgctgttgtttttgaggtttgtaaacagttttgggtcttgcagcactggactcggtctgcgattgttgttttttgttgcccttgctcagtccgcggtgtgtatgtcctgcatgcacgtggttcctttctgttggtgtttttgtgtgccaacaaaccaccaaacttggtttgtatgtctttagctgatcattctttgacactgaatctcattatatttgtattcatttggacgcttgcttttttcgagtctcttttcagattcctttaacaaagtgacaatggcaaatgctgttatcgtactttaaatctcgacgctgtgcttggatcgtgaaacacgtactagaatacgagaggtggcgcaatacattaggcagaaaaaag

SEQ ID NO: 207184 - DNA, 2175 bp, Zea Mays
cccttcctctccagggaaggaggccagaatcccccgtcgacgcgcacgcgccgtcgcgcagagctccgcgtccgcatcggccaccgcccacccgcgccggccgccggcggcgtggatggggaagctcgccgccctgaagcgggaagcggtcggggtggactaggtgctcggcgaattcctagtttagactttagaagcagtaggtggaggtgatgcggggcggagcgatgaaggctctgcggcgatccagcacctcctcgccgccgtcttccccgcattttcattcgtggatccaccgccggtacctcctcgttacctcgtcggcgacgtcctctttgtctgcatcggcgaattcggccgcggagggttcggattcagcgtcagtggtggcagcttcctcgtcgccctcgttggatccttcgtctccgaacatggaccgcgaacgggaagtttcgtgatgggggaagaaagtttctaaagaaggttcgcagtgggggaattgagccaggcataagggctgaagtttggccatttctgcttggagtgaaagaatatgaaaaattgaggcgacagtgccaccatgttctgcattgcaatagaggaaatggtctgaatgttataaatgagttcctgaatgaggacttctctgatggggctgaaggttcagagtcaccatattccaatggtgctagtaagagggcttgtgtgatgcccagagaattgaaatctttaggcagtaaggcagaagagtcagagagttctaactgggatgttgtggaatccatagatgaagatacaagtgagttaacttctgttgatccatgcatgatagaatcagaatcttctgaatctgagtcttcatatgaagaggaccctgatagaacacctgtctctaccaatatggaagagagctgtgatcccaaacctagatttgtccggactgcttcagcaaagtcagacatttttctttcagacagaactcctgaggattttaccacatggcagcgcattatacgtgtagatgctattcgagcaaatacagaatgggttctatttgcccgtaaccaggctgaagtctctaaagagaaagcactgcagtctgcaatatctgttggattgaaagattttgaccatttggagccttacatgatttatcatgcggcacgattagttgcactgcttgaggcatatgcagtctatgatccagagatcgggtactgtcaaggaatgagcgatctcttgtcaccaatagttgcagtcatggaggaagatcatgaagcattttggtgctttgtgggtttcatgaggaaagccagacacaacttcagacttgatgaggttggaataagaagacagctgaaaaccgtctcgcagatcatcaagcttaaagattcacagctctacaggcacctgcagcaacttcaggccgaagactgcttctttctgtaccgaatggtggtggttctcttcaggagggagctcacttttgagcagactatgtgtctgtgggaggttatgtgggccgaccaggccgcgattcgagctgggattggaaggtccacttgggcaaggataaggcttcacgcccctccaacagacgacttgctgctctacgctatcgcagcctgtgtcctgcagaggaggaagctgataatcgagaagtacagtagcatggatgagatactgcgggagtgtaatagcatggccgggcagctagatgtctggaagctcctagatgatgcacaccacttggttgtcgaccttcatcacagaatctgatgcgacggcttccctcagttatgtttggtagagtatgcagacatgaaccacttttccgaggtgtatttagtaatctgttgtgtactgttcatcacccggaattatgggcatatatctagagaaccgtgtggcttcaagtgaggacgaagttatctccacttcggttaagctgataaaccattggatagcacaatggtttatgcaagccatccatagtttaacttgatgtaaaatttcgtttttttgcttccagtatctgtcctaggcgaaaacatcattttccatcaagccttttatagcaaaatttaaagttcccagattttggggtgtaatgcggagtaatatatgatggattcaaagtctttgctgcgtcattgcacacaccaagttcttcca

SEQ ID NO: 207185 - DNA, 2665 bp, Zea Mays
catcaatcatcaaagcgtctccctccccacgaaacccccttccccaaactacctctgctgctctccttgatccccaattctctcttctgcctacttgcctccatctcggcctccacctccactcctcgcccccgaacatccggcgctgtccgcaccccgactcctctcgtcctttcgcggtcgcgatggtggcgtccatggcgtcgccgtaggggcgatcgatctaggagaaagtgctggagaatgtggcgtcgtaccaccagcaacaacggaggcagaagctacgcaagagcctcacctacaccggcggcgagctctcgttcactgtctgggcccgtggggatgaccccacctccacgtccgtcgaggcacagaaggaggacatgcctcttgagcacgtcttcaaaatcatcagatctgatggcaaaagtgtgtgtttatggttcctgagtcagatgatctttcttcagttttagatgtgatagatattggtataaaagataaaaactagaatgctatgtctgtcaaaggagctttcttcagttcagtgcttggtggatcaccgtctaaacgatccaccaccagaaccgccctaccccaagatagctatgtgcaggttcaactactcatttagatattggtacagcctgtaatagactttggtacaataggatttggttttgctattcacttagtttttagttccaaacaaccaacaaattgcatgtcctttaggaaaaatatcacatgaatatcagtaatataacactgataataaaaaatgcttcgattctatatatttttcatgttataaggttgaaaacattctgtctcacggatcagaatgtgtacaaggcgacatactgtgtttacaaatatatttaaccataataaaaacatatttggaaactgaatatcatttaagtccaaaaatgtttttgctgactgttcattaagctagagtaaagagtaaacttagcatttcttttctatatctctctttcgtgctcatgccgccgcagtctcctccatcccacctttcctacgcaggcagctccatctcagtcgttgtacccattcaacgccgagctggtggcagcgatgcaggagatgatccagccgaggtgtacaagtacatgttagtggacgtcacctgccaaagatacacagtttctactgtttttcagttggagaaaatatttaagacaacattttcatcgtttgttctccatatggggcttgtttcacgccacttgaaggaaggagggaatgatggtgttaagttcggacaatacatctacacatctatgaaatgtacaaccacgatgtagagcatagagtttctaaagttgggtaagctgtttggctgttttatagaaatttgtatcaacatcaacatagatttttagtcccaaacaaattggggtaggctagatttgaaacccaacaagaagtcaccaaaaagagaaagagagataaaggggaggggaaaagcttttgagagaactaaaagagaaaatgcctaatcacggttcgggcacgtggatagcttctttccaagcatttctatccaaacacaactcctttgggtgtgtggggtgatattagaagcttcatgttaggtgtttgatactttcttgaatataggatttttgtgtgtgtggtgtagtataaataatgtccatagttgaataccaaaatgtggatattgtacagtgggagttatggctgccttcttcattgcttgatcttagttgttggttgcaatcttctaacttagagtatgatgcttgaagagatttggatgatgttggagatgtgctttggtgtagttcatctctcccgaatcaagagtctggtttatggggctaaggtagaggctgccatcgccattggattcaatgacttcattacatatgctctgagaggcattgggttctaccagaaggataacatggagatcaagaaggccaatggcaatggcacactgatccctgagcagatctttgaaaagactaggagaagttctagatgaattgatgcttggctgaagagggatgtcagatttgtacaatgctcacccacaaagaataatacatttctccaatgtccactgttttgaaaaatacctccattccaatgtttaacattctaacgatgtctgaatttattgtaaagagacacatgattgttcattgttgtaacttatgtacaatatatgcgtgtgtgaaataaagatcatcttggagcaccggcatcaatgttatcaatcttctcaaatttcaaattatcctggtctcttcgtgaaaccataaaagtttattaagtcacttatctgagtggtctaaaagtctagcatatttttgttcctttgcctgtcgagacggatcagctggcatgaataatatccggtgaatactgcaagagctattcatgatcccccgtgaactagctggtatgatataacttagtttgtgaagtgctaatgccacaaacaggaaataggatgatacttcatgtatatttttttctttcttgaaaatgaactataggatactgtttacaatccataccaagcttctgcagttatcaacatttttctatgttcaaccttgttaacatattaagacgagtttttctttcatttttcaaaaaaataaatcaa

SEQ ID NO: 207186 - DNA, 502 bp, Zea Mays
ctgaagtccaggcttctcatagaattggttgggactgtgacagcaatttgtgttacctgcttcctgataagatgtgttgtggttgcattatctgcgtttgatgccgatgtatctctcgaggttttggaccatccagtcctagatttcttctattatatgcttgcggagatactgccttctgcgctagttctcttcgtccttcggaagcttcctcccaagcgggtttcggcacaataccaccctattaactagagagttttgtttttttttaatgatgttacatgctaagaactccggataatctgaaactactggaaacctacagccggctgtagttggatgcttttgcttgtgctgttatgtttatggaagcatcagtgttggcgatgaatataatgacgatcattctatatggggaagtggtgctaatgaatgaatactccttttatatatggttgcatctcatgttgttatttggtcggtttgtgcactgcatgacatg

SEQ ID NO: 207187 - DNA, 870 bp, Zea Mays
caaatgtcacccgttgcaacgcacgggcatatacctagttaaaaagaagaagaaaacatcgtgtgtggagcagaaagctccggctccgtgcgaagaggatggatagataagcaacgggtgggcctcgatgaggagaagcctgggccactaaccgccgccgcatcgggagccttcgtttggccacggttcagctagctatcacgcgcgaaggcccacccagacccagggaggcggcgattcgcggcggtgagggcgtccgcggagacgatggcgacggagaagctgggcatcaaggtggagcgcaacccgcccgagtcccgtctctccgagctcggcgtccgccagtggcccaagtgggggtgcgagaagagcaagttcccgtggacctactccgccaaggagacgtgctacctgctgcaggggaaggtgaaggtgtaccccgaaggccacggggaggagttcgtggagatcggcgcgggagaccttgtcgtcttccccaagggcatgagctgcacctgggacgtcgccgaggccgtcgacaagcactacaacttcgagtagccgccgccgccgactagccctgcggcgctcgatgtagacttgctgtgctcttgtactctgaacctatgatgctccactccagagttaacagaccgtgtaataaagctccggattaggggactacaatgctgtactatctgtttcagatcccgttcggttagctgtgataagacctgaaactattccagctgatcagttttaatacaaataaaactatggaacagttttagaggatccgttccgaacaaaacgaaacaatccctaacgactaacactgacgttctcttatgcgagcttgttggatgtgct

SEQ ID NO: 207188 - DNA, 1426 bp, Zea Mays
gtcttcctctccttcacttttcctgtacgccctcgaagcttcgactgcttgcccatgacctaagccgctgccgcctacaccctcacatcccgcgccctcctctatcgcgccgccaccgaccacccccaaatcctgcttccccaccgctcgcttccgttgggatcgtccgtcctcccagaccgcgtgggcgcttcttcttcggaatctccgtgggccgagtggcgctgggctagggattcgggcccatggcgtggcggcgcgtcctcacccagattgcaaggcatcgaccaacaaaagcaatctacaatgaactagttgcttcctcccctttgggcgcttttcaaagtgacatcactgcaggtacacggaggtgccagaattaaaaatttgcaagagaggaaccagtcaagttacatcggtagccttgcacgccgggtgcgagacctagaatcaccaagccaaacctctcttcttaaagagatttacagaagtgacccggagcgtgtcatacaaatatttgaaagccatccttcattacattctaatcccgcatgggaggccgcgtggcagaagagcttatatttggggatactgaggtgacctccggtgcgtcgtcagacttccagcaagcaactgcaatggcaagagcgatggttaccaagtatggcatgagcaagcatgttggccttgtctcttataactacgaggacgatggaaagagcgtgagctcagaaaccaggcttgtgattgagcaggaggtgaagaatttcctagagaacgcgtataataatgcgaagaccatccttacgaaacacaataaagagctacatgctctggccaacgcacttcttgagcacgagaccctcacaggagcccagataacgaacatattggcccaggtacgtaacaaacagcaacaagaacatactgtcgaagcaccacagagggccccagcttccccggcatcaccagctgcggcggcagcagctgcagccgccgcggcagcacagcaggcggcagccaaagctaagggagtggctggtatgggatcttagcacatggagcgccccaccggatgtatatttaaccaaacaagcaaagctgttccagcgattgacagttgatgaaggtcatcggatgtattgtatgctaaactgctgcagcaatagaacacactgattgcgtggaagttactcttccatgtgcctcgagtgcaaagcagagacaaaaaaactgtacgtgttgtagacttgtagctggtgcttgaatcagttttgtacccacatcgaaaacaattcctgttgtttacaccccgaaaaattgttagatttcgatctggctgccttgtgtaccctaacagagcgtaaattgtaacacatcctgaataaggccctgttccaatctcgtgagataaactttagcagct

SEQ ID NO: 207189 - DNA, 1058 bp, Zea Mays
ggaaggcggatccgtgggggcatcagcccaccccgagcccagcttccgcgtggaaagacgccctgcctctggacgtcggacaaccatcgctccgattgtctcgtctattcctcatctcgtggatggtggcggcgtcctatctctgttgctgttgatgatttcttgaacgcacgacgaacgcgagctatgtcgaaccctaccaaatcacagccatgtcaaaggaaggtgcaagggcgtcctggaactcaacatatgagaagggtttagtcgatgtactacatgacaacaaagataacccaaagttgaagggtcaaaatggatggaattcagagggatggaagtgtatcactgctaagtttaatgaaaggttctctttggctcatttcacaaaacaacaattacaagagaaggacaaagaacttaaatcaagttataaagcagtaagagattcaagaaaagaaagttggactggttggaatgactccctatgtatgatattagctgaaccagaggtttgggcaaggctcacccaaaggttgcaaggtttcgcaagaagccatttcctcttttctactctttagaagcactttatgaagagtgctaagtggaagcaacacttgaagctgacatggagaagaaaaatggaacaacaatccacatgaagcttgtaaaaaagaagttaaactaataatttattctagtgtcaaagttcataatgactggacttgtactctgttattatgctataataatttgttgaatattagatgatcatgtcatgtgctgttttttttacatttttagtgatgtttcattgtgtttttgtttttctaaatatttcctatttttctttgatttttatgattttttgaagaattttgtctccagagaggtttttagccccttgtttgccaaacagtgagtgacaggaaaatacattaaagtgggaaaaatcctcccagggaattaaagtgtcatttaaaatcctcttggtggataatttccctaggttttttgtctatttattgccaaattagcccttaatgtagttattcaac

SEQ ID NO: 207190 - DNA, 2067 bp, Zea Mays
gcctgcaactctctcgtcccggcaaaggtcacaccttcctccctcgtccacatccgtgcctccagccaccggccgcctagggcggcgctcttgccaccggctgtcgagcccgccgaccttgccgccgtttccacgccgcctgacctgcccccacgacctgctgccgtcacgccatccgacctgccccaggacagcccaagcccccgcgaggccgcgacctgctggggaggagattgataggagaggtggtcggcggcgtggataccaacgacggagacatagtgattgccgcccgtcgtcccctgtttccgacacgctgaagcctcacgccacgagcgagcagagggccccaactgccagcagcaaccttaggcactggttgcttgaagtaaccaaacattcggacgcgcataaaatcgccacgcacgcatcgctggttttgccgtcgcagagcagaaggcactccgggacggcagcgtgctctgcagacgctgaaggcaggatgtggctggaagaggtgaggcggagggagcgtggagagcttcgcgctcggcggtttgaggccgccgcccgagcgtgccgcacggcttcgctcgcgctctccaatcgcaaggagtttgtcaccccacatcacggcgccgtcaactcgctccaggttgatttgacagaggggaggtacctgctctccggggcatcggatgggtcggccgctgtgttcgatgtgtggaacgcgactgaatacgaaaccgggttcatagcaaagcacaggaacatactgcttgtggacaagcaacaccagaatggccacaagttcgccatctcggcggccgtttggtatcctgtggatacggggctgtttgtcacagcatcctttgaccagtttgtcaaagtttgggatacaaattcgactcaagtcgtcatggaatttaagatgcctggaaaagtgtacactgcagccatgtctccaatcgcaacaacgcacgtgctcattgctactgggagtgcagatgttcagtggtctgcctcaagtgagtggattttgatgagtggtggctgtgacggggcaatacgtttttgggacattagaagagctggatgctttcgggttctggaccaatcaaggtctcaacttggaaaaaggccccttgttaaaagtgctctatataaggatcacacagattccttaggaccttcaccttccgcaaggagaaggacaggcatttctaagaagagttcatcagctttgcgcaaaattcaaaacccgacacatggacacatgcaacagagattgcatcctggtttgtcatctagtcaaaaccgtgctactgctcattatggtgctgttactggtttacgaacaactgcagatgggatgtaccttcttagctcaggatctgattctcgcttaagactatgggacatcgattcaggctgcaatacgctggtcaattttgaagctatgcgattgcagacaggcaagccattacaattagctgtcactgaggatccttcacttgtatttgttccatgtatggcaagcatcaaggcatacaatttatggtctggtaaaacatttcaaacattccgggggcactatgaacttgtgagttgctgctactatagtgaacaggaccaagaactttatactggcagcaacgacaggcaaattcttgtgtggtctccatcaactccagcttttactaaaatggaagatgatgacaagatcctttctgcagctgatgaggataactggagcgactgagaaaccctggagccgggaggagtgtgtcttgtatctactgacatcgatgttactgatgttaacaaataacatgtcgaggttgttaggtcttgttagcagcccctaaatgatgatattgtcttggtgtattttcaaaaatatgtacattaccatgtgaaaatttgacagatcattgaataatttgtagatttatctcaggaggatagagggatgtttgacgttcgccaaaatgttgtttagccctggagccttgttttcttcactgtgtattaatgctttacccaaaaataagaatttttctgagc

SEQ ID NO: 207191 - DNA, 4248 bp, Zea Mays
gcctgcaactctctcgtcccggcaaaggtcacaccttcctccctcgtccacatccgtgcctccagccaccggccgcctagggcggcgctcttgccaccggctgtcgagcccgccgaccttgccgccgtttccacgccgcctgacctgcccccacgacctgctgccgtcacgccatccgacctgccccaggacagcccaagcccccgcgaggccgcgacctgctggggaggagattgataggagaggtggtcggcggcgtggataccaacgacggagacatagtgattgccgcccgtcgtcccctgtttccgacacgctgaagcctcacgccacgagcgagcagagggccccaactgccagcagcaaccttaggcactggttgcttgaaggcaagcgcgtcgtatgttatccgttttctatcacattaccgtcgtaattatcatatccctctccccagttatccaagcattatgcagggacagaaactataaaacttctagcaatcttgttgacccaaacgatttgccttgtttcagttcttgatcttcttctttgccctcagctgaaaatgggagaagcaagggaaacattaggaaatcacaccaatcagcaaaacaattaaacccttgattgtgattttcagctgtgcaaatcttaattagatatctcagataatccatcaactagacaaacatacaaagtgaaccgaacaactctcaaacaatatgatatttcctaggcaactctcaaaggaaaaagtcacatagcaaatgacataatttagtacatgtaatgaattctgatgatgtatgccaagtttatcactagcgtacatgtctaaagctgactggcatccgcttgcttatacaaatccaaaatatgacattactacagtaaggcatcaccattcacaaacaagaaaatagtacctcgttgttgtggccacatttcttcttgcggcagttaacagccttggtgtgcaagcgagtatagcacctggatcagatatttgacatcaagcacttagactaccctaggttcatactgaatataagaatttccaatgcaaacacaatactatttacaaaactatctaggggggaaatcaaatggtcctttgtaataatgtttacgaacaaagcaaactaggtgcaagacagtaaacgtcaaaacacagacaaaacaagaaccagagaaacttgcagtgatcaaaagtctgaatgattggcaggccagacaaaatatatgcctcaaaagttaagctcgtaaggcgacttacacatctaattgattcatcattccagccaatcaactatgagcataggaaagcacaaatcccagaccaaactcaaaagatacttcaactgaacaaacaagttatactacctaattggttcatcacccctgccaatccactaaactgaatacaatgaaacaaagatagtggactgtcacaagtggttatatgttgcatattttaagacattcccggttgttgaaaatttaggagattagaccttcattagtatagatgcagatcattggtctcctcatacgagccaaattttcaagaaataccaacgaaggtgatggcacacaagttgatgcacacaatgataccacgcaagatgatgcacttgaaggcaaggaagatgattgtttgtgctactatgccgctccataattttattcgtgagcattctagtggtgatgtgggctttgcaaattgtggttgagatcctgattttgtgcctactatcccaatttcccaaatagatacaataaataactgaataatcagtgtcaccacatgcctcagatcaatccacttctaaatcaagttttactacaatggatgcatttcgtgatagtatagcaacgactctcacttgtgtggaattagcaccaaatatttatgcaatattttgcaacatctatttgtagtgacttgtgtgaagagtgaagacaatgattatgtaatatgttactagtttattattgctgcaaggttgaatatttgaatttatttgaaaaaatcatatagtgatttatctttgttgtattgttgaatagtcaagttcatagcaaaaatagttgcataaagatcattattctcaataaaacaattagctaaaacaaccaaatgataggaaggtcattgcagcctcaaacttcacttttctagagttggatgcacctttctggtcaaacacagtcaaaactccagaggagagcagctccagtctggagttatagagcaaagctactctgaagtggagtggagccatacaaacacaccttagttggcgtagatttttgtgaatccgcttttggctagcgataacgtcttctgggtttccaaaggcttctactcgactcctctaggccttttgggacgtgaccttcatcttgtgcgacttgccaaacgaatccgtcacaatactgccgaatgcaatggaagcttcctaccataacagtcgacccttttcacaccggtcaacgcagtaaccaaacattcggacgcgcataaaatcgccacgcacgcatcgctggttttgccgtcgcagagcagaaggcactccgggacggcagcgtgctctgcagacgctgaaggcaggatgtggctggaagaggtgaggcggagggagcgtggagagcttcgcgctcggcggtttgaggccgccgcccgagcgtgccgcacggcttcgctcgcgctctccaatcgcaaggagtttgtcaccccacatcacggcgccgtcaactcgctccagaggggaggtacctgctctccggggcatcggatgggtcggccgctgtgttcgatgtgtggaacgcgactgaatacgaaaccgggttcatagcaaagcacaggaacatactgcttgtggacaagcaacaccagaatggccacaagttcgccatctcggcggccgtttggtatcctgtggatacggggctgtttgtcacagcatcctttgaccagtttgtcaaagtttgggatacaaattcgactcaagtcgtcatggaatttaagatgcctggaaaagtgtacactgcagccatgtctccaatcgcaacaacgcacgtgctcattgctactgggagtgcagatgttcaggtccgtctatgtgacattgcttctggagcctttacccacacgttgtctggtcatcgtgatggtatcatgtctttggagtggtctgcctcaagtgagtggattttgatgagtggtggctgtgacggggcaatacgtttttgggacattagaagagctggatgctttcgggttctggaccaatcaaggtctcaacttggaaaaaggccccttgttaaaagtgctctatataaggatcacacagattccttaggaccttcaccttccgcaaggagaaggacaggcatttctaagaagagttcatcagctttgcgcaaaattcaaaacccgacacatggacacatgcaacagagattgcatcctggtttgtcatctagtcaaaaccgtgctactgctcattatggtgctgttactggtttacgaacaactgcagatgggatgtaccttcttagctcaggatctgattctcgcttaagactatgggacatcgattcaggctgcaatacgctggtcaattttgaagctatgcgattgcagacaggcaagccattacaattagctgtcactgaggatccttcacttgtatttgttccatgtatggcaagcatcaaggcatacaatttatggtctggtaaaacatttcaaacattccgggggcactatgaacttgtgagttgctgctactatagtgaacaggaccaagaactttatactggcagcaacgacaggcaaattcttgtgtggtctccatcaactccagcttttactaaaatggaagatgatgacaagatcctttctgcagctgatgaggataactggagcgactgagaaaccctggagccgggaggagtgtgtcttgtatctactgacatcgatgttactgatgttaacaaataacatgtcgaggttgttaggtcttgttagcagcccctaaatgatgatattgtcttggtgtattttcaaaaatatgtacattaccatgtgaaaatttgacagatcattgaataatttgtagatttatctcaggaggatagagggatgtttgacgttcgccaaaatgttgtttagccctggagccttgttttcttcactgtgtattaatgctttacccaaaaataagaatttttctgagc

SEQ ID NO: 207192 - DNA, 4183 bp, Zea Mays
gcctgcaactctctcgtcccggcaaaggtcacaccttcctccctcgtccacatccgtgcctccagccaccggccgcctagggcggcgctcttgccaccggctgtcgagcccgccgaccttgccgccgtttccacgccgcctgacctgcccccacgacctgctgccgtcacgccatccgacctgccccaggacagcccaagcccccgcgaggccgcgacctgctggggaggagattgataggagaggtggtcggcggcgtggataccaacgacggagacatagtgattgccgcccgtcgtcccctgtttccgacacgctgaagcctcacgccacgagcgagcagagggccccaactgccagcagcaaccttaggcactggttgcttgaaggcaagcgcgtcgtatgttatccgttttctatcacattaccgtcgtaattatcatatccctctccccagttatccaagcattatgcagggacagaaactataaaacttctagcaatcttgttgacccaaacgatttgccttgtttcagttcttgatcttcttctttgccctcagctgaaaatgggagaagcaagggaaacattaggaaatcacaccaatcagcaaaacaattaaacccttgattgtgattttcagctgtgcaaatcttaattagatatctcagataatccatcaactagacaaacatacaaagtgaaccgaacaactctcaaacaatatgatatttcctaggcaactctcaaaggaaaaagtcacatagcaaatgacataatttagtacatgtaatgaattctgatgatgtatgccaagtttatcactagcgtacatgtctaaagctgactggcatccgcttgcttatacaaatccaaaatatgacattactacagtaaggcatcaccattcacaaacaagaaaatagtacctcgttgttgtggccacatttcttcttgcggcagttaacagccttggtgtgcaagcgagtatagcacctggatcagatatttgacatcaagcacttagactaccctaggttcatactgaatataagaatttccaatgcaaacacaatactatttacaaaactatctaggggggaaatcaaatggtcctttgtaataatgtttacgaacaaagcaaactaggtgcaagacagtaaacgtcaaaacacagacaaaacaagaaccagagaaacttgcagtgatcaaaagtctgaatgattggcaggccagacaaaatatatgcctcaaaagttaagctcgtaaggcgacttacacatctaattgattcatcattccagccaatcaactatgagcataggaaagcacaaatcccagaccaaactcaaaagatacttcaactgaacaaacaagttatactacctaattggttcatcacccctgccaatccactaaactgaatacaatgaaacaaagatagtggactgtcacaagtggttatatgttgcatattttaagacattcccggttgttgaaaatttaggagattagaccttcattagtatagatgcagatcattggtctcctcatacgagccaaattttcaagaaataccaacgaaggtgatggcacacaagttgatgcacacaatgataccacgcaagatgatgcacttgaaggcaaggaagatgattgtttgtgctactatgccgctccataattttattcgtgagcattctagtggtgatgtgggctttgcaaattgtggttgagatcctgattttgtgcctactatcccaatttcccaaatagatacaataaataactgaataatcagtgtcaccacatgcctcagatcaatccacttctaaatcaagttttactacaatggatgcatttcgtgatagtatagcaacgactctcacttgtgtggaattagcaccaaatatttatgcaatattttgcaacatctatttgtagtgacttgtgtgaagagtgaagacaatgattatgtaatatgttactagtttattattgctgcaaggttgaatatttgaatttatttgaaaaaatcatatagtgatttatctttgttgtattgttgaatagtcaagttcatagcaaaaatagttgcataaagatcattattctcaataaaacaattagctaaaacaaccaaatgataggaaggtcattgcagcctcaaacttcacttttctagagttggatgcacctttctggtcaaacacagtcaaaactccagaggagagcagctccagtctggagttatagagcaaagctactctgaagtggagtggagccatacaaacacaccttagttggcgtagatttttgtgaatccgcttttggctagcgataacgtcttctgggtttccaaaggcttctactcgactcctctaggccttttgggacgtgaccttcatcttgtgcgacttgccaaacgaatccgtcacaatactgccgaatgcaatggaagcttcctaccataacagtcgacccttttcacaccggtcaacgcagtaaccaaacattcggacgcgcataaaatcgccacgcacgcatcgctggttttgccgtcgcagagcagaaggcactccgggacggcagcgtgctctgcagacgctgaaggcaggatgtggctggaagaggtgaggcggagggagcgtggagagcttcgcgctcggcggtttgaggccgccgcccgagcgtgccgcacggcttcgctcgcgctctccaatcgcaaggagtttgtcaccccacatcacggcgccgtcaactcgctccaggttgatttgacagaggggaggtacctgctctccggggcatcggatgggtcggccgctgtgttcgatgtgtggaacgcgactgaatacgaaaccgggttcatagcaaagcacaggaacatactgcttgtggacaagcaacaccagaatggccacaagttcgccatctcggcggccgtttggtatcctgtggatacggggctgtttgtcacagcatcctttgaccagtttgtcaaagtttgggatacaaattcgactcaagtcgtcatggaatttaagatgcctggaaaagtgtacactgcagccatgtctccaatcgcaacaacgcacgtgctcattgctactgggagtgcagatgttcagtggtctgcctcaagtgagtggattttgatgagtggtggctgtgacggggcaatacgtttttgggacattagaagagctggatgctttcgggttctggaccaatcaaggtctcaacttggaaaaaggccccttgttaaaagtgctctatataaggatcacacagattccttaggaccttcaccttccgcaaggagaaggacaggcatttctaagaagagttcatcagctttgcgcaaaattcaaaacccgacacatggacacatgcaacagagattgcatcctggtttgtcatctagtcaaaaccgtgctactgctcattatggtgctgttactggtttacgaacaactgcagatgggatgtaccttcttagctcaggatctgattctcgcttaagactatgggacatcgattcaggctgcaatacgctggtcaattttgaagctatgcgattgcagacaggcaagccattacaattagctgtcactgaggatccttcacttgtatttgttccatgtatggcaagcatcaaggcatacaatttatggtctggtaaaacatttcaaacattccgggggcactatgaacttgtgagttgctgctactatagtgaacaggaccaagaactttatactggcagcaacgacaggcaaattcttgtgtggtctccatcaactccagcttttactaaaatggaagatgatgacaagatcctttctgcagctgatgaggataactggagcgactgagaaaccctggagccgggaggagtgtgtcttgtatctactgacatcgatgttactgatgttaacaaataacatgtcgaggttgttaggtcttgttagcagcccctaaatgatgatattgtcttggtgtattttcaaaaatatgtacattaccatgtgaaaatttgacagatcattgaataatttgtagatttatctcaggaggatagagggatgtttgacgttcgccaaaatgttgtttagccctggagccttgttttcttcactgtgtattaatgctttacccaaaaataagaatttttctgagc

SEQ ID NO: 207193 - DNA, 4261 bp, Zea Mays
gcctgcaactctctcgtcccggcaaaggtcacaccttcctccctcgtccacatccgtgcctccagccaccggccgcctagggcggcgctcttgccaccggctgtcgagcccgccgaccttgccgccgtttccacgccgcctgacctgcccccacgacctgctgccgtcacgccatccgacctgccccaggacagcccaagcccccgcgaggccgcgacctgctggggaggagattgataggagaggtggtcggcggcgtggataccaacgacggagacatagtgattgccgcccgtcgtcccctgtttccgacacgctgaagcctcacgccacgagcgagcagagggccccaactgccagcagcaaccttaggcactggttgcttgaaggcaagcgcgtcgtatgttatccgttttctatcacattaccgtcgtaattatcatatccctctccccagttatccaagcattatgcagggacagaaactataaaacttctagcaatcttgttgacccaaacgatttgccttgtttcagttcttgatcttcttctttgccctcagctgaaaatgggagaagcaagggaaacattaggaaatcacaccaatcagcaaaacaattaaacccttgattgtgattttcagctgtgcaaatcttaattagatatctcagataatccatcaactagacaaacatacaaagtgaaccgaacaactctcaaacaatatgatatttcctaggcaactctcaaaggaaaaagtcacatagcaaatgacataatttagtacatgtaatgaattctgatgatgtatgccaagtttatcactagcgtacatgtctaaagctgactggcatccgcttgcttatacaaatccaaaatatgacattactacagtaaggcatcaccattcacaaacaagaaaatagtacctcgttgttgtggccacatttcttcttgcggcagttaacagccttggtgtgcaagcgagtatagcacctggatcagatatttgacatcaagcacttagactaccctaggttcatactgaatataagaatttccaatgcaaacacaatactatttacaaaactatctaggggggaaatcaaatggtcctttgtaataatgtttacgaacaaagcaaactaggtgcaagacagtaaacgtcaaaacacagacaaaacaagaaccagagaaacttgcagtgatcaaaagtctgaatgattggcaggccagacaaaatatatgcctcaaaagttaagctcgtaaggcgacttacacatctaattgattcatcattccagccaatcaactatgagcataggaaagcacaaatcccagaccaaactcaaaagatacttcaactgaacaaacaagttatactacctaattggttcatcacccctgccaatccactaaactgaatacaatgaaacaaagatagtggactgtcacaagtggttatatgttgcatattttaagacattcccggttgttgaaaatttaggagattagaccttcattagtatagatgcagatcattggtctcctcatacgagccaaattttcaagaaataccaacgaaggtgatggcacacaagttgatgcacacaatgataccacgcaagatgatgcacttgaaggcaaggaagatgattgtttgtgctactatgccgctccataattttattcgtgagcattctagtggtgatgtgggctttgcaaattgtggttgagatcctgattttgtgcctactatcccaatttcccaaatagatacaataaataactgaataatcagtgtcaccacatgcctcagatcaatccacttctaaatcaagttttactacaatggatgcatttcgtgatagtatagcaacgactctcacttgtgtggaattagcaccaaatatttatgcaatattttgcaacatctatttgtagtgacttgtgtgaagagtgaagacaatgattatgtaatatgttactagtttattattgctgcaaggttgaatatttgaatttatttgaaaaaatcatatagtgatttatctttgttgtattgttgaatagtcaagttcatagcaaaaatagttgcataaagatcattattctcaataaaacaattagctaaaacaaccaaatgataggaaggtcattgcagcctcaaacttcacttttctagagttggatgcacctttctggtcaaacacagtcaaaactccagaggagagcagctccagtctggagttatagagcaaagctactctgaagtggagtggagccatacaaacacaccttagttggcgtagatttttgtgaatccgcttttggctagcgataacgtcttctgggtttccaaaggcttctactcgactcctctaggccttttgggacgtgaccttcatcttgtgcgacttgccaaacgaatccgtcacaatactgccgaatgcaatggaagcttcctaccataacagtcgacccttttcacaccggtcaacgcagtaaccaaacattcggacgcgcataaaatcgccacgcacgcatcgctggttttgccgtcgcagagcagaaggcactccgggacggcagcgtgctctgcagacgctgaaggcaggatgtggctggaagaggtgaggcggagggagcgtggagagcttcgcgctcggcggtttgaggccgccgcccgagcgtgccgcacggcttcgctcgcgctctccaatcgcaaggagtttgtcaccccacatcacggcgccgtcaactcgctccaggttgatttgacagaggggaggtacctgctctccggggcatcggatgggtcggccgctgtgttcgatgtgtggaacgcgactgaatacgaaaccgggttcatagcaaagcacaggaacatactgcttgtggacaagcaacaccagaatggccacaagttcgccatctcggcggccgtttggtatcctgtggatacggggctgtttgtcacagcatcctttgaccagtttgtcaaagtttgggatacaaattcgactcaagtcgtcatggaatttaagatgcctggaaaagtgtacactgcagccatgtctccaatcgcaacaacgcacgtgctcattgctactgggagtgcagatgttcaggtccgtctatgtgacattgcttctggagcctttacccacacgttgtctggtcatcgtgatggtatcatgtctttggagtggtctgcctcaagtgagtggattttgatgagtggtggctgtgacggggcaatacgtttttgggacattagaagagctggatgctttcgggttctggaccaatcaaggtctcaacttggaaaaaggccccttgttaaaagtgctctatataaggatcacacagattccttaggaccttcaccttccgcaaggagaaggacaggcatttctaagaagagttcatcagctttgcgcaaaattcaaaacccgacacatggacacatgcaacagagattgcatcctggtttgtcatctagtcaaaaccgtgctactgctcattatggtgctgttactggtttacgaacaactgcagatgggatgtaccttcttagctcaggatctgattctcgcttaagactatgggacatcgattcaggctgcaatacgctggtcaattttgaagctatgcgattgcagacaggcaagccattacaattagctgtcactgaggatccttcacttgtatttgttccatgtatggcaagcatcaaggcatacaatttatggtctggtaaaacatttcaaacattccgggggcactatgaacttgtgagttgctgctactatagtgaacaggaccaagaactttatactggcagcaacgacaggcaaattcttgtgtggtctccatcaactccagcttttactaaaatggaagatgatgacaagatcctttctgcagctgatgaggataactggagcgactgagaaaccctggagccgggaggagtgtgtcttgtatctactgacatcgatgttactgatgttaacaaataacatgtcgaggttgttaggtcttgttagcagcccctaaatgatgatattgtcttggtgtattttcaaaaatatgtacattaccatgtgaaaatttgacagatcattgaataatttgtagatttatctcaggaggatagagggatgtttgacgttcgccaaaatgttgtttagccctggagccttgttttcttcactgtgtattaatgctttacccaaaaataagaatttttctgagc

SEQ ID NO: 207194 - DNA, 3399 bp, Zea Mays
gcctgcaactctctcgtcccggcaaaggtcacaccttcctccctcgtccacatccgtgcctccagccaccggccgcctagggcggcgctcttgccaccggctgtcgagcccgccgaccttgccgccgtttccacgccgcctgacctgcccccacgacctgctgccgtcacgccatccgacctgccccaggacagcccaagcccccgcgaggccgcgacctgctggggaggagattgataggagaggtggtcggcggcgtggataccaacgacggagacatagtgattgccgcccgtcgtcccctgtttccgacacgctgaagcctcacgccacgagcgagcagagggccccaactgccagcagcaaccttaggcactggttgcttgaaggcaagcgcgtcgtatgttatccgttttctatcacattaccgtcgtaattatcatatccctctccccagttatccaagcattatgcagggacagaaactataaaacttctagcaatcttgttgacccaaacgatttgccttgtttcagttcttgatcttcttctttgccctcagctgaaaatgggagaagcaagggaaacattaggaaatcacaccaatcagcaaaacaattaaacccttgattgtgattttcagctgtgcaaatcttaattagatatctcagataatccatcaactagacaaacatacaaagtgaaccgaacaactctcaaacaatatgatatttcctaggcaactctcaaaggaaaaagtcacatagcaaatgacataatttagtacatgtaatgaattctgatgatgtatgccaagtttatcactagcgtacatgtctaaagctgactggcatccgcttgcttatacaaatccaaaatatgacattactacagtaaggcatcaccattcacaaacaagaaaatagtacctcgttgttgtggccacatttcttcttgcggcagttaacagccttggtgtgcaagcgagtatagcacctggatcagatatttgacatcaagcacttagactaccctaggttcatactgaatataagaatttccaatgcaaacacaatactatttacaaaactatctaggggggaaatcaaatggtcctttgtaataatgtttacgaacaaagcaaactaggtgcaagacagtaaacgtcaaaacacagacaaaacaagaaccagagaaacttgcagtgatcaaaagtctgaatgattggcaggccagacaaaatatatgcctcaaaagttaagctcgtaaggcgacttacacatctaattgattcatcattccagccaatcaactatgagcataggaaagcacaaatcccagaccaaactcaaaagatacttcaactgaacaaacaagttatactacctaattggttcatcacccctgccaatccactaaactgaatacaatgaaacaaagatagtggactgtcacaagtggttatatgttgcatattttaagacattcccggttgttgaaaatttaggagattagaccttcattagtatagatgcagatcattggtctcctcatacgagccaaattttcaagaaataccaacgaaggtgatggcacacaagttgatgcacacaatgataccacgcaagatgatgcacttgaagtaaccaaacattcggacgcgcataaaatcgccacgcacgcatcgctggttttgccgtcgcagagcagaaggcactccgggacggcagcgtgctctgcagacgctgaaggcaggatgtggctggaagaggtgaggcggagggagcgtggagagcttcgcgctcggcggtttgaggccgccgcccgagcgtgccgcacggcttcgctcgcgctctccaatcgcaaggagtttgtcaccccacatcacggcgccgtcaactcgctccaggttgatttgacagaggggaggtacctgctctccggggcatcggatgggtcggccgctgtgttcgatgtgtggaacgcgactgaatacgaaaccgggttcatagcaaagcacaggaacatactgcttgtggacaagcaacaccagaatggccacaagttcgccatctcggcggccgtttggtatcctgtggatacggggctgtttgtcacagcatcctttgaccagtttgtcaaagtttgggatacaaattcgactcaagtcgtcatggaatttaagatgcctggaaaagtgtacactgcagccatgtctccaatcgcaacaacgcacgtgctcattgctactgggagtgcagatgttcaggtccgtctatgtgacattgcttctggagcctttacccacacgttgtctggtcatcgtgatggtatcatgtctttggagtggtctgcctcaagtgagtggattttgatgagtggtggctgtgacggggcaatacgtttttgggacattagaagagctggatgctttcgggttctggaccaatcaaggtctcaacttggaaaaaggccccttgttaaaagtgctctatataaggatcacacagattccttaggaccttcaccttccgcaaggagaaggacaggcatttctaagaagagttcatcagctttgcgcaaaattcaaaacccgacacatggacacatgcaacagagattgcatcctggtttgtcatctagtcaaaaccgtgctactgctcattatggtgctgttactggtttacgaacaactgcagatgggatgtaccttcttagctcaggatctgattctcgcttaagactatgggacatcgattcaggctgcaatacgctggtcaattttgaagctatgcgattgcagacaggcaagccattacaattagctgtcactgaggatccttcacttgtatttgttccatgtatggcaagcatcaaggcatacaatttatggtctggtaaaacatttcaaacattccgggggcactatgaacttgtgagttgctgctactatagtgaacaggaccaagaactttatactggcagcaacgacaggcaaattcttgtgtggtctccatcaactccagcttttactaaaatggaagatgatgacaagatcctttctgcagctgatgaggataactggagcgactgagaaaccctggagccgggaggagtgtgtcttgtatctactgacatcgatgttactgatgttaacaaataacatgtcgaggttgttaggtcttgttagcagcccctaaatgatgatattgtcttggtgtattttcaaaaatatgtacattaccatgtgaaaatttgacagatcattgaataatttgtagatttatctcaggaggatagagggatgtttgacgttcgccaaaatgttgtttagccctggagccttgttttcttcactgtgtattaatgctttacccaaaaataagaatttttctgagc

SEQ ID NO: 207195 - DNA, 4203 bp, Zea Mays
gcctgcaactctctcgtcccggcaaaggtcacaccttcctccctcgtccacatccgtgcctccagccaccggccgcctagggcggcgctcttgccaccggctgtcgagcccgccgaccttgccgccgtttccacgccgcctgacctgcccccacgacctgctgccgtcacgccatccgacctgccccaggacagcccaagcccccgcgaggccgcgacctgctggggaggagattgataggagaggtggtcggcggcgtggataccaacgacggagacatagtgattgccgcccgtcgtcccctgtttccgacacgctgaagcctcacgccacgagcgagcagagggccccaactgccagcagcaaccttaggcactggttgcttgaaggcaagcgcgtcgtatgttatccgttttctatcacattaccgtcgtaattatcatatccctctccccagttatccaagcattatgcagggacagaaactataaaacttctagcaatcttgttgacccaaacgatttgccttgtttcagttcttgatcttcttctttgccctcagctgaaaatgggagaagcaagggaaacattaggaaatcacaccaatcagcaaaacaattaaacccttgattgtgattttcagctgtgcaaatcttaattagatatctcagataatccatcaactagacaaacatacaaagtgaaccgaacaactctcaaacaatatgatatttcctaggcaactctcaaaggaaaaagtcacatagcaaatgacataatttagtacatgtaatgaattctgatgatgtatgccaagtttatcactagcgtacatgtctaaagctgactggcatccgcttgcttatacaaatccaaaatatgacattactacagtaaggcatcaccattcacaaacaagaaaatagtacctcgttgttgtggccacatttcttcttgcggcagttaacagccttggtgtgcaagcgagtatagcacctggatcagatatttgacatcaagcacttagactaccctaggttcatactgaatataagaatttccaatgcaaacacaatactatttacaaaactatctaggggggaaatcaaatggtcctttgtaataatgtttacgaacaaagcaaactaggtgcaagacagtaaacgtcaaaacacagacaaaacaagaaccagagaaacttgcagtgatcaaaagtctgaatgattggcaggccagacaaaatatatgcctcaaaagttaagctcgtaaggcgacttacacatctaattgattcatcattccagccaatcaactatgagcataggaaagcacaaatcccagaccaaactcaaaagatacttcaactgaacaaacaagttatactacctaattggttcatcacccctgccaatccactaaactgaatacaatgaaacaaagatagtggactgtcacaagtggttatatgttgcatattttaagacattcccggttgttgaaaatttaggagattagaccttcattagtatagatgcagatcattggtctcctcatacgagccaaattttcaagaaataccaacgaaggtgatggcacacaagttgatgcacacaatgataccacgcaagatgatgcacttgaaggcaaggaagatgattgtttgtgctactatgccgctccataattttattcgtgagcattctagtggtgatgtgggctttgcaaattgtggttgagatcctgattttgtgcctactatcccaatttcccaaatagatacaataaataactgaataatcagtgtcaccacatgcctcagatcaatccacttctaaatcaagttttactacaatggatgcatttcgtgatagtatagcaacgactctcacttgtgtggaattagcaccaaatatttatgcaatattttgcaacatctatttgtagtgacttgtgtgaagagtgaagacaatgattatgtaatatgttactagtttattattgctgcaaggttgaatatttgaatttatttgaaaaaatcatatagtgatttatctttgttgtattgttgaatagtcaagttcatagcaaaaatagttgcataaagatcattattctcaataaaacaattagctaaaacaaccaaatgataggaaggtcattgcagcctcaaacttcacttttctagagttggatgcacctttctggtcaaacacagtcaaaactccagaggagagcagctccagtctggagttatagagcaaagctactctgaagtggagtggagccatacaaacacaccttagttggcgtagatttttgtgaatccgcttttggctagcgataacgtcttctgggtttccaaaggcttctactcgactcctctaggccttttgggacgtgaccttcatcttgtgcgacttgccaaacgaatccgtcacaatactgccgaatgcaatggaagcttcctaccataacagtcgacccttttcacaccggtcaacgcagtaaccaaacattcggacgcgcataaaatcgccacgcacgcatcgctggttttgccgtcgcagagcagaaggcactccgggacggcagcgtgctctgcagacgctgaaggcaggatgtggctggaagaggtgaggcggagggagcgtggagagcttcgcgctcggcggtttgaggccgccgcccgagcgtgccgcacggcttcgctcgcgctctccaatcgcaaggagtttgtcaccccacatcacggcgccgtcaactcgctccaggttgatttgacagaggggaggtacctgctctccggggcatcggatgggtcggccgctgtgttcgatgtgtggaacgcgactgaatacgaaaccgggttcatagcaaagcacaggaacatactgcttgtggacaagcaacaccagaatggccacaagttcgccatctcggcggccgtttggtatcctgtggatacggggctgtttgtcacagcatcctttgaccagtttgtcaaagtttgggatacaaattcgactcaagtcgtcatggaatttaagatgcctggaaaagtgtacactgcagccatgtctccaatcgcaacaacgcacgtgctcattgctactgggagtgcagatgttcagatggtatcatgtctttggagtggtctgcctcaagtgagtggattttgatgagtggtggctgtgacggggcaatacgtttttgggacattagaagagctggatgctttcgggttctggaccaatcaaggtctcaacttggaaaaaggccccttgttaaaagtgctctatataaggatcacacagattccttaggaccttcaccttccgcaaggagaaggacaggcatttctaagaagagttcatcagctttgcgcaaaattcaaaacccgacacatggacacatgcaacagagattgcatcctggtttgtcatctagtcaaaaccgtgctactgctcattatggtgctgttactggtttacgaacaactgcagatgggatgtaccttcttagctcaggatctgattctcgcttaagactatgggacatcgattcaggctgcaatacgctggtcaattttgaagctatgcgattgcagacaggcaagccattacaattagctgtcactgaggatccttcacttgtatttgttccatgtatggcaagcatcaaggcatacaatttatggtctggtaaaacatttcaaacattccgggggcactatgaacttgtgagttgctgctactatagtgaacaggaccaagaactttatactggcagcaacgacaggcaaattcttgtgtggtctccatcaactccagcttttactaaaatggaagatgatgacaagatcctttctgcagctgatgaggataactggagcgactgagaaaccctggagccgggaggagtgtgtcttgtatctactgacatcgatgttactgatgttaacaaataacatgtcgaggttgttaggtcttgttagcagcccctaaatgatgatattgtcttggtgtattttcaaaaatatgtacattaccatgtgaaaatttgacagatcattgaataatttgtagatttatctcaggaggatagagggatgtttgacgttcgccaaaatgttgtttagccctggagccttgttttcttcactgtgtattaatgctttacccaaaaataagaatttttctgagc

SEQ ID NO: 207196 - DNA, 4190 bp, Zea Mays
gcctgcaactctctcgtcccggcaaaggtcacaccttcctccctcgtccacatccgtgcctccagccaccggccgcctagggcggcgctcttgccaccggctgtcgagcccgccgaccttgccgccgtttccacgccgcctgacctgcccccacgacctgctgccgtcacgccatccgacctgccccaggacagcccaagcccccgcgaggccgcgacctgctggggaggagattgataggagaggtggtcggcggcgtggataccaacgacggagacatagtgattgccgcccgtcgtcccctgtttccgacacgctgaagcctcacgccacgagcgagcagagggccccaactgccagcagcaaccttaggcactggttgcttgaaggcaagcgcgtcgtatgttatccgttttctatcacattaccgtcgtaattatcatatccctctccccagttatccaagcattatgcagggacagaaactataaaacttctagcaatcttgttgacccaaacgatttgccttgtttcagttcttgatcttcttctttgccctcagctgaaaatgggagaagcaagggaaacattaggaaatcacaccaatcagcaaaacaattaaacccttgattgtgattttcagctgtgcaaatcttaattagatatctcagataatccatcaactagacaaacatacaaagtgaaccgaacaactctcaaacaatatgatatttcctaggcaactctcaaaggaaaaagtcacatagcaaatgacataatttagtacatgtaatgaattctgatgatgtatgccaagtttatcactagcgtacatgtctaaagctgactggcatccgcttgcttatacaaatccaaaatatgacattactacagtaaggcatcaccattcacaaacaagaaaatagtacctcgttgttgtggccacatttcttcttgcggcagttaacagccttggtgtgcaagcgagtatagcacctggatcagatatttgacatcaagcacttagactaccctaggttcatactgaatataagaatttccaatgcaaacacaatactatttacaaaactatctaggggggaaatcaaatggtcctttgtaataatgtttacgaacaaagcaaactaggtgcaagacagtaaacgtcaaaacacagacaaaacaagaaccagagaaacttgcagtgatcaaaagtctgaatgattggcaggccagacaaaatatatgcctcaaaagttaagctcgtaaggcgacttacacatctaattgattcatcattccagccaatcaactatgagcataggaaagcacaaatcccagaccaaactcaaaagatacttcaactgaacaaacaagttatactacctaattggttcatcacccctgccaatccactaaactgaatacaatgaaacaaagatagtggactgtcacaagtggttatatgttgcatattttaagacattcccggttgttgaaaatttaggagattagaccttcattagtatagatgcagatcattggtctcctcatacgagccaaattttcaagaaataccaacgaaggtgatggcacacaagttgatgcacacaatgataccacgcaagatgatgcacttgaaggcaaggaagatgattgtttgtgctactatgccgctccataattttattcgtgagcattctagtggtgatgtgggctttgcaaattgtggttgagatcctgattttgtgcctactatcccaatttcccaaatagatacaataaataactgaataatcagtgtcaccacatgcctcagatcaatccacttctaaatcaagttttactacaatggatgcatttcgtgatagtatagcaacgactctcacttgtgtggaattagcaccaaatatttatgcaatattttgcaacatctatttgtagtgacttgtgtgaagagtgaagacaatgattatgtaatatgttactagtttattattgctgcaaggttgaatatttgaatttatttgaaaaaatcatatagtgatttatctttgttgtattgttgaatagtcaagttcatagcaaaaatagttgcataaagatcattattctcaataaaacaattagctaaaacaaccaaatgataggaaggtcattgcagcctcaaacttcacttttctagagttggatgcacctttctggtcaaacacagtcaaaactccagaggagagcagctccagtctggagttatagagcaaagctactctgaagtggagtggagccatacaaacacaccttagttggcgtagatttttgtgaatccgcttttggctagcgataacgtcttctgggtttccaaaggcttctactcgactcctctaggccttttgggacgtgaccttcatcttgtgcgacttgccaaacgaatccgtcacaatactgccgaatgcaatggaagcttcctaccataacagtcgacccttttcacaccggtcaacgcagtaaccaaacattcggacgcgcataaaatcgccacgcacgcatcgctggttttgccgtcgcagagcagaaggcactccgggacggcagcgtgctctgcagacgctgaaggcaggatgtggctggaagaggtgaggcggagggagcgtggagagcttcgcgctcggcggtttgaggccgccgcccgagcgtgccgcacggcttcgctcgcgctctccaatcgcaaggagtttgtcaccccacatcacggcgccgtcaactcgctccagaggggaggtacctgctctccggggcatcggatgggtcggccgctgtgttcgatgtgtggaacgcgactgaatacgaaaccgggttcatagcaaagcacaggaacatactgcttgtggacaagcaacaccagaatggccacaagttcgccatctcggcggccgtttggtatcctgtggatacggggctgtttgtcacagcatcctttgaccagtttgtcaaagtttgggatacaaattcgactcaagtcgtcatggaatttaagatgcctggaaaagtgtacactgcagccatgtctccaatcgcaacaacgcacgtgctcattgctactgggagtgcagatgttcagatggtatcatgtctttggagtggtctgcctcaagtgagtggattttgatgagtggtggctgtgacggggcaatacgtttttgggacattagaagagctggatgctttcgggttctggaccaatcaaggtctcaacttggaaaaaggccccttgttaaaagtgctctatataaggatcacacagattccttaggaccttcaccttccgcaaggagaaggacaggcatttctaagaagagttcatcagctttgcgcaaaattcaaaacccgacacatggacacatgcaacagagattgcatcctggtttgtcatctagtcaaaaccgtgctactgctcattatggtgctgttactggtttacgaacaactgcagatgggatgtaccttcttagctcaggatctgattctcgcttaagactatgggacatcgattcaggctgcaatacgctggtcaattttgaagctatgcgattgcagacaggcaagccattacaattagctgtcactgaggatccttcacttgtatttgttccatgtatggcaagcatcaaggcatacaatttatggtctggtaaaacatttcaaacattccgggggcactatgaacttgtgagttgctgctactatagtgaacaggaccaagaactttatactggcagcaacgacaggcaaattcttgtgtggtctccatcaactccagcttttactaaaatggaagatgatgacaagatcctttctgcagctgatgaggataactggagcgactgagaaaccctggagccgggaggagtgtgtcttgtatctactgacatcgatgttactgatgttaacaaataacatgtcgaggttgttaggtcttgttagcagcccctaaatgatgatattgtcttggtgtattttcaaaaatatgtacattaccatgtgaaaatttgacagatcattgaataatttgtagatttatctcaggaggatagagggatgtttgacgttcgccaaaatgttgtttagccctggagccttgttttcttcactgtgtattaatgctttacccaaaaataagaatttttctgagc

SEQ ID NO: 207197 - DNA, 3100 bp, Zea Mays
atggagagcgcccacaagagcggaggcggaagcgcgcccggagcgggagccggaggggagggcgtcctgtgccacgcgtgcgggtaccagtacccgaacgggcacccgagcgccaagcagcggcgcgcgcaccggaagcactgcggcaagccggcgtccgccgcggcggcggcggagggctccggggagcacgaggccagcgagctgcttctagatccttcaggtaatggtgctgggcatcgagtcgttggagacacatctgctgaagattgcctcatcagtggcagtagcgttctttctgaaatcacatctgagtccagcaggactgatgatggtactctgactacagtggctacacagtactctgaaaaaggatcatctactgaggatggggatccatctgatccagcagttggttctgaacagatccaggacgttcctacgtctgttgttccagcagagcctgaagaccgtgctaaattcagttctgaaatctctgaatctgaaatacagaacccgagtattgtgcgtccggaatcagacgcagctggaggtggaacttctgaactgacggatgatgtagccagacagcaggatgaggttgccgtgactggggaagatgctgtgttcgacgccatagatggaagcaaatctagtgaaaggaattctgtgcaaggtgatgagcttaatctctcctgtcaagatatactacaaacggagactggtggggggcacagtagcactgtagtggaggaagattcaggtagcaaggatcctactgcaagtgacggccaagaaatcctgatcgaagaaactgaaccaaatcagcagagcaagcatgcgttaactggctcatttgagaaagtccctgacattgagtctgttgggtcttctgctgagaaatctgtcggtacagatcatccggcaatctccaaaggggcagacaattttgaaggacaacattatcatacaacagatgaaagcatcggagcaataccaagtacatttgaacctgctgttggtgccaaagttgtatcagttgatgtcactgctgaccttacagaggatgtttgttcgtctgacataacaatagatgacggcatgcaggaaaatgtgacaagtggtactattgtaccatctcaagttgatatactggattcgagtccttccgctacagcacatgaagtcaacattgtcggtagcataaacgatgatgacgaaaagagtcaggatggaaaaagcagtgcagatcttgcttcatacgaggtaaaagagatggttgtcaaggataactttgaagaaaagcagcagaccaaagaggtcattgtagatcccactccacatgaagccaacaactttcccagtaccgataatcacgaggaaaatgagcagaacaaagaaattgttgcagacaccacttcacacaagataagtgctgtacaaagcatgggtagtactgaagaaaaggaacatattgaagatttcattgcgaaactggcttctgaagagatcatttttacaagtaacagagatattgtcgagcagcaggatgagactgatatgaaaacaaactatgaaatagacagggcacgcaacttagaagctactgaagaaattgctgctggtggtgagagtaacacgggaaccatcacagatgttgttgaagacaaattccctaatgaagaaattactttaggcactatctctcttaacatggcagacagcagcgttaaggaggaaaagatgcatgacgaagaagtgaacgaggatctagattctcgtgatgatattatggtacatggtcctgataatgtcaaagagaagatgtgtgaggagaccatgtcaggtcccaccttagacaagttcagtttgcctacatctactgacagtcctgaagagggtaataaggacgaaagcacgcgtgcagaccctatgtcgcacgagaccaatgtggcgcaaaccagcgatggtgctgatgaagagaagaagatcagggagcttgctgttgaccctacttccagcattggtaccatgggcaacataggcaacgctgaagacaagaagccgagtgaagaaactacaacagatcctagacctgttgagaacaccacaacacaaggcacagaggacgcgacagatcctaaacctgttgagaacaccacaccacaaggcacagaagacgcggatagcagcaagcagaatgaaaacactgcgagcgtaggtggcgttgaaggcaagaagcagggtgaagaaactacagcggatcctagatccgtcgaaaacaccacagttgaaggcaagaagcagggtgaagaaactacagcggatcctagatccgtcgaaaacaccacagcacagggcacagaggatgcagaaagcagcaagcagaatgagaacacaaatgtcatggaagaagaaagggtgacggtggaagatacaacctcaagggagatcagcgccatagaaagcacagatgacctgaagggcaaggctaccaacgagaacgaagagatagccgacaaggaaatggtcaccgactcagacaagaaccatgtctcgctgaaggtcctcctcgcggacaagaacgtggaagcgaaagagaaggagaagaaggcgactagcgccaaggaccgggtgctgtcgttcaggcgccgggtatccaaggacaacgtgtcgccgccggtgaagccaggctcgccaaccaaagacaaagatggctcagggcagcaggactggaactccccggccaggttgcccgtcgagaagaaacccaaggggaggaaacagcaatgggtaccgtttatttgctgctcgtcggtacagtaatccgtttgccagcatcagcttggggcatccattgttgtgtttgtacttgtacgctgatggtagtagattgagtaggaccttcgttccaggattggaccttggcagctttgctactctacttggattgtgaacccggctctgccgtttttgtatgttataaatatctgccttgatggaggggaggagggtatgccccaaactctggtaaagtaggaaggttatgataggactgacgagttaacttttaaacctagctattttaattaaaatgaaa

SEQ ID NO: 207198 - DNA, 3434 bp, Zea Mays
gcgcctccgtcgccttcgtcttctccaatctccacacacactcccactgcgcaaagcgagcgggcgggcgggcaaccaaccaaccaaccccactcgcctccctctccctcgccgttgccgccgagcaccgcgccgcggggtccccgtcgccatggagagcgcccacaagagcggaggcggaagcgcgcccggagcgggagccggaggggagggcgtcctgtgccacgcgtgcgggtaccagtacccgaacgggcacccgagcgccaagcagcggcgcgcgcaccggaagcactgcggcaagccggcgtccgccgcggcggcggcggagggctccggggagcacgaggccagcgagctgcttctaggtgaggtcggagccggcgcggcggaatgcggcggcggttcgcctggatctgcgcacgagcacggggacgcggcggagggaggggacagcgcaggtaatggtgctgggcatcgagtcgttggagacacatctgctgaagattgcctcatcagtggcagtagcgttctttctgaaatcacatctgagtccagcaggactgatgatggtactctgactacagtggctacacagtactctgaaaaaggatcatctactgaggatggggatccatctgatccagcagttggttctgaacagatccaggacgttcctacgtctgttgttccagcagagcctgaagaccgtgctaaattcagttctgaaatctctgaatctgaaatacagaacccgagtattgtgcgtccggaatcagacgcagctggaggtggaacttctgaactgacggatgatgtagccagacagcaggatgaggttgccgtgactggggaagatgctgtgttcgacgccatagatggaagcaaatctagtgaaaggaattctgtgcaaggtgatgagcttaatctctcctgtcaagatatactacaaacggagactggtggggggcacagtagcactgtagtggaggaagattcaggtagcaaggatcctactgcaagtgacggccaagaaatcctgatcgaagaaactgaaccaaatcagcagagcaagcatgcgttaactggctcatttgagaaagtccctgacattgagtctgttgggtcttctgctgagaaatctgtcggtacaggtgatgacttgcttcaatctggtaaaggtgcttgccactcagaaataccagtcgatatcatagctcagctgcaacttgaccctacctctggaacggcagatcatccggcaatctccaaaggggcagacaattttgaaggacaacattatcatacaacagatgaaagcatcggagcaataccaagtacatttgaacctgctgttggtgccaaagttgtatcagttgatgtcactgctgaccttacagaggatgtttgttcgtctgacataacaatagatgacggcatgcaggaaaatgtgacaagtggtactattgtaccatctcaagttgatatactggattcgagtccttccgctacagcacatgaagtcaacattgtcggtagcataaacgatgatgacgaaaagagtcaggatggaaaaagcagtgcagatcttgcttcatacgaggtaaaagagatggttgtcaaggataactttgaagaaaagcagcagaccaaagaggtcattgtagatcccactccacatgaagccaacaactttcccagtaccgataatcacgaggaaaatgagcagaacaaagaaattgttgcagacaccacttcacacaagataagtgctgtacaaagcatgggtagtactgaagaaaaggaacatattgaagatttcattgcgaaactggcttctgaagagatcatttttacaagtaacagagatattgtcgagcagcaggatgagactgatatgaaaacaaactatgaaatagacagggcacgcaacttagaagctactgaagaaattgctgctggtggtgagagtaacacgggaaccatcacagatgttgttgaagacaaattccctaatgaagaaattactttaggcactatctctcttaacatggcagacagcagcgttaaggaggaaaagatgcatgacgaagaagtgaacgaggatctagattctcgtgatgatattatggtacatggtcctgataatgtcaaagagaagatgtgtgaggagaccatgtcaggtcccaccttagacaagttcagtttgcctacatctactgacagtcctgaagagggtaataaggacgaaagcacgcgtgcagaccctatgtcgcacgagaccaatgtggcgcaaaccagcgatggtgctgatgaagagaagaagatcagggagcttgctgttgaccctacttccagcattggtaccatgggcaacataggcaacgctgaagacaagaagccgagtgaagaaactacaacagatcctagacctgttgagaacaccacaacacaaggcacagaggacgcgacagatcctaaacctgttgagaacaccacaccacaaggcacagaagacgcggatagcagcaagcagaatgaaaacactgcgagcgtaggtggcgttgaaggcaagaagcagggtgaagaaactacagcggatcctagatccgtcgaaaacaccacagttgaaggcaagaagcagggtgaagaaactacagcggatcctagatccgtcgaaaacaccacagcacagggcacagaggatgcagaaagcagcaagcagaatgagaacacaaatgtcatggaagaagaaagggtgacggtggaagatacaacctcaagggagatcagcgccatagaaagcacagatgacctgaagggcaaggctaccaacgagaacgaagagatagccgacaaggaaatggtcaccgactcagacaagaaccatgtctcgctgaaggtcctcctcgcggacaagaacgtggaagcgaaagagaaggagaagaaggcgactagcgccaaggaccgggtgctgtcgttcaggcgccgggtatccaaggacaacgtgtcgccgccggtgaagccaggctcgccaaccaaagacaaagatggctcagggcagcaggactggaactccccggccaggttgcccgtcgagaagaaacccaaggggaggaaacagcaatgggtaccgtttatttgctgctcgtcggtacagtaatccgtttgccagcatcagcttggggcatccattgttgtgtttgtacttgtacgctgatggtagtagattgagtaggaccttcgttccaggattggaccttggcagctttgctactctacttggattgtgaacccggctctgccgtttttgtatgttataaatatctgccttgatggaggggaggagggtatgccccaaactctggtaaagtaggaaggttatgataggactgacgagttaacttttaaacctagctattttaattaaaatgaaa

SEQ ID NO: 207199 - DNA, 1970 bp, Zea Mays
atcaagcagcaggacaatttgaaacagaatagaccggcatttagactcaatcatgttaccagtttcaaaacaaaacgaacacagcacgacacaaacatgtttccaacattccagacaaactaaaaggatcaccaccacaggcaacttgatcaactaaacgatgcatatatcctacttaacagtattgcagtaacatcgatacagataatagcataagtcttcagcaagttgccatcagtgaggaaactagtggggaataaaacacaaagccatagctagatctacttctccgatgagttggggccgcgcttcttgccgaatccaacaacggcggtgacgaagcggcggttgtattgcatgcgcttgtgagcgcggccgcggggcttcttcttcttgtcctgctttgcaaccttgggcgtctgcccgcgcaccttcccagcgcgggccagcgatccgtgaaccttacctgcgccagaagcagatagatcaatctgagtaaacggctattggaaggatgcacgcaaagtagagatagagacgaggacaaggatatcgttacccatggcggcggcggcgaaggtgctgtgttgctggaggatctgacgagcgactcgggatgttgcggcggcggggctgtccgaacggtgccctagacgggtgggagaatttataaacgccacgctttactgggccggctgttttgaggcacatgcacatgtaaaatgcccaggccccgctaacagcccagtaactactaactagccatatccgcgagagaaacccctcgatagcccgcagcattgcggcgcgcgagcacaccgaaccacccacctcggcggcggcggcggcttttctgcctgcgaagagagaaaccaaggagaggggcaactcggaagagggcgaggatgcctcggccggagttccaggcgccgccggatgtgttctacaacgagtcggaggcccgcaatctaggatttccgagagggcgctggagttgcttgctctccccaacgatggcgtccccaagctacttctcgacataggatgtggttctggacttagtggtgagacattgacggagcatggccaccactggattggctacgatatttcaaagtctatgctcgatgttgccttggagcgtgaaacggaaggagacctcctacttgcagatatggggcagggcttgggcttgcggccaggagttattgatggtgcaattagtatttcagcaattcagtggttatgcaatgctgacaagtcttctcacgatccaagattgcggttaaaggctttcttcggttcattatatagatgcctagcaaggggagcaagagctgttctacagttttatgctgataatgtgaagcagagtgaaatgattgtgacttttgccatgcgtgctggttttgctggtggagtggttgttgactggcctcatagttactacatcacttccaaagggtaaaggtgaaaatggtgaggggtgcagcgacgatgacgataatgagagcagtggcgaagatggtgacagaacagtgggaatatatgaaaggaataggccgaagaagcggcagaaaacgaaaaagaatggcaaaggcaaggattggctcctgaggaaaaaggagcagatgagaagaagaggacatgatgtgcccgccgacacgaagtacaccgggcgtaagcggaaaggctatttctagctctgtgcaatgcccccttgcctgcaatgctggctgttcagttatgatgctagttcatttagcagaagcagaaggatttttgtaaagggtgaagcgaggagttgtactggtattcgggagtcattgcatttttagacaacgatgtgaaactgtcatttttgtagaacgtggatgttgagatgaatacagttggtttgcgtgaatctgtatcagatcgctggtgacgcccagactttggctaaaagaaacgcagttcatgtgtcaagt

SEQ ID NO: 207200 - DNA, 1817 bp, Zea Mays
caccaaaccaaacgaaatccttgtggaccagacagcacgggaatggcgtggagttgtttgtggccaactcagcttgcctctacaaactaccagacttctccagacggatttccctccaaaagccgcacagcagcaaccgccggcgcgcgcacctcacttccatgatccatcgcagaggagagcagcagccagacgtcgcggcgtgaccgtgactccgtgagagcgcgcccgctgcactgcactgcatctgaatgaggagctgggcgagggcggcgctgggcgtcgcggagctgctcgtcagcgcggccatccacctgggctacgccttctacatcttcggcaccgcggtcgccgccgacgtctcagcctccctcgtgaagggcctgatggccggcggcggcgtggccaaggacgtcgccgtcgatggtgaggacgaggccgcggcggtgctcgacgacggggccgtgccgcccatcgtgctggtgcacggcatcttcggcttcggcaaaggcaggctgggcgggctgtcgtacttcgccggcgcggagaagaaggacgaccgggtgctggtgccggacctgggctcgctcaccagcgtccacgacaggcgggcaggtggactacggcgaggagcacagccgggagtacgggcactcgcggttcggtcggacgtacgcgcgaggccactaccccgcgtgggacgaggagcacccggtgcacctggtgggccactcggccggcgctcaggtgatccggctgctgcagcagatgctccacgaccgggagttcgaggggcacggcgacacctcggagcgctgggtgctgagcgtcacctccctctccggcgcgctgaacggcaccacgcgcgcctacatcgacgggatgcgcgccgagaaagaaggcggcgggcggtggctgcgccccgtctgcctcctccagatctgccgcgtcggcagcgtgctctaccactggctggacctcccctggctgaagcgctactacgacttcggcttcgaccacttcggcatgtcgcggcgcgtcgtgggcgtggcggggctcgcggagatcctgctcgacgccggcagcggcggcgggcggcgggggcccttcgccacgggggactggatcctgccggacctcaccatccagggcgccgcccggatcaacgccagggtgcgcacgttcccggccaccttctacttcagctacgccagccggcgcaccgccaggtcgccgccaggcagcgccggcgccacggtgccgtccggggtgacgaggatccacccgctgctcttcatccgcgtcctgcagatgtgccgctggcgctaccccgccggcgctgacccgccgtaccaggggtacagggacgaggactgggaggacaacgacggcgcgctcaacaccttctccatgacccacccgaggatccccgtcgagcatcccagcgtccaggtggagaaggatgaggattgccgtccgctgcgcccggggatctggtactacaagatcgtggaggcggaccacatgacgttcgtcatcaaccggcggcgaggaggcgtgcagttcgacctcgtctacgacagcatcttcgacaactgccggaaacatgtcttccggactgccccgccgccgacgctaccggtccagagctgattccacaccaacgacgtccgcgagaggccgtacaccattattccagcggtcgttccgactgattgacattatttgtgaatatatcgtttgttattactgtctaacttccgctgccgcctgaaattaacaagcctactcaatgagtataataaccccatcaaaat

SEQ ID NO: 207201 - DNA, 2245 bp, Zea Mays
ccgcgctcttcttcttgtgttgcctgtcgcctcggggcggttgaaaattaaccgaagcggacaccgcgacgaggccgcggcggacacacagccggaccggacaccagcgccagcgtagcggcagcggcacgcccgaggaagcaagcaagccactacgcccctgcgtcgtcgcgtcggtgcccaaggggcagccgccgggagggagggaggggcatcgaagcggaggccacggcggtcgggatggtggtggcgagaaaaccgcagcagcagcccgcaggcgtcgcccgccggcgcggtggcggcgtcagggtggggcccgcgaggctcgagggcctccccgcggcgtgggcgggcgccgccgccgccgccgtcaaggtcaagtggcccgcgcccgggggcgcgctgtcgcagatgctgacggggcggtgggcgcgcggggtgaccgccgtcgaggccgtcggcgccggcgggaccgtccgctgggagccgcgcgacggcaaccggttcaggctcgacgacgtcgtcggccccgccggccggccggagcgcggggtcttcttctccgtcctctatggattccaagaacaaggccggggcaacaaggagctggtgaggctggaggagatcgggacagccatgataagcctggaggagtgctgctgggagatgcagctgcagcagcacgaccaccagctggtggctgtccccgtcagggtcaggaaggacggatgggcaagcgatgccatgctttatgtggacgtggagctcgtggacgcgaacacacgcccggacgtcgatagggcagtctcgttcagggagaagccgagaacgtacatggcgcctccgccgacaatgcgaggtagccgcaagagcttggagtcagcgacgtgccatgatgtccttgacctgaagcagctgcttgatctggctgagaaggaaggccgggtggccgtgtatggcaacataaggagctccgacaccagcagcgtgagcagcactagcagcagcagcagcacgattagcgtcagcagtgctagcaccagcggcggcgcgagcccggaaccggcctcgacgtcgaagcgccggttcctgccatggacgaggaggagcagggacttcgacaagaggaccgccgagtcgctctcccaagaactgcccacaaagtgcacggacgacggtccgggtccggccggcggctgggagacgcgcgagttcacgagcagggacgccgagacgaggctgaggacgccggtgttcttcgcgtccatcgaccagcgcgacggcagcgctgggggggagggcgcgtgcgcggcgctcgccgccgtcctcgcggcggcgctccacgccggccacccggcgatgcccacccgcccggagctggacgcgctcatccgggacggctcgtcggagtggaggcggctctgcgacgacgaggcgcgcgcggcgcggttccccaaccggcacctcgacctggacaccgtgctggcgtcccgggcgtggcccatcgcggtgcggcacgacagggccttcgtcggcttcttccagccggagagcttcgcgtcgctgtccggcgccatgtcgttcgacgacatctggcgcgagatcgccggcggcggcggacgtgggcgcgggccgggcggccgcgcggacgtgtacatcgtcagctggaacgaccacttcttcgcgctcaaggtggagagcgactgctactacgtcgtcgacacgctcggcgagaggctgcacgagggctgcgacaaggcctacatgctgaggttcgacggctcgtcggagatgcgggccgaaggcaccgaagaggtggtcgtcgccgggaaggaatgctgcagggagttcatcaagaggttcctggccgccatcccgctgagggaggagctggagatcgagaaaaagggcggcagcggcatcgacggtggcggcgcgccgcaccagcggctgcagatcgagttccacttcacagcctttacaagacgacaatagatgatgagttggcgatccgacagcagttgggggatgttccttcctcctccctgatcacagcatcatactaaccttgtgtaaattcgtctgtatatctgtatacagtttacaagataaaaatttacagggtaggatttggttctcgtttcacaattttagataggaaacaaaacatgaagaggaataccattttgtaagcgagctcagtattacatgattttgcttctgttgaatgatgactcaggcaggc

SEQ ID NO: 207202 - DNA, 539 bp, Zea Mays
gttgccgccgccgccggtccttcgtcacagatcgacatcgtccacacagcacgccctgtctgtcacacggcggtgtcgtcgtcgcggattattccttcatccagcgacatcatctggcgtgtgcatccatccgcttctccgttttctacgggacgattcctgcccctgcagcaccaatttgatgcagcctcacgtagtcacgtgattggcggtctccaagaaacccacgagaaggccacggatttctcaggatcaggaagaaaattgattttccgctcctttgctacgttcacttattatcagattattcagacgaagtttgttcttaatcagttatgtgtttgaaagattggtacaaacgcgacctgctgatatggctgataataaatgagagggtcttgatataaaagctttatccgccttacagctcagtttatctcctgatgtttttgtgtgaagtaatgaatgcaaaatctacggcagaattgtggaagaaattggagaaactacatatggaccagagtcttgctaataagttt

SEQ ID NO: 207203 - DNA, 4320 bp, Zea Mays
gtccgatttgataagccgcagagtttcccactgttcgagctccgcccgcccgttctaaaaccctagatctctctcccctcacccccgtccctcgacccgccgccgagtcgccggaggaggcgggggcctcgccgcagaagccatgtacctctacagcctgacgctacagcgcgcgacgggcgcggtgtgcgccgtcatcggcagcttcagcgggcgggactcgaagaagtccgccgcctccgggtccggctccacgcaagagatcgccgtggcccggggcagcacgctcgacctcctccgcccggacccggagacgggccgcctccgcacgctcctctccgtcgacgtcttcggcgccatccgctcgctcgcgcagttccgcctcaccggcgccaacaaggattacctcgtcgtcggctccgactcgggccgcctcgtcatcctcgagtactcccccgaccgcaaccgcctcgacaaggtccaccaggagacctttggcaagtcgggctgccgccgtatcgtccccggccagctcctcgccgtcgacccaaagggccgcgcgctctgcatcgccgcgctcgagaagcagaagctcgtctacgtcctcaatcgcgacgccgccgcgcgcctcaccatctcgtccccgctcgaggcgcacaagtccaacactctcaccttcgccctcgccgcgctcgactgtgggttcgacaaccccgtcttcgccgccatcgagctcgagtacgccgagtctgaccgcgaccccacggggcaggccgccaaccaggcgcagaagctcctcaccttctacgagcttgacctggggctcaaccatgtctcccgcaaggtctctgagccgattgataatggtgccaatcttctcgtgactgtaccgggtggtggtgacggtcccagcggtgttctcgtgtgctgtgataacttcgtgctgtaccggaaccagggccacccagagattcgtgctgttattccacgccgtgctgacctccctgctgagcgtggcgtcctcattgtcgcagccgccacacacaaacaaaagagtatgttcttcttcctgctacagactgagtatggtgacatattcaaggttgacctcgatcataatggggatgctgttagtgagctcaggatcaagtactttgacaccataccagtgacatcggctgtctgtgtgctgcgctccggtttcctctttgctgcttctgagtttggcaaccatgcactttaccagttccgtgatattggtagagaagccgatgttgagtcatcttctgcaacactgatggagacagaggagggattccagccagttttctttcagccaagggcactgaagaacctcatgcgcatagatgagattgagagcctcatgccagtcatggacatgcgtgtcgcgaatttattcgatgaggaaacaccccagttgttcactgcctgtggccgtggtccacgctccacgttgcgcatcctgaggcctggccttgccatcagtgagatggcccgatcaatgctgcctgctgagcctattgctgtgtggactgtcaagaagaacatcaatgacatgtttgatgcttacattgtagtgtcctttactaatgtcacgcttgtgctctctattggtgagactattgaagaagtcagcgacagccagttcctggacacgactcactcccttgcagtcacgctccttggtgaggactctctaatgcaggtccatccaaatggcatcaggcacatcagggaagatggccgtgtcaatgagtggaggacgcctggaaagaaaactattacgaaggttggatcaaaccgtctccaggtggtaattgctcttagtggtggagagctcatctattttgagatggatatgactggtcagctcatggaggtagagaagcaggacatgtctggtgatgttgcgtgcctggccattgcaccggtccctgaggggaggcaaaggtccagatttcttgccgtaggatcctatgataacaccattcgtatcctctcattggatcctgatgattgcctgcagcctctaagcgtccagagtgtatcatcggcaccagagtcactcctattcttggaggtccaggcatcagttggtggtgaggatggtgcagattatccagccaaccttttcctcaatgctggtttgcagaatggtgttcttttccgtaccaacgtcgacatggttacgggtcagctatctgacacacgttctcgattcctaggcctgagacctccaaagctgttcccttgtatagttagccacaggcaagcaatgctctgcctgtccagccgtccttggctgggttacatacatcaaggccattttctcttgacaccactgtcctgtgatacactcgaatctgcagcatcattttcttctgatcagtgttcagaaggtgtagttgctgttgcgggagatgccttacgtattttcaccattgaacgcctgggagagactttcaatgagacggcaatccctctgcggtacaccccaaggaagtttgtgattctaccaaagaaaaaatacattgctgtcattgagagtgacaaaggtgcattcagcgcagaagagcgagaagctgctaagaaagagtgccttgatgcttctggtgcagcggagaatggaaatgcgaataatggcgatcctatggagaatggtgatggtcaagatggtgccgaggagggcaacacatttcctgatgaacaatatggttatccaaaagctgaatctgagaggtgggtttcctgcattaggatcttggatccaaggagtagggacacaacctgtctgctggaattgcaggacaatgaggctgctgtcagtatctgcactgtgaatttccatgataaggagcatggaactctactggctattggcactgccaagggtttgcagttctggccaaggaggacccttgctggtggattcatccacgtatataagtttgtggatgaagggaggtcacttgaacttctacacaagacacaggtggaggaagtacctcttgcattgtgccaattccaggggcgattacttgcaggtgttggttcagtgctcagactatatgatctgggtaaaagaaaattgctcagaaaatgtgaaaacaagctttttccgaggacattagtatctattcatacctaccgtgatagaatctatgttggcgatatgcaagagtcatttcactattgcaagtacagacgagatgaaaaccaactctatatatttgctgatgacagtgttcccaggtggcttacaacagcacaacacatagattttgacactatggctggagcagataagtttgggaatatatattttgctcgtcttcctcaggatatctcagatgagattgaagaagacccaactggaggcaagattaagtgggagcaagggaagttaaatggtgcccctaacaaagttgaggagattgtgcagtttcatgtgggtgatgttgtaacgtgtttgcagaaggcctctttgattcctggtggaggtgaatgtcttatttatgggactgtgatgggcagtgtgggagcactgcttgcatttacctccagggaagatgttgatttcttctctcacttggagatgcatctgcgtcaggagcatccaccattgtgtggaagagatcacatggcttacagatctgcctattttccagtgaagatggtgatctctgcgagcagtatccctccctcccagctgatatgcagaggaagattgctgatgagctggacagaactccgggtgaaatcctgaagaagctagaagacatcaggaacaaaatcatctaaaacagcggcttagtgtgaagaaactaggcagggcagtgccggtgctctttgctttaagactgtatccagttcgagctgttgccgcacttcaagatgtgacagcagcgcatccaacaagtttggagcacgctgatctgtacgatctttcctgatgctatctggtccagtcggcgatttattgctgagatagagcatgtacggcaccagaatgagtttttttgtatctcgtagaagtgatttagctgatgtcgttgactgtttacttggcttgatgtaattgagtgaagttattcatgttggattattcgtgtagtacggggttaccttggtaatgtactaccacaagggcttggttgctaggaagggaattggagggttccaattaagccttcaatcctctctaatttcctcccaaacaagccctaacagatttttgaagcgcagatgcgttgctgtcattgccttttcagattgttcagctgatggaatcctcagttg

SEQ ID NO: 207204 - DNA, 767 bp, Zea Mays
cctaacaagtagagccggctcatatgcagccctacctcaagcctcagtccaatccgcggcccaaaaactccccccgacaaccgaacaggagcggcggcggcggcggcactaccctctccagcaatcggcatgggcacgcgggaggtgtacgaggagaagctccgcagcgggaaagagggactgggccatcacctccgtcctgcacgacgccactgccgtggctggttccggtgccggcgctttgctcagtgctgtgcacgggtttaacacagggatcccttttgtccagaagcatgtcaaggggccgaagtggctgcagttgctcgttggggtgccaccactgctgatattctcaggtgccagtgctgtatttggtgcatatgcacttccaaggtttgttcagctgacagtgacgtcttactacgcggcatcaactggctcgcagtatgctgtttcacatatcacacggcagatcgaaagagctcattttccagaatcagcccaggaatctgagtgagttggttggcattcagtctgttctattgggggtgcaatgtacatggtatagaaggacgtttagtgctgcttttgccgtgttgcagtacagtattagttttactgtgtttcagacagcacgcagtgaataaaattatattgtctttggtctaattgtctgtattcaggtcttcggttgaaaatgtttttttttcacttagccccgtttgaatctttgagatggaattcattttgataactatagtttagat

SEQ ID NO: 207205 - DNA, 767 bp, Zea Mays
cctaacaagtagagccggctcatatgcagccctacctcaagcctcagtccaatccgcggcccaaaaactccccccgacaaccgaacaggagcggcggcggcggcggcactaccctctccagcaatcggcatgggcacgcgggaggtgtacgaggagaagctccgcagcggtgcgcacctccaccgcgatcccaccatcaacccaggcctcggctcgccccggtgcccgcgatgcctctccctcctcaaccccaccgcgggaaagagggactgggccatcacctccgtcctgcacgacgccactgccgtggctggttccggtgccggcgctttgctcagtgctgtgcacgggtttaacacagggatcccttttgtccagaagcatgtcaaggggccgaagtggctgcagttgctcgttggggtgccaccactgctgatattctcagtatgctgtttcacatatcacacggcagatcgaaagagctcattttccagaatcagcccaggaatctgagtgagttggttggcattcagtctgttctattgggggtgcaatgtacatggtatagaaggacgtttagtgctgcttttgccgtgttgcagtacagtattagttttactgtgtttcagacagcacgcagtgaataaaattatattgtctttggtctaattgtctgtattcaggtcttcggttgaaaatgtttttttttcacttagccccgtttgaatctttgagatggaattcattttgataactatagtttagat

SEQ ID NO: 207206 - DNA, 1146 bp, Zea Mays
aacccaatcgtctctccaccacccaactcctcctgcctgtgctctcctcctttttctccactccgcttttgcttggttccatcgggccggagaggagaagctagctaactagcagcagctctgttggtgtgtgtgtgtgtggagggtagctgcagctggggctagctggaaaggtcgggagccatggggaggggccgggtggagctgaagcggatcgagaacaagatcaaccgccaggtcaccttcgccaagcgccgcaacggcctgctcaagaaggcgtacgagctctccgtgctctgcgacgccgaagtcgcgctcatcgtcttctccaaccgcggcaagctatacgagttctgtagcggaccgagcatcacgagaacacttgagaggtacgaaaaaaacagttatgcaggcccagatactgctgtacagaacaaagagaacgagttagtccagaacagccgcaatgagtaccttaaactgaaagcaaaggtggataatttacagaggactcagaggaatttgcttggtgaagatctgggttcacttggtgtcaaagagcttgatcagcttgagaagcaaattgattcatccttaagtcacataagatccacaaggacacagcatatgcttgatcagctcactgatcttcagaggaggctggaggagaccagcaaccaggtgcatggccaagtgtgggagcacggtgccaacttattactcggctacgagcggcactcttcaccacagcaagccccatcacatgttggcaatggattattctttcatcccctggaagctgcagcagagccaaccctgcagatcgggttcgctcccgagcatatgaataatttcatgccggcatggctaccctgaagatggatctttgaggcaaagggaataaataaagatgcgatgcatgtcagaatcatattgtactgcaagagtgacaattgtgtgttccactcacatatatgacctagttttgtgtgtctatatgtcgaaaccatatgtctgtgattttattatatgtaatgtaagcacagatgaaacatgcagggctagttgcttttgcttgtctatgtatctgtatctggctgtgcgccactggatatgcgtcctagaacaccgcctccaggcttcaat

SEQ ID NO: 207207 - DNA, 887 bp, Zea Mays
gccgccagctgcggcgagttcgccggctcccaagtggcgttactcagtgtcggagtcggacccagcatccgcgatgaagaacatcaattccaagaatgtgaaggcgaccacaacggtaaaagaccttcaagtctactgtccagccagcgtacagatacggatgccttttcggctcctccaagcgacgggagagttctggaggttgcgacgaggagcctccgtcacactcgacgaaagccaaagcaagtgtagccgcaaggatgcgctgatgcgccgtctgctgctgctggtggctggttccaccctggcgtcgcggctgcgggcgtcttccaagtgcgccacaagttccccgccggagttgaagggggcgccggtgccaacaccaacgcccttcgtgcccacgacggccgccgccacagctgtcgacctcccgctcggcggcctcgacctccccactaacacaagggcgccaatcactcaacacgaaccagcggcggtgctctctgcacaggggcggacggtccgcggccaggggccggacggtccacggcctggcgcgaggttagggttcctgcctgacggccggcggtccacgcgtgcgcaggggcggcggaagatcgccggcagcgcctggatctcgctcccgggagggaccccgtcggggaggagagatcctaggtgatgtctaggctcgggcagaccgacctagactcctctaatcgacatagagtcgaatagaagcggagaatttggggattgagaggctaaactagaattagactagaattactcctaattgtacaagaaataaatacgaaatacaagtgttgttgattcgattgataattccaaaatcggcagtatatctctctatttatagaggaggg

SEQ ID NO: 207208 - DNA, 1639 bp, Zea Mays
ggctcgtccgccatgtaggctaccatgctaaaattcctcccccgagccgcgggtacagtggtacaccgcgccgtcccgcgggccgcggggacaccagcctctccactgcgctctgcgctccaggcccctctctggcctctgcgaaatgccgctcttcccctccaccgccgtggcgctgccccgcctcagcatcccattcccattccctctccaccacagccccatcccccttcccctcctgctccgccgccaccactcctcgccccacccgcgccttctccccttggcggcgtccctcccgcccccacctcccgaggagctgctccacagtcaggccacgggtctcgtcgctgcctcacaggccaacttcatgcgcgtcatcgtggacgccacggccccggggctggaccaccaccgcggctccgacctgctctgcgtcgtccgcgcgctgctcaagaagatccgccgccgcgtgctcgtcggtgaccgcgtcctcgtcggggcggtcgactggaccgatcgccgcgggatgatcgaggatgtcttcgagcggagatccgaggttgtcgacccgcctgtcgccaacgtcgaccgccttgtcgtgctcttctcgctcgaccagccgaagcccgagccggccacgctcacccggttcctcgtcgaggccgagtcttcaggaattccgtttgtgctcgtcttcaacaaggtcgagctcgtcgacgagcagacaatagcatactgggaagataggttgaggagttggggctatgatccactgtttctaagtgttgataagcaatcaggatttactgctcttgaagagatgttggaaggacaaacaactgtagttgttggtccaagcggcgttgggaagtccagcctgatcaatgcactgaggtgtaaccaggacatatcagaagaagatccaatacataaactagttgaacagaatagtaaatggtttggtgaacagcgtgttggaactgtgtccaagaaaagtggtaaaggaaagcacacaacgcgccatgtctcgttgcttcctatagctagcggaggcttccttgctgatactcctggatttaaccagcctagtttgatgaaagtgacaaaaaagagtcttgcagaaacatttcctgagataagaaaagcgctgaaagagaacgagcccaaaaaatgcttatttaatgattgtgttcacctgggtgagcatggatgtgctgtgaagggggactgggaaaggtatccatactatctccagatgcttgatgagatcaaaattagagaagaaatccagctacggacatttggaacaaaaagagaaggtgatgtcaggtacaaaacaggtgtcatgggggtgaagcaagcagagcctcgtcttgaactcaagaagcacaggagggtgtctagaaagaagattaaccaatcgattcttgacgaaatcgaagatgatgttgatgacctcgatgatgactaccagtttgacgtcaagcagcgttctaggaaatgataatcttttttcatctgatgatctaacggcatgaaggaacctttgggtgctgtacacagttggttttgtagtgccaccaccatgcccttgagcagtatgctgatcactgactaatgtcgaaggtaggcttcg

SEQ ID NO: 207209 - DNA, 1132 bp, Zea Mays
cctgtctttagggcgtgtttggcatgattctgctccatctcagagcaattatattctaaaactctagattgtttttttaagtttttgaggagcaaaagaggtactgcgcctccgaaaacttgaccacgagatggaacccgccgcggccgccggagagtccgattcttcgccgcccccgcccccggaggacctttctactgtagagccttcaccctcctcctcgtcctccgccacggccgtcgttgctcccgaaacgcctccccctcccggggcgcaggcggtcgcggcggcgatggaggcggtggagcgggacgcggctgccatcgccgagagctacgcctccctcttcgcttcactccgcgtcgctctatcaaacgtcacctcgacgtcggcggagaacatggagtgcttgggggacgtcgtcggccgcttgcaggaatccgcacttgaagcatcttcgaaaggaaataagtacatcaattcgtgcttgaggttgaatgaggaaatgagaggcttggaaagcttagctatgcaactgaagattctacggaagaatgttgattcactagatttggctgtcagtcaattgcttcgccttccctagtcaatggatactatcaatgaagttacaaggcaactgactgctggaaatatgaagtggcttatagcaacagaggactggacactggaggacttcccctttttatggcatgataaaacactactagttcttgatttgatttacgtttccatcttatctgtatttgtaaacaacacatttattgaaaacatctctatcttcttgtgatgcgtgcatgaagtttgtatgtaaaatgggtcattgagcccatggactatctctgtaaattggagggaaatggcaacagaagtttttctgtatctttgctctaccattccttatctttgttttctcccttgaaattgtgacactgaacccacttgtgtaaatttcgtacagtatttatactcatacttgttttatattttgccaacaattttgattacttccatattttaagtgaaacttagtagcttaaactagagacagatactgtgtgagcttagcatgaaaatggtaactttgtaactgttttaggcacctcgaatattg

SEQ ID NO: 207210 - DNA, 646 bp, Zea Mays
aaaagtttagattgttttatcataatcagtggtagtggtatataaataactccaaactatatgtctatgtagattgtttttttaagtttttgaggagcaaaagaggtactgcgcctccgaaaacttgaccacgagatggaacccgccgcggccgccggagagtccgattcttcgccgcccccgcccccggaggacctttctactgtagagccttcaccctcctcctcgtcctccgccacggccgtcgttgctcccgaaacgcctccccctcccggggcgcaggcggtcgcggcggcgatggaggcggtggagcgggacgcggctgccatcgccgagagctacgcctccctcttcgcttcactccgcgtcgctctatcaaacgtcacctcgacgtcggcggagaacatggagtgcttgggggacgtcgtcggccgcttgcaggaatccgcacttgaagcatcttcgaaaggaaataagtacatcaattcgtgcttgaggttgaatgaggaaatgagaggcttggaaagcttagctatgcaactgaagattctacggaagaatgttgattcactagatttggctgtcagtcaattgcttcgccttccctagtcaatggatactatcaatgaagaactatagactactg

SEQ ID NO: 207211 - DNA, 1572 bp, Zea Mays
gattaatgtgtctgcttttatctgtcggtatggtcctgatagggttcttgacacgcctatcacagaggctggttttactggcattggtgttggtgcagcttatcatggtcttcggcctattatagagtttatgacatttaatttctcgatgcaggctattgatcatatcatcaattcagctgccaagtcaaattatatgtcagctggtcagatatctgttcctattgtttttagaggaccaaacggagctgctgctggagttggtgctcaacactcacagtgttatgcagcttggtttgcacatgttccaggacttaaggttctcacaccatactcttcagaagatgcccgaggcttgctcaaagctgctatcagggaccctgatcctgttattttcctggaaaatgaattgctttatggagaatctttcccagtttctgctgaagtgcttgattctagtttttgcctaccgattggcaaagctaagatagaacgtgagggtaaagatgttaccattactgcgttctccaagatggttggctatgctctccaggctgcagagatactgtccaaggaaggaatcagtgctgaggtgatcaaccttcgatcaatcagaccacttgatagagctgctattaatgcatctgtcaggaaaaccaaccgattggtgactgttgaagaagggttcccccaacatgggattggtgccgagatatggttctctctagcccttaccctctcacacatttgtgtggtatctattattctaacacatgtttgttgcagcatgtctgttgtagaagaaagcttcgcgtaccttgatgcaccagttgagaggattgctggagctgatgtacctatgccctatgctgccaaccttgagagaatggctgttccgcaggtcgatgacattgtgcgggcggcaaagcgggcctgctacagggcagtaccaatggcagcagctgcctgattggtggacaagcctttctgttttccttccatcggttttcgctctctagccagaaacatgtagtattcataaggcgcaggcaaattggccggaacccagactccaagcgagctaattttgtagatctgccatggtgtgctttgtcccgttagtcgatatatgtggcgttatttctagattcaagtccatttgcttctctatgatttttgtacaccgctaaataatcttcttaagcccctgaatgaatgcaaaatatttaagatgttttaggaaaatactatggttttgtgaaataccttggtttaggagtaacatgaaggcgctcaaagtgaaatcactaagctaatagatgacttgataattttaaacttcttgacacataataaaccttagagaacaaatgcgtaaaaatggaccaaggccgatttaaaataagattttgttgtttgctgatcaatatgaccatttagagatattatttgccagtaattttttttctatagtttaaaggcacaagtgaacttcgactaagataaagggatgattcggatggttaatacctcaaccaagacatcataagacatgtgaagaccaactagtac

SEQ ID NO: 207212 - DNA, 3217 bp, Zea Mays
aaaacatgtttgtcaaacaaggcgaggccactccctatgacatatactcaaggaaccacttcagtaacttatttggtctacattctctgagatcagagagctcgaatttgacaagtgagaagcatccaggaaactggcaagaaagttcagagaccctcactaaagattttggaccatcagtgtttcatcagcagcagagtgcctttgtgagtaaattgcttgatcattcaggtgccgaagacacaggaccttatcccccacgacaagatttaaatcagtatccttttggttctacatatgacaaatacatgacacagctttcgtcatgttcaacagatacacgacctcacatcttttctacacaatatgtcaattcacctgaaatggccaatacaactgttccattgatgaatgacactattggggaaagttccttctccttttcgcattatatgaatccttgcagaatcaatcttgattattttgattccgtgtggaatgaacaaaaaggtcttggataccaaactacagataagcagcatggaaaatggagtaaccctgatgacaaggcaacagtggggaactattccctcaattctcttggagagagtcaccttaatcctgagcatttagggaatgggagaccaatgcagggatcttctgaaatgaaacatgaattgggaagtttcagttccaaggtttcttcgtctgagtctggatttgttcagcctcgtgaatgttcatctgagtttcctgaggtcaataacaccagtgttgattcaccttgttggaagggcacaccagcccagtaccagccttcgtttgggattattgaaaataatggcgctcctcctgtggtgataggaacagtaggctacattaattcacatcaaaaccagaaactacctgagttgagttttgagtatccatggcgattctgtgaacaccaagtatcaggttctgaaaatgacccttttaaggcggtcaagttgcctgaaagatgtaaaatctccaaagatcataaagttctgccaattgatgtcagggttcttaatgacatgactacacatgctagttatttgcctgacaaacagcatcccacaacacagaaatgcaatgattctggagaagattctaagaatgtgataacttcaagtcaacaggaaagttcgtgttctggcagaaaaccaatacttttgggtgaacatggtggcagtcttacaggaagcataagtgaactaatgagtaaaagtgtgatgaatcctattgctattactcctagagttcatactgatcatttaacaacaggaatcccacatggaaatattttttctgcagcggtggagaaagaagaaagcactcacaagagaggtgaagacccttctcaatgttatccaggtgttgaggggaatatgctgaatatgtcttccgaatccagctctagcaatcaggaagatgaagaggaacttctccaatcagtgattcaaaatcttacagctgccagttccaaaagaagcaaggttgaacaaaaaaatgatgatggattgagtaactccagccaaatgaaattcaaagatattaattatgtgaggaaacacttttggaggtcaatgcatgaagactcagaacaggagaatgctgattcagaatttaaggccactgtttcacaggttcttactaatcaccaggaggataaggtgctcgacaacactgaagttcctcaggcatcaatctatagaaacttgtggattgaagcagaagcttcagcttgtaaactcaaatatgagcttcaacatgctctcctgaagctcgagacagcaaaaggcctcaacgacacaataaaagcccctgactcattggaagacagtaaaggctctaactcatacattttcagtaacaaaccacagaaccatgggaaaggaaccgtttcatgcgctgcggcctttcagggccacggaggagattctcgtgacaagcaatctcctgttgtaagtaggagcattttcaatggtgttgatgctgatgtgtttgcccgatttgaagttttgcagtcccgtattgataatataaactccttgagtgagattgactgtggggagcagaaagaagcaagcaagagaccatatgcagtcgaagatactgttatggcgagactgaaagttttgaagtctcgtcctgacaatataacctctttgagtcaaggaagcactaaacaccagctagatggaagcacaaacagtgcagataatgttgatgacactgttattgctaggctgggaattttggagtcccatcctaataatgaagccctattgggacaggaaagcagcaagcgacaactggatgcgagaacaaatagagaagatgggattgatgctgctgttatggctaggctgagaattttgaagtctcgacctgataatgaaacctcaatgggcgatgccaacaaggagcagcaagacgcatgtggtgaacaattaaatggggatgaccttggtattgtgtccaatggagccattagcaacaccctgagtgagaagtgctctaagtttacgcactctgatgatcatttaggagaaaaaaactcagtaggtgtcccggacacatttggtgatggaaacagtgctagggagaaaaaggaggttggtggttcagcagatgttgctacccccatgaggtgcaaaggtacatctgatggagtgagcgtcggaagcgcagtacatggtgaagataatcttggtgaaaaccatgtgtggcttcaaactgctggggactctcatgtttgcacagaagggtctcaggaagcgcacccaatctcctctccagttgaccagtatggtggttcacctacagagtgggagcacgtgctgaaggagaatttcttccatccaggcaaattggcgaattctgacccataaactggaaagcttttgtttcagctcatgttgcctcaaaatgctgatgcttcttgtaaatatatgatacgatattatacatcccctcccccgaacctttgtctctatgttcaataatctgcatatctggtgatcaaggaaacgcactgtgcccccgatggtgctatatggaactagtctggtttgtctgcttgggtctatcatgccatagtctatctgtaaatggcacatgtatgttctggaccgagagtgaattattgtatatatttacttccagcaaatttggatattgtggactgtgc

SEQ ID NO: 207213 - DNA, 3438 bp, Zea Mays
cgtcgcataccagaccagacctcaccttccccacccggacgccaccaccgcctgcgccctgctggctgccgcgatgctgccgtactccggtgaccaccagcgctctccgccgccgcagccaccgccacgagcggcgttctcctcctccctctccccatccgccgcgcccttccccgccgctgatccggtgggcccgggcccaggccccggccgtgatctgcccaccgccccgtccgtctacacggcgggcggggactggggcgccctgtcgtggatggagcctcccgcgagctacatggcccccgccgccacgccgccgggttataaaggcgaggccactccctatgacatatactcaaggaaccacttcagtaacttatttggtctacattctctgagatcagagagctcgaatttgacaagtgagaagcatccaggaaactggcaagaaagttcagagaccctcactaaagattttggaccatcagtgtttcatcagcagcagagtgcctttgtgagtaaattgcttgatcattcaggtgccgaagacacaggaccttatcccccacgacaagatttaaatcagtatccttttggttctacatatgacaaatacatgacacagctttcgtcatgttcaacagatacacgacctcacatcttttctacacaatatgtcaattcacctgaaatggccaatacaactgttccattgatgaatgacactattggggaaagttccttctccttttcgcattatatgaatccttgcagaatcaatcttgattattttgattccgtgtggaatgaacaaaaaggtcttggataccaaactacagataagcagcatggaaaatggagtaaccctgatgacaaggcaacagtggggaactattccctcaattctcttggagagagtcaccttaatcctgagcatttagggaatgggagaccaatgcagggatcttctgaaatgaaacatgaattgggaagtttcagttccaaggtttcttcgtctgagtctggatttgttcagcctcgtgaatgttcatctgagtttcctgaggtcaataacaccagtgttgattcaccttgttggaagggcacaccagcccagtaccagccttcgtttgggattattgaaaataatggcgctcctcctgtggtgataggaacagtaggctacattaattcacatcaaaaccagaaactacctgagttgagttttgagtatccatggcgattctgtgaacaccaagtatcaggttctgaaaatgacccttttaaggcggtcaagttgcctgaaagatgtaaaatctccaaagatcataaagttctgccaattgatgtcagggttcttaatgacatgactacacatgctagttatttgcctgacaaacagcatcccacaacacagaaatgcaatgattctggagaagattctaagaatgtgataacttcaagtcaacaggaaagttcgtgttctggcagaaaaccaatacttttgggtgaacatggtggcagtcttacaggaagcataagtgaactaatgagtaaaacggtggagaaagaagaaagcactcacaagagaggtgaagacccttctcaatgttatccaggtgttgaggggaatatgctgaatatgtcttccgaatccagctctagcaatcaggaagatgaagaggaacttctccaatcagtgattcaaaatcttacagctgccagttccaaaagaagcaaggttgaacaaaaaaatgatgatggattgagtaactccagccaaatgaaattcaaagatattaattatgtgaggaaacacttttggaggtcaatgcatgaagactcagaacaggagaatgctgattcagaatttaaggccactgtttcacaggttcttactaatcaccaggaggataaggtgctcgacaacactgaagttcctcaggcatcaatctatagaaacttgtggattgaagcagaagcttcagcttgtaaactcaaatatgagcttcaacatgctctcctgaagctcgagacagcaaaaggcctcaacgacacaataaaagcccctgactcattggaagacagtaaaggctctaactcatacattttcagtaacaaaccacagaaccatgggaaaggaaccgtttcatgcgctgcggcctttcagggccacggaggagattctcgtgacaagcaatctcctgttgtaagtaggagcattttcaatggtgttgatgctgatgtgtttgcccgatttgaagttttgcagtcccgtattgataatataaactccttgagtgagattgactgtggggagcagaaagaagcaagcaagagaccatatgcagtcgaagatactgttatggcgagactgaaagttttgaagtctcgtcctgacaatataacctctttgagtcaaggaagcactaaacaccagctagatggaagcacaaacagtgcagataatgttgatgacactgttattgctaggctgggaattttggagtcccatcctaataatgaagccctattgggacaggaaagcagcaagcgacaactggatgcgagaacaaatagagaagatgggattgatgctgctgttatggctaggctgagaattttgaagtctcgacctgataatgaaacctcaatgggcgatgccaacaaggagcagcaagacgcatgtggtgaacaattaaatggggatgaccttggtattgtgtccaatggagccattagcaacaccctgagtgagaagtgctctaagtttacgcactctgatgatcatttaggagaaaaaaactcagtaggtgtcccggacacatttggtgatggaaacagtgctagggagaaaaaggaggttggtggttcagcagatgttgctacccccatgaggtgcaaaggtacatctgatggagtgagcgtcggaagcgcagtacatggtgaagataatcttggtgaaaaccatgtgtggcttcaaactgctggggactctcatgtttgcacagaagggtctcaggaagcgcacccaatctcctctccagttgaccagtatggtggttcacctacagagtgggagcacgtgctgaaggagaatttcttccatccaggcaaattggcgaattctgacccataaactggaaagcttttgtttcagctcatgttgcctcaaaatgctgatgcttcttgtaaatatatgatacgatattatacatcccctcccccgaacctttgtctctatgttcaataatctgcatatctggtgatcaaggaaacgcactgtgcccccgatggtgctatatggaactagtctggtttgtctgcttgggtctatcatgccatagtctatctgtaaatggcacatgtatgttctggaccgagagtgaattattgtatatatttacttccagcaaatttggatattgtggactgtgc

SEQ ID NO: 207214 - DNA, 2208 bp, Zea Mays
cgtcgcataccagaccagacctcaccttccccacccggacgccaccaccgcctgcgccctgctggctgccgcgatgctgccgtactccggtgaccaccagcgctctccgccgccgcagccaccgccacgagcggcgttctcctcctccctctccccatccgccgcgcccttccccgccgctgatccggtgggcccgggcccaggccccggccgtgatctgcccaccgccccgtccgtctacacggcgggcggggactggggcgccctgtcgtggatggagcctcccgcgagctacatggcccccgccgccacgccgccgggttataaagcggtggagaaagaagaaagcactcacaagagaggtgaagacccttctcaatgttatccaggtgttgaggggaatatgctgaatatgtcttccgaatccagctctagcaatcaggaagatgaagaggaacttctccaatcagtgattcaaaatcttacagctgccagttccaaaagaagcaaggttgaacaaaaaaatgatgatggattgagtaactccagccaaatgaaattcaaagatattaattatgtgaggaaacacttttggaggtcaatgcatgaagactcagaacaggagaatgctgattcagaatttaaggccactgtttcacaggttcttactaatcaccaggaggataaggtgctcgacaacactgaagttcctcaggcatcaatctatagaaacttgtggattgaagcagaagcttcagcttgtaaactcaaatatgagcttcaacatgctctcctgaagctcgagacagcaaaaggcctcaacgacacaataaaagcccctgactcattggaagacagtaaaggctctaactcatacattttcagtaacaaaccacagaaccatgggaaaggaaccgtttcatgcgctgcggcctttcagggccacggaggagattctcgtgacaagcaatctcctgttgtaagtaggagcattttcaatggtgttgatgctgatgtgtttgcccgatttgaagttttgcagtcccgtattgataatataaactccttgagtgagattgactgtggggagcagaaagaagcaagcaagagaccatatgcagtcgaagatactgttatggcgagactgaaagttttgaagtctcgtcctgacaatataacctctttgagtcaaggaagcactaaacaccagctagatggaagcacaaacagtgcagataatgttgatgacactgttattgctaggctgggaattttggagtcccatcctaataatgaagccctattgggacaggaaagcagcaagcgacaactggatgcgagaacaaatagagaagatgggattgatgctgctgttatggctaggctgagaattttgaagtctcgacctgataatgaaacctcaatgggcgatgccaacaaggagcagcaagacgcatgtggtgaacaattaaatggggatgaccttggtattgtgtccaatggagccattagcaacaccctgagtgagaagtgctctaagtttacgcactctgatgatcatttaggagaaaaaaactcagtaggtgtcccggacacatttggtgatggaaacagtgctagggagaaaaaggaggttggtggttcagcagatgttgctacccccatgaggtgcaaaggtacatctgatggagtgagcgtcggaagcgcagtacatggtgaagataatcttggtgaaaaccatgtgtggcttcaaactgctggggactctcatgtttgcacagaagggtctcaggaagcgcacccaatctcctctccagttgaccagtatggtggttcacctacagagtgggagcacgtgctgaaggagaatttcttccatccaggcaaattggcgaattctgacccataaactggaaagcttttgtttcagctcatgttgcctcaaaatgctgatgcttcttgtaaatatatgatacgatattatacatcccctcccccgaacctttgtctctatgttcaataatctgcatatctggtgatcaaggaaacgcactgtgcccccgatggtgctatatggaactagtctggtttgtctgcttgggtctatcatgccatagtctatctgtaaatggcacatgtatgttctggaccgagagtgaattattgtatatatttacttccagcaaatttggatattgtggactgtgc

SEQ ID NO: 207215 - DNA, 2651 bp, Zea Mays
gggcttgtggctagccgtgcagaatacagagcgaaagagagagatggctaatattgggaatcttgttatctgttctccttttcaagctgctctccctaggcttttgggtttgtgaggcgttggctcccttccccactgcttcctcccccactgccggtcgctgtgcaagagctgccacgagacagcagattccccatcatccaaagcgaggctgagggggaggagaggaagcaggaatagcctaacaggggtatagatctcaggaagctccatgcgggtgagcttgtgcccaagcctgtgtcccggtgcgcgaggctgagcttcttgcccgttgcccgtggcgcccccgagctcaccgatgcgccgccgccgccacggcttgagctccatggctgtccagcgcgctggtgcggattgacaggcaggttgtcctgcccgttcttttttctgactagagtatgatggtggagccgctgttctgttcttgccatgattgacgatttctctgttaaaagttcaactgctctccggaacattccatccgcttccgttctgatatcagtatcaccttgcgcacttctctgtgaatttgatgacgatgatgatgcatacttgagtgcccagacatgctcctgcaaatccgtccagttcctgcagcttccacgacccgaactctttcagttcttaacctttttctctctaccattttgttgcttcagcgaggtagctgcttgggcagacaagtaggagcagcggctcaaacttcggatctcggcatgggctcctttgggatggactggaaccagaaggcctccgtgttgtgggactgggagaacttgccgcccgtagccgtaggcgcgagcgggagcgagaaccccaggatggctgctgcgcctcaggctttgcattctgcctgtggcaccatctcttccagctcagagatggggtatggctcatccaagagctccgtatccgcgtcggctgatgattcttcacccaaggccaaggggaaaagcatggagctcaacttcgcacctgacaaagtgcctgacaagaacactgattcagggaaggttgacgacgccaggacctctccgtcgtcgccggtgattgccatcagcagtgcagagcccgtgcttagcctgaagcttggcaagagaacgtatttcgaagatgtctgtggagggcagagcgtcaagagtttgccgtcggatacgagtgcagtgactcctcctcctgcttctccgaagaagacgaaggtgactccaaacaagaaatcttactgtcaggttgaaggctgcaaggttgatctctcttctgctaaagagtaccatcggaagcacagagtctgtgaacctcattctaaggctcccaaggtggttgttgctggtctggagcggcgcttttgtcaacagtgtagccggttccatggattagctgagtttgaccagaagaagaaaagctgccgcaggcgcctcaatgatcacaatgcccgcagacggaaaccacaacctgaagcactttcttttgggtcatcaaggctgtcggcaatgttctatgacacaagacaacacacaagccttctgtttggtcaaggtccttatggtcaaatgagaagttgtgcaagttcttcatgggataaccctggaggtggcttcaaatttgcagagacaaaaggtccctggttaagagctggtggtgttgatgggttgcatcaaccaagtcagcaggtgtggaacaactttatgccacatggtgtccatcaagattttgatgggttcacagctttcaaaggaaccaatgcaaaggtccttcatcaaggcgttgaagcttctgcggtcgcctccaaccagaacggcgccccacaaccggaccttcatcgtgctctctctcttctgtcaaacagctgggctggtggtggtaccggtaccggtaccgaccagcacccgacggcccagctgcgccacgctgccctgagcagcagcctcgccgccagctccgtctccgtggcgcaggcctcgccagcagggctgtggcaggacggcggcgcggccctgggccaccacgactacgcccacgcgttccaggctatcaacacgccgggcggcggcggcgccgccgctcccattgcagtgggtcaggagctgcttcagctcccgcgtccgccgtccctgtacgacgacggctcctcgtcccgctacgacctgatgcgctgaaccttggggcttctggtggagcgcggggtttcgatttttgaacgaactctggatggaactcggagttttgaacgaactgctgtatgcttgctatcaaggtctgctggctcgggctcggacgctcgtgggatcgccagcagctccgtgtgcttgaataaatccacagtttttttttgtgtgacgctagctatttatttatttcacttgtgtaatgtgatgcgagtatgcgactccctcatttgcttcggaagagcggtgacatgctttaccgccgcaggcatgcatgtactccaatcaccgattggatttgcctctaccaaatgcaacatcccatgtcgagagatttttgccattatcaaacatggggcgttaggcttcgttcaaaacggaggttcgttcaaaacggaggtgagtgtagagattcgacgatttgaa

SEQ ID NO: 207216 - DNA, 2281 bp, Zea Mays
gcaaattgttagttccgtaaaggagtagcgcgtgtgtccaactgtccatataaatatgtgatgcctctttgagtttgagccgtggcctcactcgtagtcgtagctcacacaatgggcgtgcagagagccagtggcgtgtccttgctccatgcactgcttgttgtgttctgggcattgtcttctcgtcgtgcgaaggggcagaacccatctggccacctgagcgtggatgcctcgccgcagaacgttaggaagatccctgataagatgtttggcatctttttcgaggagatcaaccatgctggagctggtgggttgtggtcagagctcgtaagcaacagaggatttgaggctggtgggcctaatacaccttcgaatattgatccgtggctgatcattggggatgaatcaagtatcattgttggaactgatcggacatcatgttttgaacgtaacccagttgcacttcggatggaagttctttgtggttctaaaaaaactaatgcctgtccatcgggaggtgttggggtctataatcctggctactggggcatgaacattgaaaaggggaaggtttataaggtgagcctgcatgttaggtcatcagatgcactgtccttgactgcttccttgacaagctccgatgggctacaaaagctcgctgctcataccatcacaggtagcaagaaaacctttgcaaaatggacaaaggtagaatttcatttgagatccaaccaaaataacagcaactcaaggtttcaacttacaacaagtaaaagcggggtagtttggcttgatcaagtatcagttatgccaatggacacttacatggggcatggttttcggaaagatcttgcttctatgttggccaatctcgagcctcagtttctcaagtttccaggtggcaactatgccatgggaaattatctacgaaatgcatttcggtggagtgagactgtgggaccatgggaggagagacctggtcactttaatgatgcctggggatactggactgatgatgggcttggattttttgagttccttcagttggctgaagaccttggggcttccccagtttgggtggtgaatgatggagcaagccttaatgaagaagtttccactaaaacaattgcatcattggttaaggatgttgttaatggcatagagtttgccagtggaggacctaagacaacttggggttctgttcgtgcagcaatgggacacccagaaccctttaagcttgattatgtttcaataggaaatcaagaatgttggatgctctactatagaggaaattaccaaaagttttactcagcgattaaatctgcctacccagacatcaacattatatcaagttgtgataggccaactatttcgccatccaaccctgccgatctttatgatgttcatgtctacacctcttcgactaatatgttttcaaaagctagtatgtttgacaacacaccacgtggagcaccgaaggcaattgttagcgagtacgctgtgaccggaaatgatgctggcaaaggaacactggtagcagcactggcagaagctgcatttctcattggattggaaaggaacagtgatgtggttgagatggcaagctgtgcacccctttttgtaaatgacaatgatcgcaggtggagcccagatgccatcgtcttcaactcggggcagcactatgggtgtcccaactattggatgctacacttcttcaaggaatctagcggcgccaccctccatcctacagccattcaggtctccagctacgatcagctggttgcgtctgccatcacttggcagaacgctaaagacaagagcacttacctcaggataaaggtggtgaatttcggcaatcaagctgtggatctgaacatatcggttgtggaactggccaccggcgtcaagaagtctggatcgaagcagacggttctaacgtccagcagtccgcttgacgagaactccttccagcagccagagaaggtggcgccagtgtcgagcccaatggcgaacgcggggcagcagatgggcgcttccgtggggccgtactccctcacctcgtttgacctgctgctggagccgagcaagcatgacagcgtgtaaaactgtcaactgaagaagcatgacagcggtgtacgtaaaggaggtcaaagatagaggagacagatgggttgcccgaatctaaggcctcaggaacgattgcagtctcaaggtcttccaggatgcacgagctccattcagaaagctgtttcacagacacatcgtctgcgaaagaacacat

SEQ ID NO: 207217 - DNA, 2014 bp, Zea Mays
actgtccatataaatatgtgatgcctctttgagtttgagccgtggcctcactcgtagtcgtagctcacacaatgggcgtgcagagagccagtggcgtgtccttgctccatgcactgcttgttgtgttctgggcattgtcttctcgtcgtgcgaaggggcagaacccatctggccacctgagcgtggatgcctcgccgcagaacgttaggaagatccctgataagatgtttggcatctttttcgaggagatcaaccatgctggagctggtgggttgtggtcagagctcgtaagcaacagagaggtagcaagaaaacctttgcaaaatggacaaaggtagaatttcatttgagatccaaccaaaataacagcaactcaaggtttcaacttacaacaagtaaaagcggggtagtttggcttgatcaagtatcagttatgccaatggacacttacatggggcatggttttcggaaagatcttgcttctatgttggccaatctcgagcctcagtttctcaagtttccaggtggcaactatgccatgggaaattatctacgaaatgcatttcggtggagtgagactgtgggaccatgggaggagagacctggtcactttaatgatgcctggggatactggactgatgatgggcttggattttttgagttccttcagttggctgaagaccttggggcttccccagtttgggtggtgaatgatggagcaagccttaatgaagaagtttccactaaaacaattgcatcattggttaaggatgttgttaatggcatagagtttgccagtggaggacctaagacaacttggggttctgttcgtgcagcaatgggacacccagaaccctttaagcttgattatgtttcaataggaaatcaagaatgttggatgctctactatagaggaaattaccaaaagttttactcagcgattaaatctgcctacccagacatcaacattatatcaagttgtgataggccaactatttcgccatccaaccctgccgatctttatgatgttcatgtctacacctcttcgactaatatgttttcaaaagctagtatgtttgacaacacaccacgtggagcaccgaaggcaattgttagcgagtacgctgtgaccggaaatgatgctggcaaaggaacactggtagcagcactggcagaagctgcatttctcattggattggaaaggaacagtgatgtggttgagatggcaagctgtgcacccctttttgtaaatgacaatgatcgcaggtggagcccagatgccatcgtcttcaactcggggcagcactatgggtgtcccaactattggatgctacacttcttcaaggaatctagcggcgccaccctccatcctacagccattcaggtctccagctacgatcagctggttgcgtctgccatcacttggcagaacgctaaagacaagagcacttacctcaggataaaggtggtgaatttcggcaatcaagctgtggatctgaacatatcggttgtggaactggccaccggcgtcaagaagtctggatcgaagcagacggttctaacgtccagcagtccgcttgacgagaactccttccagcagccagagaaggtggcgccagtgtcgagcccaatggcgaacgcggggcagcagatgggcgcttccgtggggccgtactccctcacctcgtttgacctgctgctggagccgagcaagcatgacagcgtgtaaaactgtcaactgaagaagcatgacagcggtgtacgtaaaggaggtcaaagatagaggagacaggtcagaggtcaaaattgagaccttgataccatattggattggattgtatgtatcaacaagttcaacctaaaagtttaagctgatagtgaaatgcggacagttcacattctaacaaatcccagtcaatgttgcatccaacaatactttgtacttgatgtctgaatccatttgattcagaagatagcgctttattgttttgccaatgcaaatacacatgcgatc

SEQ ID NO: 207218 - DNA, 1802 bp, Zea Mays
tcctcaccgttggactggacgtgcccttatcctcttatcccagcagccggcgcccgccgcgcgctcgacaaactgccgcgaactctcccggcctcacactccttgcgcccgccgcggcagatgccgctcgccggcattgccctcacgcccctcctcgtctcacctctcgcgccttccccgcgccgtagccgtgtagccacttccgccgcgagaaggccaagggctctccagcgagctcggtgctcggctacagccgcttccggtgaagccggtgagctgtcgcacgcgacactgctatggagggcggcgaagctacccatctactccgtagcgctaataccactcacaaactggatacctagaagttgtttcggaattgggattgctatgactatacacatttcgcgtttgtgtatggttgcagcagtcctcgtgatcacttggctcaatctcagcaatgatgtttatgactcggatacaggggctgatagggacaagaaagaatctgttgtcagcattactggcagccgagcaatgacacaaaatgcggcgaacttttcccttttcctcggctttgcagggctactttgggcctttgcagaagccaaggatatcagattcattttattggtgatctctgcaatcttctgtggttatgtttaccagtgtcctccattccgattaagctaccaaggactaggcgagccgttgtgtttcgctgcatttggtcctttggcaaccacagccttttacttctcaaacagcagcttaaatacttcgagcggaggagcggctcttctccctctcactaaaacagttatagcttcatctgttctcgtcgggctgacaactactctgatactcttctgcagccatttccatcagatcgatggagatctcgccgttggaaagatgtctcctctggtaagaatcggcactaaagcaggatcgcggatagtgtcgattgggattgtcatgctttacattctcttggctacgtttgggacatgcggatctctcccgccatcttgcattgtcctctgtgcccttactctgcccatgggcaaaacggtcgtggactacgtgctgaaacatcacgaggacaacgcgaagatattcatggcgaagtactactgcgtgcgcctgcacgcgctgtttgggatggcactggcctctggtttggtcttggcccgaaatggtatattagcctgacagacaggctcataggcggcgctgaaatccaggagagggtccagagcaccctggagtttcagaatcagcgagcaccctgttcctcaatttatgttctgaatctgaactacttctgattcgactatcgaacaggccgatgagaatggggcgcagtactgagcagctgcagttttgccaagaaacggtggagggaatgggccctaggagaagtagaactactacagcgtcagaactcagatgcacaccggcccgtatcggacggcaagttcggtgctcgagttcatttggttcagcgtccttgtacgctttggtccgctctcgggggcttgcttgctcgtgcacggtcagactgccgttgcgccggggtccgggggatgccagtgtatgtatgcatatggattgaatcccaagcaaggacgagtcatgcactcatgtacaagcattacttctgtgcacagacgaccatacagattatatgagatctcactcacaccttttttttttgcatttggtttagccagcgaccggtaattgcttgtcactgcagcgtcctgtttcgacatgtctgtcgtggcaagctagagtattag

SEQ ID NO: 207219 - DNA, 1777 bp, Zea Mays
tcctcaccgttggactggacgtgcccttatcctcttatcccagcagccggcgcccgccgcgcgctcgacaaactgccgcgaactctcccggcctcacactccttgcgcccgccgcggcagatgccgctcgccggcattgccctcacgcccctcctcgtctcacctctcgcgccttccccgcgccgtagccgtgtagccacttccgccgcgagaaggccaagggctctccagcgagctcggtgctcggctacagccgcttccggtgaagccggtgagctgtcgcacgcgacactgctatggagggcggcgaagctacccatctactccgtagcgctaataccactcacagggctgatagggacaagaaagaatctgttgtcagcattactggcaggtgccgtactcttgtttcatagagctagtagcattgtaaatggctggcaactggcatggttggttttagaagtgaaacatgatgctatgttgtgatctggttatgcagccgagcaatgacacaaaatgcggcgaacttttcccttttcctcggctttgcagggctactttgggcctttgcagaagccaaggatatcagattcattttattggtgatctctgcaatcttctgtggttatgtttaccagtgtcctccattccgattaagctaccaaggactaggcgagccgttgtgtttcgctgcatttggtcctttggcaaccacagccttttacttctcaaacagcagcttaaatacttcgagcggaggagcggctcttctccctctcactaaaacagttatagcttcatctgttctcgtcgggctgacaactactctgatactcttctgcagccatttccatcagatcgatggagatctcgccgttggaaagatgtctcctctggtaagaatcggcactaaagcaggatcgcggatagtgtcgattgggattgtcatgctttacattctcttggctacgtttgggacatgcggatctctcccgccatcttgcattgtcctctgtgcccttactctgcccatgggcaaaacggtcgtggactacgtgctgaaacatcacgaggacaacgcgaagatattcatggcgaagtactactgcgtgcgcctgcacgcgctgtttgggatggcactggcctctggtttggtcttggcccgaaatggtatattagcctgacagacaggctcataggcggcgctgaaatccaggagagggtccagagcaccctggagtttcagaatcagcgagcaccctgttcctcaatttatgttctgaatctgaactacttctgattcgactatcgaacaggccgatgagaatggggcgcagtactgagcagctgcagttttgccaagaaacggtggagggaatgggccctaggagaagtagaactactacagcgtcagaactcagatgcacaccggcccgtatcggacggcaagttcggtgctcgagttcatttggttcagcgtccttgtacgctttggtccgctctcgggggcttgcttgctcgtgcacggtcagactgccgttgcgccggggtccgggggatgccagtgtatgtatgcatatggattgaatcccaagcaaggacgagtcatgcactcatgtacaagcattacttctgtgcacagacgaccatacagattatatgagatctcactcacaccttttttttttgcatttggtttagccagcgaccggtaattgcttgtcactgcagcgtcctgtttcgacatgtctgtcgtggcaagctagagtattag

SEQ ID NO: 207220 - DNA, 1879 bp, Zea Mays
tcctcaccgttggactggacgtgcccttatcctcttatcccagcagccggcgcccgccgcgcgctcgacaaactgccgcgaactctcccggcctcacactccttgcgcccgccgcggcagatgccgctcgccggcattgccctcacgcccctcctcgtctcacctctcgcgccttccccgcgccgtagccgtgtagccacttccgccgcgagaaggccaagggctctccagcgagctcggtgctcggctacagccgcttccggtgaagccggtgagctgtcgcacgcgacactgctatggagggcggcgaagctacccatctactccgtagcgctaataccactcacagtagggagcgcttctgcttattatcatgcaggcttattctttaccaagcgctattttgttctcctgacagcagcagtcctcgtgatcacttggctcaatctcagaggcttatggtgtggattattagttgaaaacctagaacagagattgtagaagtcaaatcctttgtttgacttgactgcagcaatgatgtttatgactcggatacaggggctgatagggacaagaaagaatctgttgtcagcattactggcagccgagcaatgacacaaaatgcggcgaacttttcccttttcctcggctttgcagggctactttgggcctttgcagaagccaaggatatcagattcattttattggtgatctctgcaatcttctgtggttatgtttaccagtgtcctccattccgattaagctaccaaggactaggcgagccgttgtgtttcgctgcatttggtcctttggcaaccacagccttttacttctcaaacagcagcttaaatacttcgagcggaggagcggctcttctccctctcactaaaacagttatagcttcatctgttctcgtcgggctgacaactactctgatactcttctgcagccatttccatcagatcgatggagatctcgccgttggaaagatgtctcctctggtaagaatcggcactaaagcaggatcgcggatagtgtcgattgggattgtcatgctttacattctcttggctacgtttgggacatgcggatctctcccgccatcttgcattgtcctctgtgcccttactctgcccatgggcaaaacggtcgtggactacgtgctgaaacatcacgaggacaacgcgaagatattcatggcgaagtactactgcgtgcgcctgcacgcgctgtttgggatggcactggcctctggtttggtcttggcccgaaatggtatattagcctgacagacaggctcataggcggcgctgaaatccaggagagggtccagagcaccctggagtttcagaatcagcgagcaccctgttcctcaatttatgttctgaatctgaactacttctgattcgactatcgaacaggccgatgagaatggggcgcagtactgagcagctgcagttttgccaagaaacggtggagggaatgggccctaggagaagtagaactactacagcgtcagaactcagatgcacaccggcccgtatcggacggcaagttcggtgctcgagttcatttggttcagcgtccttgtacgctttggtccgctctcgggggcttgcttgctcgtgcacggtcagactgccgttgcgccggggtccgggggatgccagtgtatgtatgcatatggattgaatcccaagcaaggacgagtcatgcactcatgtacaagcattacttctgtgcacagacgaccatacagattatatgagatctcactcacaccttttttttttgcatttggtttagccagcgaccggtaattgcttgtcactgcagcgtcctgtttcgacatgtctgtcgtggcaagctagagtattag

SEQ ID NO: 207221 - DNA, 3317 bp, Zea Mays
caaagatcaagcattttttaggggagctccttgattgaagagcttgaagatgcaatatataagaataaaaaaacaccaatatcctactcagagttagcagctctgaaagaagggcgattcaatgcatccattcagcatcggctagctgaacttgaaggattaccttctactaggggtgaagacttgcaaatgaagtgtttgcttgaaatgtatgggcttaagctgttagatttgcagaagaaagtgcgatctgatatcagtgcagaatattggctacagaagaaatgtgcatatccggagaggcaactttttgattgggggctgatgcggatacggtatcctttatccatgtatggaataggagatatcctttcaatggatgctgatgatgttcaccgcaaaaagagatttacagagaggatgtcaagactcgaagaggaagaaaaaaatcaggcagatattaggaagaggaagttctttgcagaaattctaaatgcttctagggaacaccaggtgcaattaggcactacattcaagcaaagaaagcagcggaatgatggagtccaggcatggcatgttcgggcacgtcaacgtatctcacggcaagagaaaaataggttgaatcttctgaaaattggtgatcaagtagcatatatgaagatggttgaggagagcaagaacgaacgtctgaaaatgctccttgacaaaacaaatgagcttcttgaaggaattggaaaagctgtacagcgacaaaaagatgctgagcatgttagtcagcatgaagggagtgaagtgccaaaagggtcagagtctgaggattgctctcaaatctcaggcgtcaagagtgaatcacctggggaatctccttcagatgacgatgcagactttgctggctctgcagatgaaagtaaattcaatgcaggtcgtagacttgattttactgtccattccattgaagaaaaggtgacagaacaaccatcagctctcgaaggtggggaattgaggccatatcaactggagggtctccaatggatgctttctttgtttaacaacaatttgaatggcattctggctgatgaaatgggtctgggtaaaacaattcagaccatagctttgatagcttatctgttggaaaataaggaggttgcaggaccacacttaataattgctccaaaagcagtattaccaaattggtctaacgaattcaaaacctgggctcccagtattgggacaattctgtatgatggtcgtccagaagagaggaagcttttaagggaaaagaattttgatggattgcaatttaatgttttgctcacgcattatgacttgatactgaaagataagaagttcctaaagaaagttcactggcattatttgattgttgatgaaggacatcgtctgaaaaatcatgaatgtgctcttgctcgcacactagtttcaggatatcagatccgccgcagactacttttaactggcactccaatccaaaatagcctacaagaactgtggtctttgcttaactttattctgcccaatatttttaattcatctcagaattttgaggaatggtttaatgcaccatttgcatgtgatgttagtcttaatgatgaggaacagctattaatcatacatcgtctgcatcaagttttgcgtccatttttgctgaggaggaaaaaagatgaagtggaaaaatatctccctgtcaaaacacaagtaattctcaagtgtgatatgtctgcttggcaaaaagcatactatgaacaagtcacaagcagggaaaaggttgcactaggatttgggctcagatcaaaggctctgcagaatctgtcaatgcaacttaggaaatgttgcaaccacccctatctatttgtagagcactacaacatgtaccagcgggaggaaattgttagagcatcagggaagtttgaattgcttgatcgtctacttccaaaactgcagagagctggtcacagggttctgcttttctctcagatgacgaaactgcttgatgttttagaaatatatttgcaaatgtacaatttcaagtacatgaggcttgatggatccacgaagactgaagaacgagggaggttactggcagattttaataagaaggattcggaatatttcatgtttctcctcagcacacgtgctggaggacttgggttgaacttgcagacggcggacactgtcattatatttgatagtgactggaaccctcaaatggaccaacaagctgaagaccgtgcccatcgtatagggcagaagaatgaagtgcgtgtgtttgttcttgttagtgtcggctccattgaagaagagatcctggaccgtgcaaaacaaaagatgggtatcgatgcaaaagttatccaggctgggttgtttaacacaacttccacagcacaggacagacgagcattgctgcaggagatccttaggagggggacaagctcgctgggaacagatatccccagtgagcgcgagataaatcgtttggctgcacgaactgatgaagaattctggttgtttgagaagatggatgaagaaaggaggcttagagaaaactacaaatctagacttatggatgggaatgaggttccagattgggtattcgccaacaatgatttacccaagagaaccgtggcagatgagttccagaatataatggtcggtgcgaagcgacgtagaaaggaggttgtctattcagactctttcggtgatcagtggatgaaatccgatgagggatttgaagacattccaaaggcgactcagaggtcgaagaagactgcttactcatctgacatccaagttgagtttagtgaaaggaggaaaagacctaggtctgtagaaaacagcgcagacggtgtgagcaacccgacgtggacgcctgacaaaggaagggctggagtttcatcatacagcaaggacgagactgaagatgatggcgaagacgaagtcattactagcggcttacaaaagggaaacagtttcacatggaataccctaggaagaagaaggtcaagccacttcagttcgtcatcggactcgagagggcgcccaacattctaatggcaacatacatgaatgttatggcctcgacctgttggttgatggaatacccttgtagagcagggctgcgactatgactgagtaccttcaagcttatgaactttattaggattactagtatactgtatggacttgttggcatgaatttgtaactcctttaaatattaattgtttaaacaactggtggtgtttgctatcataccgcgcctacatgtttttatttttttgctaatcaaagtttttgtggccag

SEQ ID NO: 207222 - DNA, 3314 bp, Zea Mays
gcttcagcaacctattgggggagctccttgattgaagagcttgaagatgcaatatataagaataaaaaaacaccaatatcctactcagagttagcagctctgaaagaagggcgattcaatgcatccattcagcatcggctagctgaacttgaaggattaccttctactaggggtgaagacttgcaaatgaagtgtttgcttgaaatgtatgggcttaagctgttagatttgcagaagaaagtgcgatctgatatcagtgcagaatattggctacagaagaaatgtgcatatccggagaggcaactttttgattgggggctgatgcggatacggtatcctttatccatgtatggaataggagatatcctttcaatggatgctgatgatgttcaccgcaaaaagagatttacagagaggatgtcaagactcgaagaggaagaaaaaaatcaggcagatattaggaagaggaagttctttgcagaaattctaaatgcttctagggaacaccaggtgcaattaggcactacattcaagcaaagaaagcagcggaatgatggagtccaggcatggcatgttcgggcacgtcaacgtatctcacggcaagagaaaaataggttgaatcttctgaaaattggtgatcaagtagcatatatgaagatggttgaggagagcaagaacgaacgtctgaaaatgctccttgacaaaacaaatgagcttcttgaaggaattggaaaagctgtacagcgacaaaaagatgctgagcatgttagtcagcatgaagggagtgaagtgccaaaagggtcagagtctgaggattgctctcaaatctcaggcgtcaagagtgaatcacctggggaatctccttcagatgacgatgcagactttgctggctctgcagatgaaagtaaattcaatgcaggtcgtagacttgattttactgtccattccattgaagaaaaggtgacagaacaaccatcagctctcgaaggtggggaattgaggccatatcaactggagggtctccaatggatgctttctttgtttaacaacaatttgaatggcattctggctgatgaaatgggtctgggtaaaacaattcagaccatagctttgatagcttatctgttggaaaataaggaggttgcaggaccacacttaataattgctccaaaagcagtattaccaaattggtctaacgaattcaaaacctgggctcccagtattgggacaattctgtatgatggtcgtccagaagagaggaagcttttaagggaaaagaattttgatggattgcaatttaatgttttgctcacgcattatgacttgatactgaaagataagaagttcctaaagaaagttcactggcattatttgattgttgatgaaggacatcgtctgaaaaatcatgaatgtgctcttgctcgcacactagtttcaggatatcagatccgccgcagactacttttaactggcactccaatccaaaatagcctacaagaactgtggtctttgcttaactttattctgcccaatatttttaattcatctcagaattttgaggaatggtttaatgcaccatttgcatgtgatgttagtcttaatgatgaggaacagctattaatcatacatcgtctgcatcaagttttgcgtccatttttgctgaggaggaaaaaagatgaagtggaaaaatatctccctgtcaaaacacaagtaattctcaagtgtgatatgtctgcttggcaaaaagcatactatgaacaagtcacaagcagggaaaaggttgcactaggatttgggctcagatcaaaggctctgcagaatctgtcaatgcaacttaggaaatgttgcaaccacccctatctatttgtagagcactacaacatgtaccagcgggaggaaattgttagagcatcagggaagtttgaattgcttgatcgtctacttccaaaactgcagagagctggtcacagggttctgcttttctctcagatgacgaaactgcttgatgttttagaaatatatttgcaaatgtacaatttcaagtacatgaggcttgatggatccacgaagactgaagaacgagggaggttactggcagattttaataagaaggattcggaatatttcatgtttctcctcagcacacgtgctggaggacttgggttgaacttgcagacggcggacactgtcattatatttgatagtgactggaaccctcaaatggaccaacaagctgaagaccgtgcccatcgtatagggcagaagaatgaagtgcgtgtgtttgttcttgttagtgtcggctccattgaagaagagatcctggaccgtgcaaaacaaaagatgggtatcgatgcaaaagttatccaggctgggttgtttaacacaacttccacagcacaggacagacgagcattgctgcaggagatccttaggagggggacaagctcgctgggaacagatatccccagtgagcgcgagataaatcgtttggctgcacgaactgatgaagaattctggttgtttgagaagatggatgaagaaaggaggcttagagaaaactacaaatctagacttatggatgggaatgaggttccagattgggtattcgccaacaatgatttacccaagagaaccgtggcagatgagttccagaatataatggtcggtgcgaagcgacgtagaaaggaggttgtctattcagactctttcggtgatcagtggatgaaatccgatgagggatttgaagacattccaaaggcgactcagaggtcgaagaagactgcttactcatctgacatccaagttgagtttagtgaaaggaggaaaagacctaggtctgtagaaaacagcgcagacggtgtgagcaacccgacgtggacgcctgacaaaggaagggctggagtttcatcatacagcaaggacgagactgaagatgatggcgaagacgaagtcattactagcggcttacaaaagggaaacagtttcacatggaataccctaggaagaagaaggtcaagccacttcagttcgtcatcggactcgagagggcgcccaacattctaatggcaacatacatgaatgttatggcctcgacctgttggttgatggaatacccttgtagagcagggctgcgactatgactgagtaccttcaagcttatgaactttattaggattactagtatactgtatggacttgttggcatgaatttgtaactcctttaaatattaattgtttaaacaactggtggtgtttgctatcataccgcgcctacatgtttttatttttttgctaatcaaagtttttgtggccag

SEQ ID NO: 207223 - DNA, 3793 bp, Zea Mays
aaatttccccacccagtccgctgcgcaggccagacatccgcggcgtccgcctccccggccccgatcgatcggaagcttcggcttcccctgacacaaggccggcgcgaaaacgcccccacaaacaaacggcggaccattgccgcgcgtcgattcgaacccgccggggaaagcgccgacgccgtctcaccccgcggaggcgaaaccctagcgatggcggcgtccgtggacgctgcggcggccctggcggtgacgccccccgctgtggaggaggcgggcggcgctgttgagcaggccaggacgctcatcggcgcgctcaacctgctttcccgcaacctgccgctgccccccgacgtcctgcgcgcggtctcgtccatctaccacgatgggggtgcgggtgacgatgaggaggaggaggggggagagcgggaagcggagaaggaagggaatatggagatgacggccgcggaggagggttaccccgttgacgttgcgaccaaggggagctccttgattgaagagcttgaagatgcaatatataagaataaaaaaacaccaatatcctactcagagttagcagctctgaaagaagggcgattcaatgcatccattcagcatcggctagctgaacttgaaggattaccttctactaggggtgaagacttgcaaatgaagtgtttgcttgaaatgtatgggcttaagctgttagatttgcagaagaaagtgcgatctgatatcagtgcagaatattggctacagaagaaatgtgcatatccggagaggcaactttttgattgggggctgatgcggatacggtatcctttatccatgtatggaataggagatatcctttcaatggatgctgatgatgttcaccgcaaaaagagatttacagagaggatgtcaagactcgaagaggaagaaaaaaatcaggcagatattaggaagaggaagttctttgcagaaattctaaatgcttctagggaacaccaggtgcaattaggcactacattcaagcaaagaaagcagcggaatgatggagtccaggcatggcatgttcgggcacgtcaacgtatctcacggcaagagaaaaataggttgaatcttctgaaaattggtgatcaagtagcatatatgaagatggttgaggagagcaagaacgaacgtctgaaaatgctccttgacaaaacaaatgagcttcttgaaggaattggaaaagctgtacagcgacaaaaagatgctgagcatgttagtcagcatgaagggagtgaagtgccaaaagggtcagagtctgaggattgctctcaaatctcaggcgtcaagagtgaatcacctggggaatctccttcagatgacgatgcagactttgctggctctgcagatgaaagtaaattcaatgcaggtcgtagacttgattttactgtccattccattgaagaaaaggtgacagaacaaccatcagctctcgaaggtggggaattgaggccatatcaactggagggtctccaatggatgctttctttgtttaacaacaatttgaatggcattctggctgatgaaatgggtctgggtaaaacaattcagaccatagctttgatagcttatctgttggaaaataaggaggttgcaggaccacacttaataattgctccaaaagcagtattaccaaattggtctaacgaattcaaaacctgggctcccagtattgggacaattctgtatgatggtcgtccagaagagaggaagcttttaagggaaaagaattttgatggattgcaatttaatgttttgctcacgcattatgacttgatactgaaagataagaagttcctaaagaaagttcactggcattatttgattgttgatgaaggacatcgtctgaaaaatcatgaatgtgctcttgctcgcacactagtttcagatatcagatccgccgcagactacttttaactggcactccaatccaaaatagcctacaagaactgtggtctttgcttaactttattctgcccaatatttttaattcatctcagaattttgaggaatggtttaatgcaccatttgcatgtgatgttagtcttaatgatgaggaacagctattaatcatacatcgtctgcatcaagttttgcgtccatttttgctgaggaggaaaaaagatgaagtggaaaaatatctccctgtcaaaacacaagtaattctcaagtgtgatatgtctgcttggcaaaaagcatactatgaacaagtcacaagcagggaaaaggttgcactaggatttgggctcagatcaaaggctctgcagaatctgtcaatgcaacttaggaaatgttgcaaccacccctatctatttgtagagcactacaacatgtaccagcgggaggaaattgttagagcatcagggaagtttgaattgcttgatcgtctacttccaaaactgcagagagctggtcacagggttctgcttttctctcagatgacgaaactgcttgatgttttagaaatatatttgcaaatgtacaatttcaagtacatgaggcttgatggatccacgaagactgaagaacgagggaggttactggcagattttaataagaaggattcggaatatttcatgtttctcctcagcacacgtgctggaggacttgggttgaacttgcagacggcggacactgtcattatatttgatagtgactggaaccctcaaatggaccaacaagctgaagaccgtgcccatcgtatagggcagaagaatgaagtgcgtgtgtttgttcttgttagtgtcggctccattgaagaagagatcctggaccgtgcaaaacaaaagatgggtatcgatgcaaaagttatccaggctgggttgtttaacacaacttccacagcacaggacagacgagcattgctgcaggagatccttaggagggggacaagctcgctgggaacagatatccccagtgagcgcgagataaatcgtttggctgcacgaactgatgaagaattctggttgtttgagaagatggatgaagaaaggaggcttagagaaaactacaaatctagacttatggatgggaatgaggttccagattgggtattcgccaacaatgatttacccaagagaaccgtggcagatgagttccagaatataatggtcggtgcgaagcgacgtagaaaggaggttgtctattcagactctttcggtgatcagtggatgaaatccgatgagggatttgaagacattccaaaggcgactcagaggtcgaagaagactgcttactcatctgacatccaagttgagtttagtgaaaggaggaaaagacctaggtctgtagaaaacagcgcagacggtgtgagcaacccgacgtggacgcctgacaaaggaagggctggagtttcatcatacagcaaggacgagactgaagatgatggcgaagacgaagtcattactagcggcttacaaaagggaaacagtttcacatggaataccctaggaagaagaaggtcaagccacttcagttcgtcatcggactcgagagggcgcccaacattctaatggcaacatacatgaatgttatggcctcgacctgttggttgatggaatacccttgtagagcagggctgcgactatgactgagtaccttcaagcttatgaactttattaggattactagtatactgtatggacttgttggcatgaatttgtaactcctttaaatattaattgtttaaacaactggtggtgtttgctatcataccgcgcctacatgtttttatttttttgctaatcaaagtttttgtggccag

SEQ ID NO: 207224 - DNA, 3884 bp, Zea Mays
cacacacccgtccacactcaacccgacccaatatacacaccgaggcccgaaacaataataatagtgtagtaataataaaaggaaatcactaaatttccccacccagtccgctgcgcaggccagacatccgcggcgtccgcctccccggccccgatcgatcggaagcttcggcttcccctgacacaaggccggcgcgaaaacgcccccacaaacaaacggcggaccattgccgcgcgtcgattcgaacccgccggggaaagcgccgacgccgtctcaccccgcggaggcgaaaccctagcgatggcggcgtccgtggacgctgcggcggccctggcggtgacgccccccgctgtggaggaggcgggcggcgctgttgagcaggccaggacgctcatcggcgcgctcaacctgctttcccgcaacctgccgctgccccccgacgtcctgcgcgcggtctcgtccatctaccacgatgggggtgcgggtgacgatgaggaggaggaggggggagagcgggaagcggagaaggaagggaatatggagatgacggccgcggaggagggttaccccgttgacgttgcgaccaaggggagctccttgattgaagagcttgaagatgcaatatataagaataaaaaaacaccaatatcctactcagagttagcagctctgaaagaagggcgattcaatgcatccattcagcatcggctagctgaacttgaaggattaccttctactaggggtgaagacttgcaaatgaagtgtttgcttgaaatgtatgggcttaagctgttagatttgcagaagaaagtgcgatctgatatcagtgcagaatattggctacagaagaaatgtgcatatccggagaggcaactttttgattgggggctgatgcggatacggtatcctttatccatgtatggaataggagatatcctttcaatggatgctgatgatgttcaccgcaaaaagagatttacagagaggatgtcaagactcgaagaggaagaaaaaaatcaggcagatattaggaagaggaagttctttgcagaaattctaaatgcttctagggaacaccaggtgcaattaggcactacattcaagcaaagaaagcagcggaatgatggagtccaggcatggcatgttcgggcacgtcaacgtatctcacggcaagagaaaaataggttgaatcttctgaaaattggtgatcaagtagcatatatgaagatggttgaggagagcaagaacgaacgtctgaaaatgctccttgacaaaacaaatgagcttcttgaaggaattggaaaagctgtacagcgacaaaaagatgctgagcatgttagtcagcatgaagggagtgaagtgccaaaagggtcagagtctgaggattgctctcaaatctcaggcgtcaagagtgaatcacctggggaatctccttcagatgacgatgcagactttgctggctctgcagatgaaagtaaattcaatgcaggtcgtagacttgattttactgtccattccattgaagaaaaggtgacagaacaaccatcagctctcgaaggtggggaattgaggccatatcaactggagggtctccaatggatgctttctttgtttaacaacaatttgaatggcattctggctgatgaaatgggtctgggtaaaacaattcagaccatagctttgatagcttatctgttggaaaataaggaggttgcaggaccacacttaataattgctccaaaagcagtattaccaaattggtctaacgaattcaaaacctgggctcccagtattgggacaattctgtatgatggtcgtccagaagagaggaagcttttaagggaaaagaattttgatggattgcaatttaatgttttgctcacgcattatgacttgatactgaaagataagaagttcctaaagaaagttcactggcattatttgattgttgatgaaggacatcgtctgaaaaatcatgaatgtgctcttgctcgcacactagtttcaggatatcagatccgccgcagactacttttaactggcactccaatccaaaatagcctacaagaactgtggtctttgcttaactttattctgcccaatatttttaattcatctcagaattttgaggaatggtttaatgcaccatttgcatgtgatgttagtcttaatgatgaggaacagctattaatcatacatcgtctgcatcaagttttgcgtccatttttgctgaggaggaaaaaagatgaagtggaaaaatatctccctgtcaaaacacaagtaattctcaagtgtgatatgtctgcttggcaaaaagcatactatgaacaagtcacaagcagggaaaaggttgcactaggatttgggctcagatcaaaggctctgcagaatctgtcaatgcaacttaggaaatgttgcaaccacccctatctatttgtagagcactacaacatgtaccagcgggaggaaattgttagagcatcagggaagtttgaattgcttgatcgtctacttccaaaactgcagagagctggtcacagggttctgcttttctctcagatgacgaaactgcttgatgttttagaaatatatttgcaaatgtacaatttcaagtacatgaggcttgatggatccacgaagactgaagaacgagggaggttactggcagattttaataagaaggattcggaatatttcatgtttctcctcagcacacgtgctggaggacttgggttgaacttgcagacggcggacactgtcattatatttgatagtgactggaaccctcaaatggaccaacaagctgaagaccgtgcccatcgtatagggcagaagaatgaagtgcgtgtgtttgttcttgttagtgtcggctccattgaagaagagatcctggaccgtgcaaaacaaaagatgggtatcgatgcaaaagttatccaggctgggttgtttaacacaacttccacagcacaggacagacgagcattgctgcaggagatccttaggagggggacaagctcgctgggaacagatatccccagtgagcgcgagataaatcgtttggctgcacgaactgatgaagaattctggttgtttgagaagatggatgaagaaaggaggcttagagaaaactacaaatctagacttatggatgggaatgaggttccagattgggtattcgccaacaatgatttacccaagagaaccgtggcagatgagttccagaatataatggtcggtgcgaagcgacgtagaaaggaggttgtctattcagactctttcggtgatcagtggatgaaatccgatgagggatttgaagacattccaaaggcgactcagaggtcgaagaagactgcttactcatctgacatccaagttgagtttagtgaaaggaggaaaagacctaggtctgtagaaaacagcgcagacggtgtgagcaacccgacgtggacgcctgacaaaggaagggctggagtttcatcatacagcaaggacgagactgaagatgatggcgaagacgaagtcattactagcggcttacaaaagggaaacagtttcacatggaataccctaggaagaagaaggtcaagccacttcagttcgtcatcggactcgagagggcgcccaacattctaatggcaacatacatgaatgttatggcctcgacctgttggttgatggaatacccttgtagagcagggctgcgactatgactgagtaccttcaagcttatgaactttattaggattactagtatactgtatggacttgttggcatgaatttgtaactcctttaaatattaattgtttaaacaactggtggtgtttgctatcataccgcgcctacatgtttttatttttttgctaatcaaagtttttgtggccag

SEQ ID NO: 207225 - DNA, 2565 bp, Zea Mays
cgcaaatcgccatcggtgaggtgatggacatcccccacgcgctgttcgaagagaagcttgaagccatgaagaaagccaaggggctgaagaacgacaccgacctcaccgccaccgacctcaaagagctggtgagccagtacaagaacgtctacgtggaggctaagggagagccattcccctcagaccccaagaggcagctggagttggcagtgctggccgtgttcgactcgtgggagagcccgagggcaaagaagtacaggagcatcaaccagatcaccggcctcagaggcaccgccgtgaacgtgcagtgcatggtgttcggcaacatggggaacacctctggcaccggcgtgctcttcactaggaaccccaacaccggagagaagaagctgtacggcgagttcctggtgaatgctcagggcgaggatgtggttgctggaatcagaaccccggaggatcttgatgccatgaaggacgttatgccacaggcctacaaagagctagtcgagaactgcaggatactggagagccactataaagaaatgcaggacatcgaatttactgttcaggagagcaggctgtggatgttgcagtgcaggacagggaaacgtacgggcaaaagcgccgtaaagatcgccgtggacatggttaacgagggccttgttgagcgccgtgcggcgatcaagatggtagagccaggccacctggaccagcttctccatcctcagtttgagaacccatcggcgtacaaggaccaagtcattgccacgggcctaccggcgtcacctggggccgctgtgggccaggttgtattcactgctgaggacgctgaaacatggcattcccaagggaaatcagttattctggtgagggcggagaccagccctgaggacgtcggcggcatgcacgcggctgcaggaatcctcacagaaagaggtggcatgacctcccatgccgccgtggtcgcacgcgggtggggaaaatgctgtgtctcgggatgctctgggattcgtgtaaatgacgcagagaaggttgtgaagattggaggcaatgtgctgcgcgaaggtgagtggctatcgctgaatggatcgaccggcgaagtgatcctcggaaagcagccgctctccccaccagccctcagtggcgatctgggaacattcatgtcctgggtggatgacgttagaaagctcaaggtcctggcaaacgcggatacccctgaggatgcattggctgcacggaacaacggggcagaaggaatcgggttatgccggacagagcacatgttcttcgcttcggatgagaggattaaggctgtgaggcagatgattatggctcccacagttgagctgaggcagcaggcgctggatcgccttctgccttaccagaggtctgacttcgaaggcattttccgtgctatggatggactttcagtgactattcgacttctggaccctcccctccacgagttccttccagaagggaacgtcgaggaaatcgtgcgtgaactgtgttctgagacgggagccaaccaggaggatgccctcgcacggatcgaaaagctttcggaagtaaacccgatgcttggcttccgtggctgcaggcttggtatatcgtaccctgagctaacagaaatgcaagcccgtgccatctttgaagctgctatagcgatgaccaaccagggcgttcaagtctttccagagataatggttcctcttgttggaacaccgcaggaattgggacatcaggtggcccttatccgtcaagtcgctaacaaagttttcaccagtatggggaaaactattgggtacaagatcggaacgatgattgagattcccagggcagctctagtggctgacgagatcgcggagcaggctgaattcttctcctttggaacgaacgacctcacgcagatgacctttggctacagcagggatgatgtggggaagttcatccccatttatctggctcagggcatcctccagcatgaccccttcgaggttctcgaccagagaggagtgggcgagctggttaagcttgctacagagaggggccgcaaagctaggcctaacttgaaggtgggcatttgtggagaacatggtggagagccttcatcggttgctttcttcgccaagactgggctggattacgtttcttgctcccctttcagggtcccgatcgctaggctagctgcagctcaggtgcttgtctgaggggctgcctcctcgttggcagcctgctgttggtgcatctggtgattaataatactactatgacagagccatatgctctgtgaagagtattagtagcagcgctcataaaagctacagttccatctattttctcagctatgtaaaacttccaaactgttcatgcttaaaactgagggttttcgtggtgtgagatgtgcatgtcgttgttgaggccattgctgcacattccacctattgaggccctcctcaaattaagcctcgaaaaagctgatatcttttcgtagaactctagactccggtgaatgcaactggctggtttgcttccgaggcaattcgttttattcctgcaaaagaa

SEQ ID NO: 207226 - DNA, 2614 bp, Zea Mays
agacagacaagtactccaccacacacacacacgcgcctcccctcacgaaattcacaaacccaccggaggcacagaaatttcccagcgaaggaaaaatccagtccgaaatccagcgctccaaatccgttcgtccccaaggcgctcccccgaacccgtcccgaatcccgcaaatccccgctgaaattccccaatcctccgtgctcgccgccgccctgcgaccggtcccgcccgcctcgtgtcggagccgctgccgcggatttccgcccgagggtttcgtctcgctctcgctctctccgccctactgccgccacagattggcgcgaccgacccttcatcgagggccttcttccgcccgcgaggccggggctcctcccgcggaaattcactctcgtccagaagcggcggcgctctcctcttcatcgccgcccccgcgctcttctggtactcgagtggcgtggggtggagatccaccagggcgtggatccattcctcttcgttcggtggtttttatccttcaggcgcggaatatcaatctatagaggtgcacgaggactttatatatccccatattttcgggggttcaactgaacccccatgccccacgctaagtccgcccctggtggtggtggactggattggtggacagtgctgattttgtcgcgggcatggagcgaagtgagccctcgctgaagccagaatggctgctgcggcccacagtacctgccacaacctataagccggcgactttgccccacacagatgatcacggcagaggtgcttcgtcaagaaaccgttcatcaggacgagatcgtgatcggagctcccaacattcctcatctcggagaggttcaagctctagtggtccaaggcggaatgatcgagatggtatagggaaatcaagaggctatggtaattttggaaagcacaacaaggaaaggatacaagagaaggacctggatttccgtgaccgggagagtaggttggttcagtcagacgatcctttacgtgatggctttgagtcatttagctcatgcagatccgaaaaggacaggcttaaccgtactcgttcaaaggtggccatatcaaatcgggcagtaggagtaagtttagacaatggtaatgtatctaaaaaagataatggtgtcatctcttttgagcgggaattcccacaccttgattctgaggacaaaaatggaaagcaagacataggtcgagttccatctcctggaattagcaccccaattcagaacataccactggtagtatctgatggctggaattcagtgcttgcgatgttaggggatccaaacattaactctgtttcctcttcctcaacacatgctggttctagtaaacagactgaagtttccaactctgggagtgcgttaagcatggctgaaacagtgatgcagtcgccattaaagatttctaccacacctcagttatcgattgatgcccagaagattgaagaaagaactatgaggcagtgcattctaagacctcttacaccatcatcaaacaaaatacctgcatctagttctttggataagttattaaaatccaaaggtgcaagagctggagagtctaatggtcctatcaaggttgctccacaactgtcaacacagccatctagcaactctgttcgcactccagtcaaaactgagctcgtaaagcaatctcaatcaggcagccttcaagtccttagtcgcgagcagaatggtgctgtaaatactgctgccaaagacagcaccagcaatcctgtgagccctgttctgggtcgatcttcttcaatggaaccgatgagaaagtctattgtcagcccaaagcttaaggttggcactaatggtcgttctttgcatccgctgcaaggttcatttgctgacagaaaagcaagtgcaaaagacaagtacaagttttttgagatgttgcggagtaagtctgtaaatggttcgagcgctgctattgagtctccatcaagcctgactgatgatcagcagaactctaatcttgatttgcctttcaagtttattgaaaatgggagcagttcctgtgaagaagcaaattcttgtgagggatcacagcgacacttgtcggacaatgagaccattccaccttcagaatctcatgatgttttagatgaaggatctctgggtattcaagttgaggacaaggatgtcagctcttcacaagtacttggtggcacacaagatttatcttctaagaagccccaggaagacaatgttaatattgtgcccatcgtacctgtctatgtaaatgatggtttaatgatgcccaattctgttgatgatgaagcaagtttgccgttagaggaaaccaatcctgccgaagtgttacagcacattggagcaggggaggagaatccctgtcctgctcaagagttcgagtccattggagcaggtggggaggaagagttgaacctcctaagatctatgggctgggatgagaacgaagatgttcagcctcttcagcaggaggagattgctgattgttgcctttcttttggtcgccatctttttttcttttgaaaaggaagggaaaaataacgatcgagcttaacatggaaaaggtgcacaggaaataccttggtcttcaa

SEQ ID NO: 207227 - DNA, 3224 bp, Zea Mays
ttcacaaacccaccggaggcacagaaatttcccagcgaaggaaaaatccagtccgaaatccagcgctccaaatccgttcgtccccaaggcgctcccccgaacccgtcccgaatcccgcaaatccccgctgaaattccccaatcctccgtgctcgccgccgccctgcgaccggtcccgcccgcctcgtgtcggagccgctgccgcggatttccgcccgagggtttcgtctcgctctcgctctctccgccctactgccgccacagattggcgcgaccgacccttcatcgagggccttcttccgcccgcgaggccggggctcctcccgcggaaattcactctcgtccagaagcggcggcgctctcctcttcatcgccgcccccgcgctcttctggtactcgagtggcgtggggtggagatccaccagggcgtggatccattcctcttcgttcggtggcgcggaatatcaatctatagaggtgcacgaggactttatatatccccatattttcgggggttcaactgaacccccatgccccacgctaagtccgcccctggtggtggtggactggattggtggacagtgctgattttgtcgcgggcatggagcgaagtgagccctcgctgaagccagaatggctgctgcggcccacagtacctgccacaacctataagccggcgactttgccccacacagatgatcacggcagaggtgcttcgtcaagaaaccgttcatcaggacgagatcgtgatcggagctcccaacattcctcatctcggagaggttcaagctctagtggtccaaggcggaatgatcgagatggtatagggaaatcaagaggctatggtaattttggaaagcacaacaaggaaaggatacaagagaaggacctggatttccgtgaccgggagagtaggttggttcagtcagacgatcctttacgtgatggctttgagtcatttagctcatgcagatccgaaaaggacaggcttaaccgtactcgttcaaaggtggccatatcaaatcgggcagtaggagtaagtttagacaatggtaatgtatctaaaaaagataatggtgtcatctcttttgagcgggaattcccacaccttgattctgaggacaaaaatggaaagcaagacataggtcgagttccatctcctggaattagcaccccaattcagaacataccactggtagtatctgatggctggaattcagtgcttgcgatgttaggggatccaaacattaactctgtttcctcttcctcaacacatgctggttctagtaaacagactgaagtttccaactctgggagtgcgttaagcatggctgaaacagtgatgcagtcgccattaaagatttctaccacacctcagttatcgattgatgcccagaagattgaagaaagaactatgaggcagtgcattctaagacctcttacaccatcatcaaacaaaatacctgcatctagttctttggataagttattaaaatccaaaggtgcaagagctggagagtctaatggtcctatcaaggttgctccacaactgtcaacacagccatctagcaactctgttcgcactccagtcaaaactgagctcgtaaagcaatctcaatcaggcagccttcaagtccttagtcgcgagcagaatggtgctgtaaatactgctgccaaagacagcaccagcaatcctgtgagccctgttctgggtcgatcttcttcaatggaaccgatgagaaagtctattgtcagcccaaagcttaaggttggcactaatggtcgttctttgcatccgctgcaaggttcatttgctgacagaaaagcaagtgcaaaagacaagtacaagttttttgagatgttgcggagtaagtctgtaaatggttcgagcgctgctattgagtctccatcaagcctgactgatgatcagcagaactctaatcttgatttgcctttcaagtttattgaaaatgggagcagttcctgtgaagaagcaaattcttgtgagggatcacagcgacacttgtcggacaatgagaccattccaccttcagaatctcatgatgttttagatgaaggatctctgggtattcaagttgaggacaaggatgtcagctcttcacaagtacttggtggcacacaagatttatcttctaagaagccccaggaagacaatgttaatattgtgcccatcgtacctgtctatgtaaatgatggtttaatgatgcccaattctgttgatgatgaagcaagtttgccgttagaggaaaccaatcctgccgaagtgttacagcacattggagcaggggaggagaatccctgtcctgctcaagagttcgagtccattggagcaggtggggaggaagagttgaacctcctaagatctatgggctgggatgagaacgaagatgttcagcctcttcagcaggaggagattgctgattgtctaaagcagaacgtcaggctgcagcagaagcttcaagaatgcaagggctgatcgcagaatcaatggagcaacgtcactgtgcctcaccacactgagggggtgtttgatacctgggctaaagtttagtccaggttttggatgccaaatgggaggactaaacatgagctgattataaaactaattacataaacagtggctaattcgcgaaacaaatctatttggcctaattagtctactattagcacttgtttactgtagcaaaacatgagctaattatagattaattatgcttgataaattgtctcgtgaattagcaaaaacctgtacaattagctctataattagatcatgttcagttctcctaattggcatccaaaacccagaccaaaccttagtcccggggatgatccaaacacatgtggagctgggttttgggaccttccggtcaaccgatcagagaatgattgtctagcttagcaaatggagagttttgtttttgttaatgcttgttcagcattgtggggggaggttccatggtagagctgataattttcccccattgataagaggttttagggtttttcttcctcattttcccagaaggaatacaccaaatagaagccttgtctggtgtcggaggcacgtagtgtgtgttgctctgaaagaagaataggttgcctttcttttggtcgccatctttttttcttttgaaaaggaagggaaaaataacgatcgagcttaacatggaaaaggtgcacaggaaataccttggtcttcaa

SEQ ID NO: 207228 - DNA, 1804 bp, Zea Mays
ccgaaggtcctggggtcgacgcagcctctctgcaaaatgcaggggcatctagttctttggataagttattaaaatccaaaggtgcaagagctggagagtctaatggtcctatcaaggttgctccacaactgtcaacacagccatctagcaactctgttcgcactccagtcaaaactgagctcgtaaagcaatctcaatcaggcagccttcaagtccttagtcgcgagcagaatggtgctgtaaatactgctgccaaagacagcaccagcaatcctgtgagccctgttctgggtcgatcttcttcaatggaaccgatgagaaagtctattgtcagcccaaagcttaaggttggcactaatggtcgttctttgcatccgctgcaaggttcatttgctgacagaaaagcaagtgcaaaagacaagtacaagttttttgagatgttgcggagtaagtctgtaaatggttcgagcgctgctattgagtctccatcaagcctgactgatgatcagcagaactctaatcttgatttgcctttcaagtttattgaaaatgggagcagttcctgtgaagaagcaaattcttgtgagggatcacagcgacacttgtcggacaatgagaccattccaccttcagaatctcatgatgttttagatgaaggatctctgggtattcaagttgaggacaaggatgtcagctcttcacaagtacttggtggcacacaagatttatcttctaagaagccccaggaagacaatgttaatattgtgcccatcgtacctgtctatgtaaatgatggtttaatgatgcccaattctgttgatgatgaagcaagtttgccgttagaggaaaccaatcctgccgaagtgttacagcacattggagcaggggaggagaatccctgtcctgctcaagagttcgagtccattggagcaggtggggaggaagagttgaacctcctaagatctatgggctgggatgagaacgaagatgttcagcctcttcagcaggaggagattgctgattgtctaaagcagaacgtcaggctgcagcagaagcttcaagaatgcaagggctgatcgcagaatcaatggagcaacgtcactgtgcctcaccacactgagggggtgtttgatacctgggctaaagtttagtccaggttttggatgccaaatgggaggactaaacatgagctgattataaaactaattacataaacagtggctaattcgcgaaacaaatctatttggcctaattagtctactattagcacttgtttactgtagcaaaacatgagctaattatagattaattatgcttgataaattgtctcgtgaattagcaaaaacctgtacaattagctctataattagatcatgttcagttctcctaattggcatccaaaacccagaccaaaccttagtcccggggatgatccaaacacatgtggagctgggttttgggaccttccggtcaaccgatcagagaatgattgtctagcttagcaaatggagagttttgtttttgttaatgcttgttcagcattgtggggggaggttccatggtagagctgataattttcccccattgataagaggttttagggtttttcttcctcattttcccagaaggaatacaccaaatagaagccttgtctggtgtcggaggcacgtagtgtgtgttgctctgaaagaagaataggttgcctttcttttggtcgccatctttttttcttttgaaaaggaagggaaaaataacgatcgagcttaacatggaaaaggtgcacaggaaataccttggtcttcaa

SEQ ID NO: 207229 - DNA, 2904 bp, Zea Mays
ctcctccgtcctcccacctcccgccatgagcataaaaataaagaaaaaaaataaaagaaaccccctcttcccctgaccgccgccgtcaccgccgagcacacctctagtcagcttccactggagcacgccaccccgaattttctcccggagtcgttgccctcctctcctacccccgtacactaaagctggttcgcagatccatccggacttgatcggttccttcttttatttcttgcccatagagcccaaacattattggatggactctgtcacttgctgcgacggcggcaaggaattggaataggacgaggtggggatcacgggctgcgacggcggcaagaaattggaaaaggacggcgtggggatcagggtattcgtcttgggaaaggggatggggggtctctgctcgaaggtctcagctgtagacaagtcaccgagcgacaccgcgcttggccggaaccaggtcgccgatcatgagccaggggcgtcgttggagttggagaagccaccggtgtcccgagagtcagctgcgccggcaaagcggctggacgagcagctgcagtctttctcgttccttgagagcgtcgtccctggggttgcttttcatgccggggctaacacgggcggcgaagcggggtccaggacctcgccgcagctgaccaggtcgctgtcccagagggctggtgtgggcaaggcaaaagccggcgctgccaaggtttcagaagtgagctcaattttaggtagagctagcactgctgggcttgaaaaggcagtggaggttctagatacacttggcagtagcatgacaagtttaaattccagcagtggttttgtgtcaagttctgcagcaaagggaaacaaaatatccatgctggcttttgaggtggcaaatactatagttaaaggctctaatctgatgcgttctctatcggaacctagcataaagcatctgaaggaggtggtgcttcattcagaaggtgttgaaaaccttatatccaaagattttgatgaactgctcaagatggcatctgctgacaaaagggaagagttagaagtattcacaagagaggttgttcgctttggaaaccgttgcaaggatcctcaatggcataacttggaccgctactttgaaaaactggcatctgaacgaaccccacaaagttatctgaaagaaaaggcagaatcagtgatgcagaaactggtcacctgcgttcaaaatacagttaattatatcatgaattgcatgctttggatagatttgagcatgattgtcgtcttaaacagaaagaacaggatggcttgagttcaagaggagacaacctggatatactgaagcaggaattgaaggtccagagtaagcatgttaagagtctgaaaaagaaatcactttggtccaagaatttggaagaggtgatggtaaagcttgtagatattgtccacttcttatatttggagatatataatgccttcggtcgtcctgacagtgaagagccacaagaacctgccaaacaccataatagattgggaccagcaggccttgcattgcattatgctaatatcatcaatcagattgacaatcttgtttctcgatcatgtgcaatgcctccaaatgcaagggatacattatatcatagcttaccacctaccatcaaatctgctttccgttctaagctacaatcttttgaagtcaaggaagagcttacagcttctaggatcaaagcagaaatggaaaagactttgcgttggcttgtcccttttgctagtaacacaaatagggcacaccatggcttcggttgggttggagagtgggcaaatacaggatctgaattaaactgcaagatatcagggcagatggacatgtcccgaatggagaccttgtatcatgctgacaaggagaagaccgaagcacttatcctggagctagtcgtgtggcttcatcatcttatcagcaaatcaggaaacgccagtggaggtgtaaggtctcccatcaaatctccagtcagctcaccaacacaaaagggtgctgcaatcacactgttgtcgggcaaaacaaacaatttgccaccgattctcacccaagaggaccaggatatgctaaggggtgttaagtacaggaaatttgttccaggaataagcaaaagccaagagtttgacacaaagtcaagtcacagcaaacatagtaggttgagcaagagcaacagccactctccggccagtggcagcagaaaagacttgctcccagttaggaggtcttccatgcttccagttattgacttcgagattgacaggaccaaggctttggatctaattgacaggcttgacaacctaaaagtacaatgagcatgaagcttattgtggtcatccgcagttcttgaaaccccagccgcgatataaacagttatcgtgtatcagcagcaagaccgcccgttaggctctgcggttacaagataacaaacagtatgataagttggtgtctcagatcctgtaccgaatagaataggaaaaaatgttgtaaaaattacctgtcgtttctacctgtacaagaaatggaaagtgcagtttttaagaaaaaaaggagggtgaaagggatctaggtgttctatgttttcatggccattagactggaatggtgtgtatgaaccatagtactcccgtcccaaaatattagtcgttttagctcttgatttttatatatctatattcaaatggatgatgaatctagataaatatataaaacaaatacattgattattgtatgaatcaactaaaaagataaataaattttattttgagatgaagggagtatctttttttgcagaaaaaaataaaagcagggaacttagtgtcaatttacccagttccccaatctaattgatcattcataagtataagagcaactaaatt

SEQ ID NO: 207230 - DNA, 2779 bp, Zea Mays
cttcccctgaccgccgccgtcaccgccgagcacacctctagtcagcttccactggagcacgccaccccgaattttctcccggagtcgttgccctcctctcctacccccgtacactaaagctggttcgcagatccatccggacttgatcggttccttcttttatttcttgcccatagagcccaaacattattggatggactctgtcacttgctgcgacggcggcaaggaattggaataggacgaggtggggatcacgggctgcgacggcggcaagaaattggaaaaggacggcgtggggatcagggtattcgtcttgggaaaggggatggggggtctctgctcgaaggtctcagctgtagacaagtcaccgagcgacaccgcgcttggccggaaccaggtcgccgatcatgagccaggggcgtcgttggagttggagaagccaccggtgtcccgagagtcagctgcgccggcaaagcggctggacgagcagctgcagtctttctcgttccttgagagcgtcgtccctggggttgcttttcatgccggggctaacacgggcggcgaagcggggtccaggacctcgccgcagctgaccaggtcgctgtcccagagggctggtgtgggcaaggcaaaagccggcgctgccaaggtttcagaagtgagctcaattttaggtagagctagcactgctgggcttgaaaaggcagtggaggttctagatacacttggcagtagcatgacaagtttaaattccagcagtggttttgtgtcaagttctgcagcaaagggaaacaaaatatccatgctggcttttgaggtggcaaatactatagttaaaggctctaatctgatgcgttctctatcggaacctagcataaagcatctgaaggaggtggtgcttcattcagaaggtgttgaaaaccttatatccaaagattttgatgaactgctcaagatggcatctgctgacaaaagggaagagttagaagtattcacaagagaggttgttcgctttggaaaccgttgcaaggatcctcaatggcataacttggaccgctactttgaaaaactggcatctgaacgaaccccacaaagttatctgaaagaaaaggcagaatcagtgatgcagaaactggtcacctgcgttcaaaatacagttaaagaacaggatggcttgagttcaagaggagacaacctggatatactgaagcaggaattgaaggtccagagtaagcatgttaagagtctgaaaaagaaatcactttggtccaagaatttggaagaggtgatggtaaagcttgtagatattgtccacttcttatatttggagatatataatgccttcggtcgtcctgacagtgaagagccacaagaacctgccaaacaccataatagattgggaccagcaggccttgcattgcattatgctaatatcatcaatcagattgacaatcttgtttctcgatcatgtgcaatgcctccaaatgcaagggatacattatatcatagcttaccacctaccatcaaatctgctttccgttctaagctacaatcttttgaagtcaaggaagagcttacagcttctaggatcaaagcagaaatggaaaagactttgcgttggcttgtcccttttgctagtaacacaaatagggcacaccatggcttcggttgggttggagagtgggcaaatacaggatctgaattaaactgcaagatatcagggcagatggacatgtcccgaatggagaccttgtatcatgctgacaaggagaagaccgaagcacttatcctggagctagtcgtgtggcttcatcatcttatcagcaaatcaggaaacgccagtggaggtgtaaggtctcccatcaaatctccagtcagctcaccaacacaaaagggtgctgcaatcacactgttgtcgggcaaaacaaacaatttgccaccgattctcacccaagaggaccaggatatgctaaggggtgttaagtacaggaaatttgttccaggaataagcaaaagccaagagtttgacacaaagtcaagtcacagcaaacatagtaggttgagcaagagcaacagccactctccggccagtggcagcagaaaagacttgctcccagttaggaggtcttccatgcttccagttattgacttcgagattgacaggaccaaggctttggatctaattgacaggcttgacaacctaaaagtacaatgagcatgaagcttattgtggtcatccgcagttcttgaaaccccagccgcgatataaacagttatcgtgtatcagcagcaagaccgcccgttaggctctgcggttacaagataacaaacagtatgataagttggtgtctcagatcctgtaccgaatagaataggaaaaaatgttgtaaaaattacctgtcgtttctacctgtacaagaaatggaaagtgcagtttttaagaaaaaaaggagggtgaaagggatctaggtgttctatgttttcatggccattagactggaatggtgtgtatgaaccatagtactcccgtcccaaaatattagtcgttttagctcttgatttttatatatctatattcaaatggatgatgaatctagataaatatataaaacaaatacattgattattgtatgaatcaactaaaaagataaataaattttattttgagatgaagggagtatctttttttgcagaaaaaaataaaagcagggaacttagtgtcaatttacccagttccccaatctaattgatcattcataagtataagagcaactaaatt

SEQ ID NO: 207231 - DNA, 1318 bp, Zea Mays
gtattctagtatacaccaaaaaagagaaaaagaaaagcaccgaaaaactagcaaaccctacctcctctcctccccctcctcggcggcggaatgtccgaccgccgccgcgacaaggagaagccccgcgaccgcgacatcgaccgtcatcgcgaccgagaccgcgacatcgaccgtcatcgcgaccgagaccgcgaccgggaccgggacagggacagagatcgcgagcgagaccaccgccgcgagcgcgagcggaagcgctcccgctcccggtccccgtcggcggatcgggaccgctcccaccgccgccactctcattcgcaccgaggccgtccttccccctctcccgacgccggccgccacaagcgccgccgcgaggcgtcccctgcctccgcggaccatcaccataaggaggaaaagaaggctgccgactctcacgcgacacccggcggaggggacatcgcggccgcggccgctgcggtgggtgacggcgacgtgaatgcggaggaactggagatgatgaagatgatgggcattcccgtcggtttcgactccaccaaggggaagcacgtgcccgacgccgacgtcagcggggtgcgtgccgtcaccaagcgccagccgcgccagtacatgaaccgccgcggcggattcaaccgccctctgccgcctgagcgcaaccgctaaggatgggaaaaggatcatgcgccaacacaaggatgtgctgatttctgggtagcagttactctgttactggacagtgtagtgagcatgaaaacagaatttggtggatcattttgaaactgtggctttacagctttaacatgatgtttctggctttctccgtgcaatttggtaatcaggcatgcaccacatggattcccaagtgaaactgcttttgcttttagttgtatgctttgcaatgaaattattggtaatggacatgagtgcaacatttgtgattataagtttcgaagatctcactgagtagcaggaccaaagagacctgttctttcaataatacgtagaataattctgtaataataatttaagtttaggctactgcattagatccagaaaccagtaccttgagtggtcgaccagtttatggtttgagggaattatagggcaatagtttgaggttgctagatcacttactagtttgctttatgctccagtggttgtttcatgtaagtttgttgtatgctgatgctgccatcctgacaatttaccttggctgctgtcgtgcgctgtttggacaagacaatgcaatatcagaactcgggtatgtgtttgatgttaaatgattaaggactgggttggc

SEQ ID NO: 207232 - DNA, 1949 bp, Zea Mays
catcgatccatttcagctgccgcgcgtccctgcggtcttccagctccagcgtcggctgctcctccctggccacccgcgccccttgcttctcccttctcacgctccccgtcgagctccctggtcgccgcgcagtcgagctccctcagctcgctcctcctgtgccgcgcgccagcccctggttcggctctactcctccctgcttgccgttcctatccccctgccatggagtccgtcgtcagtccgagctcgcccatcctctgctcggtttcaacttggtcgtgcctgcagcttctcccatagtgagctccctccactgccctaggttcccatgattatcctcatgcccgaccacggtacaacagcaacagccatgaaaccccttcgtgtcgcgccctcgatatgctcgatgaaataccgcagcgagctccgctccggatctgcgcagccccggccttgttgtcgacctcagtacgataagtgatcacgtgatgtgaaggactagagctcggtcgaccacaagatggtgttaagtattggtttcttcgcaaggtgatgctaatgaacaaacttaaggatggacagactgaaccagtgccaacacacaaggctggtcgccaagtggtcatcgtctaacaacactaacctagtgttatcccaggcaagccccagtgcatttgccacctccttgctgttttaaaaacattttatcacttatatgctgcattaggtggtaggagttgaatgggtaaacctttgctgcataacttccttgaattattgattatcatccttgatacctgatttgaaaatctagatatgcttagcctgcttatagacaaggaacaaaatattttgatgtatgaatcatgtttttacaaagaaaaaggggctggaatgatgaaggtatcaaaggtcttgatgacttcatcatttcggtagggtacctctaataggttccagattttcagaattattttaatatgagaccagacgttgagcaggaaaggtcgcccgtttgtgtcgattaaggaccgtaccgaaagtaggcttgctgatctaggaccctttaactggccacatgcctcatcatgggtaagcttagcctcggtcggaccaataccagaaaggccggcctgcaatgggagtggagagatggcgagagtatcgtgtatccacctggcaagaggctggatggtggggtactgagctctcggttagcggggacctgttctggtcttaagaaacccgtgggcgagttgacatatgcaagggttaagtgctacatatgtcgtgtggttggagatcctcagctgagtattaatcgattcggatcgctgttacttctcggatatgaagactagatcactgccctgcatcataattaacaagtgaaactaaagatgttaaaatgaagctagtgtagaacaattgaatgctctagattaggcaaatctagattcaggaaaagtacttaatttgtgaagtaaaagttggcataaggatccactactagtaagcttttctgcaaaaacgagtctttgaaatttgatgagctttaccttgattcccaacaaaccagcatatccttgagagtcttttctttagtcgggtaagtcttgctgagtaattgcgtactcagggctttattccctattgtttttcaggttataagtttgttctgttgtggatagtgtggatggtgctaagtgccggtgggctcggcctttttatataagtatatcacatctttagcttctttattgaggattgtcaattaagctagcatgtattttaaaaactataaatattttattcattttaaattataattcttttgaatcactctcttttgtaatcactccgataattgtataatgtaaacttattgtaacatgtaatcattttgcaatagagaatttatttccactgcaaatgatggtgtgtgattt

SEQ ID NO: 207233 - DNA, 735 bp, Zea Mays
ctatttcaattcaaatttcaatgcctgatacccaaaggagtccaaccagggcaagttgtagttttaagggggaaaggattgccaaatccgtcaggatatttgggggaccaatatgtccgattccgaattcatttcccctcggtggttactgaacgtcagcgcatgctgctggaagaatttgcagtagaggaagctgcgaaagaacataacacttttgtagcaggaaattggtgggagctagttgcagaaaatatgacaaagcaaaatgtcatggtcggaatcggcatcctcctactgattcacctaatgctgagcaaagctatgaattaaggcttggacccatgctcatttgtgctggggcagtggtggggcaacgtcaaacagtaaaaattctccgaagattcagcataaaacaataaaacaatgagattgtgaatctttaaagactattttcacccactagagatcacaattttgaaggtgttggttagaaggttgttgatttctatggtaaaatacattacaataatatctgctcacatagttctgaactatatgaagctgtcaattgagttgccttaattttttccccctctttcggtgtaaatgtaatgtggatgctctacagttggaatagttcaacgtgctgggtgaaattgaatgtatcttttaaattcacccatcttgtcttggatcatattaccttttttcattttccacacccgtggtcccgtg

SEQ ID NO: 207234 - DNA, 724 bp, Zea Mays
gtagaaattgatccgttgtttacccgagatggtgctgacatccatgtcgataaaaggataagcttcacacaggcaatgcttggtggaaaagttgaagtacctactttaaatgggaaaacagaagtgaagggtggttactgaacgtcagcgcatgctgctggaagaatttgcagtagaggaagctgcgaaagaacataacacttttgtagcaggaaattggtgggagctagttgcagaaaatatgacaaagcaaaatgtcatggtcggaatcggcatcctcctactgattcacctaatgctgagcaaagctatgaattaaggcttggacccatgctcatttgtgctggggcagtggtggggcaacgtcaaacagtaaaaattctccgaagattcagcataaaacaataaaacaatgagattgtgaatctttaaagactattttcacccactagagatcacaattttgaaggtgttggttagaaggttgttgatttctatggtaaaatacattacaataatatctgctcacatagttctgaactatatgaagctgtcaattgagttgccttaattttttccccctctttcggtgtaaatgtaatgtggatgctctacagttggaatagttcaacgtgctgggtgaaattgaatgtatcttttaaattcacccatcttgtcttggatcatattaccttttttcattttccacacccgtggtcccgtg

SEQ ID NO: 207235 - DNA, 874 bp, Zea Mays
gtagaaattgatccgttgtttacccgagatggtgctgacatccatgtcgataaaaggataagcttcacacaggcaatgcttggtggaaaagttgaagtacctactttaaatgggaaaacagaagtgaagatacccaaaggagtccaaccagggcaagttgtagttttaagggggaaaggattgccaaatccgtcaggatatttgggggaccaatatgtccgattccgaattcatttcccctcggtggttactgaacgtcagcgcatgctgctggaagaatttgcagtagaggaagctgcgaaagaacataacacttttgtagcaggaaattggctttatcagcagctatctactggttaatacttacaggtgggagctagttgcagaaaatatgacaaagcaaaatgtcatggtcggaatcggcatcctcctactgattcacctaatgctgagcaaagctatgaattaaggcttggacccatgctcatttgtgctggggcagtggtggggcaacgtcaaacagtaaaaattctccgaagattcagcataaaacaataaaacaatgagattgtgaatctttaaagactattttcacccactagagatcacaattttgaaggtgttggttagaaggttgttgatttctatggtaaaatacattacaataatatctgctcacatagttctgaactatatgaagctgtcaattgagttgccttaattttttccccctctttcggtgtaaatgtaatgtggatgctctacagttggaatagttcaacgtgctgggtgaaattgaatgtatcttttaaattcacccatcttgtcttggatcatattaccttttttcattttccacacccgtggtcccgtg

SEQ ID NO: 207236 - DNA, 848 bp, Zea Mays
gaacaattcaagtagaaattgatccgttgtttacccgagatggtgctgacatccatgtcgataaaaggataagcttcacacaggcaatgcttggtggaaaagttgaagtacctactttaaatgggaaaacagaagtgaagatacccaaaggagtccaaccagggcaagttgtagttttaagggggaaaggattgccaaatccgtcaggatatttgggggaccaatatgtccgattccgaattcatttcccctcggtggttactgaacgtcagcgcatgctgctggaagaatttgcagtagaggaagctgcgaaagaacataacacttttgtagcaggaaattggtgggagctagttgcagaaaatatgacaaagcaaaatgtcatggtcggaatcggcatcctcctactgattcacctaatgctgagcaaagctatgaattaaggcttggacccatgctcatttgtgctggggcagtggtggggcaacgtcaaacagtaaaaattctccgaagattcagcataaaacaataaaacaatgagattgtgaatctttaaagactattttcacccactagagatcacaattttgaaggtgttggttagaaggttgttgatttctatggtaaaatacattacaataatatctgctcacatagttctgaactatatgaagctgtcaattgagttgccttaattttttccccctctttcggtgtaaatgtaatgtggatgctctacagttggaatagttcaacgtgctgggtgaaattgaatgtatcttttaaattcacccatcttgtcttggatcatattaccttttttcattttccacacccgtggtcccgtg

SEQ ID NO: 207237 - DNA, 1702 bp, Zea Mays
tttgcaaatattatgtggtcataataatgaagtttggtttgtaaggttctcaaataatggaagctacctggtgtcatcttcaagtgattgcactgccataatttggaaggtggaaaatgatgatacattgaccaagaagcactgcctccagggtcacgaaaaaccaatttcctttgcttcctggagcccaaatgacagaatgctgctcacttgtggtactggtgaatcattaaaactgtggaatgttgatactggtgaatgtaaccttaaattcagaggctcagcagactgcatcatcagttcatgtgcatggtttcctaattcggagaaaatagtatgtgccagctcggagcctgcaagtgctccaaataggatcttcacttgtgatctagaaggccaaaatctggaagtatgggctggagatagaataccaaaagtcagtgatctcgctgtgacacctgatggccgacacctaatctttgtatcttgcaacgatatctggattagggaacttccaagggggcgggaatggagatttcgtgagaagcagacgatttcatctctttctctctcaggtgatgggcagtcactcattgtgaaccttaacagtcaggagattcatctgtggaaaattaatgaaagttgtactgtgcctgaaaagttcatggggcacaagcaagacaagtttgtgattaggtcttgctttggtggttcaaactcttcgttcattgctagtggcagtgaggattcacaggtctacatttggaagaggcacgtggagatgccgattaaggttctacatggccacacgatgattgtgaactgtgtaagctggaatcctgcaaggccccacatgctggcttctgctagcgacgaccgcacggttcgaatatgggtagggcgcaaaaatgcaacaaagtaaacgctgttgaagtgtgaagttttgtatgtctgtgtaaatagttgtacatctggactgcatccacaaacctgtttgggacaatgctctgttcttcacccctgatgaatatgtcgtcgtagctatttgttcagaaataaacctgcaacagccataggtagccggtgctgctgtgtccagatgtgtgcctggctaaccggtgagttttgacatgtgtacaggacaaagatgcatcagaactttgtacatcttgttagtatatgccttggacactcgaagtgctgaaatatgccttctgttgctgtggatctagtgttcgtgtccttttatctttttcgcttggttcatgtgctatcttgctttttgtttagaataccccataacttctttctgatgtccttttcaggtgactttgcaacctttggcatggtcaacaaatatgtataagatttgtaacagcattataattggctagaatcgtgcactagcaaactgtccagcacctcttagcacattttatgtacttgtagttttgctagacagttttggggtgatatcttttcacccttgagagaggggatgaatagatgatattgtaaattttgctcaaaacaacacaaacttggtttataatatgggttagagtaaataaaaccaagtttaagagtatagagaagagagataaaaactcttcacttgattgctctcttgaaataagtattaaactaggagcaatattccaagtgaatatgagaactcaagaagtcaataattgcaataaag

SEQ ID NO: 207238 - DNA, 1754 bp, Zea Mays
cactcctccaaccaagcgttctgcttccgtcctccaatgcccacagtttctgagagaaaagaaaccgacagctcgacccggatcatctctgactccctgcagaatcaatcatcggttccacactatctcttccaaaatttcgttgataacacctgattgatccctatctatatttgattttggaagcataaaagtgcaatgcagttgggaaatgcttctcaaagtacctcagcaatattaaatttctcctgtaccatgtttgcaatatattatgtggtcataataatgaagtttggtttgtaaggttctcaaataatggaagctacctggtgtcatcttcaagtgattgcactgccataatttggaaggtggaaaatgatgatacattgaccaagaagcactgcctccagggtcacgaaaaaccaatttcctttgcttcctggagcccaaatgacagaatgctgctcacttgtggtactggtgaatcattaaaactgtggaatgttgatactggtgaatgtaaccttaaattcagaggctcagcagactgcatcatcagttcatgtgcatggtttcctaattcggagaaaatagtatgtgccagctcggagcctgcaagtgctccaaataggatcttcacttgtgatctagaaggccaaaatctggaagtatgggctggagatagaataccaaaagtcagtgatctcgctgtgacacctgatggccgacacctaatctttgtatcttgcaacgatatctggattagggaacttccaagggggcgggaatggagatttcgtgagaagcagacgatttcatctctttctctctcaggtgatgggcagtcactcattgtgaaccttaacagtcaggagattcatctgtggaaaattaatgaaagttgtactgtgcctgaaaagttcatggggcacaagcaagacaagtttgtgattaggtcttgctttggtggttcaaactcttcgttcattgctagtggcagtgaggattcacaggtctacatttggaagaggcacgtggagatgccgattaaggttctacatggccacacgatgattgtgaactgtgtaagctggaatcctgcaaggccccacatgctggcttctgctagcgacgaccgcacggttcgaatatgggtagggcgcaaaaatgcaacaaagtaaacgctgttgaagtgtgaagttttgtatgtctgtgtaaatagttgtacatctggactgcatccacaaacctgtttgggacaatgctctgttcttcacccctgatgaatatgtcgtcgtagctatttgttcagaaataaacctgcaacagccataggtagccggtgctgctgtgtccagatgtgtgcctggctaaccggtgactttgcaacctttggcatggtcaacaaatatgtataagatttgtaacagcattataattggctagaatcgtgcactagcaaactgtccagcacctcttagcacattttatgtacttgtagttttgctagacagttttggggtgatatcttttcacccttgagagaggggatgaatagatgatattgtaaattttgctcaaaacaacacaaacttggtttataatatgggttagagtaaataaaaccaagtttaagagtatagagaagagagataaaaactcttcacttgattgctctcttgaaataagtattaaactaggagcaatattccaagtgaatatgagaactcaagaagtcaataattgcaataaag

SEQ ID NO: 207239 - DNA, 1847 bp, Zea Mays
cgaagatacaaattctatcgaaaaaaaaagaatagaagggagctttgaaggctttcgaactgacaagcgaaacggcgctcacccccgaaaaaatttgtcttcttcctcgcttccttctccttttctgcctctcctcaccctctgaattccttgttcggttgttcctcttcccacttcccctctctctctctcgtgcgtgtgtactacttctgaggccgaaaggtcagaagagagtgtccacctttcagttcgattttcgatgatttgagtccttccgccgcggggaatttgagcgttttccttgagaaatttgagtttcttcgagagtaatttgtgtgttttctcttgagagattcgtgcaaggatgtcgccttcgaatccatttattgggtagtcaaattgttcctatatagcgtcaaagcatccaactttgacttctccgtggtggcttcttctatcgtgtgtcatccagacaatttgatctttatttaattgggttggatgcttgttcaggttaggtagttggaaagggtagcataagacaccatcaattttggtgattttggtttttctctgaataattgcgggtcaaattagtcatcttcagttatcacttctcgtttttattgggaggatttggtgaattttagtggcgggcagagctttcttcgatcctcggtcctcatttttatggatttggatggttggggacttgggggtatcttaactttatccttgttgaaaaaaggctataaacttgggagttcctgtgagatattcctttcttgggaggatttgatcttgcttctgttggttcctggtgagttggttgagatgaaaggagtactatgctaactcatcgaggaaagaacagtacagccagtactactctgaggaagagctgacatttctatgctttcctttggaggactgtggtctgttcctccaagaatctatgcaaaagtgctcctcatctaagtatatctatccagttcaagttgttgtggttcatcttatcatctgtgtatgtatctgtgtgtaatgcgcgcactctgcaagaaggaagaatttgtgtaaaacgggtggtagttcagaattttctttgcacaggagaagctcagttgcgccttgcagatccaaattggccgatggcgcaacctgaaattcctgcatttgaggattgggaaaccacaggaaacaccccttacacacaaaagttcgaggatgtacggaagaacaagaaaacaggaattcctgcacagacaaatgatccaaggaggaacccggaacatcctcgtaagtcccctttgcatccaacggcctacaaaaccgatcctcaagaccaaggtccaaggaacccaccacatcgaccgagacctgaaactgatcaacaaagacactccgaccggcctactcaccgtgagcctgcaccacgaagacatgcaaatcctcacagagaacaagggagtaatgctgtggcaccaagaagcccctacaggacagctgctgggtctgcttcgccaatgcagtcaaacaaccaatcaaagccgaatcatagatcgactgcgacgcaggctccagagagaaggcattcttcagaggggcatagccagcatacacctggaaggagcaggatgaagcccggtagttatgagcctgaagaagtggctgtaccaccctttggtgaatgggatgatgcaaatgcagcatcaggtgaaaagtacactggtatcttcaacagggtaagggacgataggttgtcacctacctcttctgctaggcaaccatctaccgcccgtagggaggagaataaggtgcaacagggataccatatcgactgatccttg

SEQ ID NO: 207240 - DNA, 1814 bp, Zea Mays
aattcacaaccccaaggaaagggagaaagaaccgaggaagaaaaatatagattgttatcatggatgaaaccaataaggcatgacgtcagggcccaaatgtccaatgtaaatgttggtgccggaagttatggaggagatgaagcaaatggccatggagaacatttggatacctctgctaccggagaccccaacaaattagcaaaacaactttcaggatctcgttacctgcaacccgttggtgtcgtgctatttctgtgtgccctggcaactagttttttcgttttctttaaaggacaatcatctgcagttgtagctatgctggcaaaatcaggtttcacggcggcatttacactgatttttgtatctgagattggagataagacgtttttcattgctgcactactcgcgatgcagtatcaaagagcactggttttacttgggtcaatggctgctctctccctgatgactattgtgagtgttataattggacggattttccagtctgtgccagcacagttccaaacaacgctacccataggagagtattctgcagttgctctgctggcattctttggtttcaagtcaataaaagatgcattagcacttcctgataatgccaacgggaaccttcaagggaattcagaaagtggagaactggctgaggccgaggagcttgtcaaggaaaaggtctctaaaaatctcaccagccctcttgaagtcctttggaagtccttcagtcttgttttctttgctgagtggggagatcgctctatgcttgctacaattgctttgggtgctgctcagtctcctttgggcgttgctagtggagccattgctggacacttgattgcaacagcctttgctattcttggaggagcattcctggccaactacttgtccgagaagctggttggcttgttaggaggagtattatttttgctctttgctgctgcaacgctttttggtgtattctaatctatctgaagaatttgctgttaggggaaagacctcgcagttccagtttggtcttagattttgaagatgaggggcaaacccaagtaggcttggcacatgctgtatgtagatagacgttatccttatcagagatgatttcgatgtgcccaaaattctaccagacagactggaaactgcatcacatggacagcttacagaagttaccattcaaataatttgattagatttgtttaataagaagttactgttttgtgctaaggatctagtgttgacttttgtcaatcatgtgcttgtttttcattcatgggagacaatgacagaaggaatccccaggatgaattgttctgaaaaacaactccccgttaccaaaaaaggaggaaattacacaattatatataaaaatttgcaagctcatttattttgttcaaacttgcgagttagcaacaaaaaggaaaattgggacttcttgctctctttactcgtggtgattgatatcacctagatagtgtaacacccaaaattcaggaagtaccataaaaattcgtgggagtagctgccgacgttgcttccgtgattcgccgcagaggcttggttcgccgcggacagggcgctaaccgcctcaaaccccccgactaccccaaacagtttgatgcttcgttgttatctccgttttgcgttgcacctagagcacccagggattggagccctagcatgttaggtgcgttcatcgggagtggaacagatctcgtggccgctgtttgccgtggctagcttcggtgtgggccagatccgtgagtaagaggactccagtagtcgcgatagcacccctgcgtagtttg

SEQ ID NO: 207241 - DNA, 2379 bp, Zea Mays
gtgcatgcgagttggggccgggggacggatggatgtacagacacactgcaaaggcctagtttctcctgtcagtaaaaattcctccctgtcctctgtcgccatgtagtcatgctgttattgacaagccacggatggatggcaggcagggacgacagctcggtggtaataattcgccaaagcccaagggtacaaactgtaaaaagggagccagggcaaaggcaaagggaaacaactctctgcaaaaagaaaagaaataaaaaaaaagaaaatacacacgctaccctactactactaccactgccatgctcactttctccatttcttccctttttctcctcctcgtctcccttctctctctcctgcgtccatcctctctctctcatctcatctggttgggtggagtggagataagctagagaggtgagctctgtgggatcggagcgagagcaataaatagaaattaaggtcggggccgcctccatggcggcgtttgcaggcgccctcgaattcctcccctgaacccattcgatccgccccctagctctctctcttcctcctccgccctctttatatagcgatactacttgtgtagcgggcgagggtgaggtgaggtgaggaagaaagagagccctcgccgcgtgcttaggccccccccaagacgccgagagaggaaagggattaggcagcaagaggaggcgctccgctctcggattagaggcgagcttcctatttccagcaaaggcaaggagaggatcagctagctagctgctaggaggccggagggagagaaagatcggaggaggagctgcaaaggctagcttttctttggtgcggctggtgctggtggtgaactggtctcggtgctcggtggtgcgtggtgtggtgcacactgcacactctccctctcgcgttcgtcttgatggtgggtggtggtggcagctgcctcgcatggctgggttctctctgaggggcggcggaggcgggaggggcggtgaccggggcggcgatcacccgatcggcgccgacagcctgttcctgtacgcgcgaggggcggccgccgcggctgccgacacggcggccagcggcggcggtgggggcggcgggatagggttccagctctggcacccgcaccagcaggcgacggcggcggcggtgccgcacacgtcgcagttcttctcctccggcgccgtcgccacgggcgtcgtgctcggcttctcctcgcatgacggggccggcgggatcggcggtgcgggtggcgccggcgctggcggcggcagggccgggaccagctgccaggactgcggcaacaacgccaagaaggactgcacccacatgcgctgccgcacctgctgccggagccgcggcttcagctgccccacgcacgtcaagagcacctgggtccccgccgccaagcgccgggagcgccagcagcagctcgccgcgctcttccgcggcgccgccaacagcaacagcgccgccgccgccgctgctgcggccgcgagcaagcgcccgcgggagctcgtccggtcacttggccgcttgccgtccgccaactccgccatggtcaccacgaccacctcctcaggcgacggcggcggcgggaggttcccgccggagctgagcgtggaggcggtgttccggtgcgtgcggatcgggccggtggacgagccagacgcggagctcgcgtaccagacggcggtgagcatcggcgggcacactttcaaggggatcctgcgtgaccacgggccggcggacgacgcggcggtgggccagctgccgccgtcctctgcggagtaccaccaccagctgacggcggggcaagcgagggaagggtcgtcgcccgcggggagcagcgaggcggcggccacggtggccacgtcggcggcggtgctgatggacccgtacccgacgccgatcggcgccttcgccgcaggcacccagttcttccctcataaccctagaacctagcttaagttagctagctttgctgcttccattattcgtatcggtgctagtagcttaattcctttgatggttccatttacttcttccaacaaattaaagatgatgatgaacatgagctaagtagtcatcgtcatcgtcgcaatcaaattcgagacaagaagagaagagattttaattgttactgcatactactactacaacgtgcattcgagccgttgatcgatgaacactagtgcatgatcagcaatgtgtggatcatatataatgttattagctagtagagctagtgtactgttacttgttgagcaatcttgttttgggtttcattaataatttggctaccttaatgcaatgcaaagataagaattttcaagtgtagcttccttcttcattcattccacaaatgatgggagc

SEQ ID NO: 207242 - DNA, 1853 bp, Zea Mays
cctctctctctcatctcatctggttgggtggagtggagataagctagagagatactacttgtgtagcgggcgagggtgaggtgaggtgaggaagaaagagagccctcgccgcgtgcttaggccccccccaagacgccgagagaggaaagggattaggcagcaagaggaggcgctccgctctcggattagaggcgagcttcctatttccagcaaaggcaaggagaggatcagctagctagctgctaggaggccggagggagagaaagatcggaggaggagctgcaaaggctagcttttctttggtgcggctggtgctggtggtgaactggtctcggtgctcggtggtgcgtggtgtggtgcacactgcacactctccctctcgcgttcgtcttgatggtgggtggtggtggcagctgcctcgcatggctgggttctctctgaggggcggcggaggcgggaggggcggtgaccggggcggcgatcacccgatcggcgccgacagcctgttcctgtacgcgcgaggggcggccgccgcggctgccgacacggcggccagcggcggcggtgggggcggcgggatagggttccagctctggcacccgcaccagcaggcgacggcggcggcggtgccgcacacgtcgcagttcttctcctccggcgccgtcgccacgggcgtcgtgctcggcttctcctcgcatgacggggccggcgggatcggcggtgcgggtggcgccggcgctggcggcggcagggccgggaccagctgccaggactgcggcaacaacgccaagaaggactgcacccacatgcgctgccgcacctgctgccggagccgcggcttcagctgccccacgcacgtcaagagcacctgggtccccgccgccaagcgccgggagcgccagcagcagctcgccgcgctcttccgcggcgccgccaacagcaacagcgccgccgccgccgctgctgcggccgcgagcaagcgcccgcgggagctcgtccggtcacttggccgcttgccgtccgccaactccgccatggtcaccacgaccacctcctcaggcgacggcggcggcgggaggttcccgccggagctgagcgtggaggcggtgttccggtgcgtgcggatcgggccggtggacgagccagacgcggagctcgcgtaccagacggcggtgagcatcggcgggcacactttcaaggggatcctgcgtgaccacgggccggcggacgacgcggcggtgggccagctgccgccgtcctctgcggagtaccaccaccagctgacggcggggcaagcgagggaagggtcgtcgcccgcggggagcagcgaggcggcggccacggtggccacgtcggcggcggtgctgatggacccgtacccgacgccgatcggcgccttcgccgcaggcacccagttcttccctcataaccctagaacctagcttaagttagctagctttgctgcttccattattcgtatcggtgctagtagcttaattcctttgatggttccatttacttcttccaacaaattaaagatgatgatgaacatgagctaagtagtcatcgtcatcgtcgcaatcaaattcgagacaagaagagaagagattttaattgttactgcatactactactacaacgtgcattcgagccgttgatcgatgaacactagtgcatgatcagcaatgtgtggatcatatataatgttattagctagtagagctagtgtactgttacttgttgagcaatcttgttttgggtttcattaataatttggctaccttaatgcaatgcaaagataagaattttcaagtgtagcttccttcttcattcattccacaaatgatgggagc

SEQ ID NO: 207243 - DNA, 2095 bp, Zea Mays
ggagtggagataagctagagaggtgagctctgtgggatcggagcgagagcaataaatagaaattaaggtcggggccgcctccatggcggcgtttgcaggcgccctcgaattcctcccctgaacccattcgatccgccccctagctctctctcttcctcctccgccctctttatatagcggtagcctcccacctctcatctcctcatcaccccccaaaaagcagcttgcttgcttgcttgcgttctctaccacgacttatgctcgatcgtaaactaacctcagcaccgtcctccagcagatactacttgtgtagcgggcgagggtgaggtgaggtgaggaagaaagagagccctcgccgcgtgcttaggccccccccaagacgccgagagaggaaagggattaggcagcaagaggaggcgctccgctctcggattagaggcgagcttcctatttccagcaaaggagaggatcagctagctagctgctaggaggccggagggagagaaagatcggaggaggagctgcaaaggctagcttttctttggtgcggctggtgctggtggtgaactggtctcggtgctcggtggtgcgtggtgtggtgcacactgcacactctccctctcgcgttcgtcttgatggtgggtggtggtggcagctgcctcgcatggctgggttctctctgaggggcggcggaggcgggaggggcggtgaccggggcggcgatcacccgatcggcgccgacagcctgttcctgtacgcgcgaggggcggccgccgcggctgccgacacggcggccagcggcggcggtgggggcggcgggatagggttccagctctggcacccgcaccagcaggcgacggcggcggcggtgccgcacacgtcgcagttcttctcctccggcgccgtcgccacgggcgtcgtgctcggcttctcctcgcatgacggggccggcgggatcggcggtgcgggtggcgccggcgctggcggcggcagggccgggaccagctgccaggactgcggcaacaacgccaagaaggactgcacccacatgcgctgccgcacctgctgccggagccgcggcttcagctgccccacgcacgtcaagagcacctgggtccccgccgccaagcgccgggagcgccagcagcagctcgccgcgctcttccgcggcgccgccaacagcaacagcgccgccgccgccgctgctgcggccgcgagcaagcgcccgcgggagctcgtccggtcacttggccgcttgccgtccgccaactccgccatggtcaccacgaccacctcctcaggcgacggcggcggcgggaggttcccgccggagctgagcgtggaggcggtgttccggtgcgtgcggatcgggccggtggacgagccagacgcggagctcgcgtaccagacggcggtgagcatcggcgggcacactttcaaggggatcctgcgtgaccacgggccggcggacgacgcggcggtgggccagctgccgccgtcctctgcggagtaccaccaccagctgacggcggggcaagcgagggaagggtcgtcgcccgcggggagcagcgaggcggcggccacggtggccacgtcggcggcggtgctgatggacccgtacccgacgccgatcggcgccttcgccgcaggcacccagttcttccctcataaccctagaacctagcttaagttagctagctttgctgcttccattattcgtatcggtgctagtagcttaattcctttgatggttccatttacttcttccaacaaattaaagatgatgatgaacatgagctaagtagtcatcgtcatcgtcgcaatcaaattcgagacaagaagagaagagattttaattgttactgcatactactactacaacgtgcattcgagccgttgatcgatgaacactagtgcatgatcagcaatgtgtggatcatatataatgttattagctagtagagctagtgtactgttacttgttgagcaatcttgttttgggtttcattaataatttggctaccttaatgcaatgcaaagataagaattttcaagtgtagcttccttcttcattcattccacaaatgatgggagc

SEQ ID NO: 207244 - DNA, 1152 bp, Zea Mays
tcgaacggccgatctcgtcctcacccattcgcggcagtttcaccgccgctcattcaccgcgcgccagccgtcatcagacatcagctgcccagcttttactgctcccatcaaagccgtgcatgcgaaaagcgcgcggcgaaggaaaaggaggcggtaaaaaaagcaacttcacgcgagggagccgcgaccgcgagcgcctccgcatttcgaaccaaagggggcagaactgagagatcgagagaaataataaaaaaaaatccgtcttcttgtggtcttctccaaaccctagcgcccccggccccggtctccgcccccccgccttcgccgtcgcggtcgcgccccatggcggggaagtcgcgaccgcccaagcggatcctcgagtcctataccatcaagggttcggacagagtcatcaagcctggcgattgcgtgctaatgagggcatctgatgcttcaaagccaccttatgtggcaagagttgaggcaattgaagcagcaggatctcgaggcaccaatgtgagagtacgagtgcggtggtattatcgaccagaggagtccataggtggtcggcggccatttcatggttccaaggaggttttcctctctgaccactatgatgtacaaagtgctgacaccattgaggggaaatgcaatgtccacagcttccgtagctatacaaagcttgattctgtcaatgctgaggatttcttctgccgcttcgagtataaatcagctactggcagctttgtaccagatcgtatagcagtgttttgcaagtgcgagatgccatacaatccagatgaccttatgatccaatgcgaggaatgttctgactgggtgccgtttaaaattttaaaccttttcacgattcatgtgcatatttcagaaagggtttgaacactttgataatcttggtagcttgggaggtctggaagcattgaactaggctgaatgttcaggatgttaccagtgctgtgtgcacggagggtggtctttggtgcatggccaggtcctccaagctcacacagcttttatccaggtcgctctactctggagcgttgctggctgtcttttagtcagtttgtggcatgttgatgtgctggtctccttagggcttgttcggttgcgtgaggatcggaggggattgtgggg

SEQ ID NO: 207245 - DNA, 1250 bp, Zea Mays
tggggttcggggtgtcttactttgggggtagattgatttcgtcaggaatggttgcaataatcgggcgctgctggcgattgcgtgctaatgagggcatctgatgcttcaaagccaccttatgtggcaagagttgaggcaattgaagcagcaggatctcgaggcaccaatgtgagagtacgagtgcggtggtattatcgaccagaggagtccataggtggtcggcggccatttcatggttccaaggaggttttcctctctgaccactatgatgtacaaagtgctgacaccattgaggggaaatgcaatgtccacagcttccgtagctatacaaagcttgattctgtcaatgctgaggatttcttctgccgcttcgagtataaatcagctactggcagctttgtaccagatcgtatagcagtgttttgcaagtgcgagatgccatacaatccagatgaccttatgatccaatgcgaggaatgttctgactggtttcaccctgcttgcattgggatgacaatcaaagaagcaaagaaactcgagcattttttctgccagacctgtacagctgaaaatggtaagatggttgagaattcacatgaagctacagcgcaatcagaagaaaagccggtggagtcaaaaaggcggcgaaggtgatggccgtgctgattaaatttatgaaatctatgctcggttgtacaaagccttcccacgtttcacgtttgagaactgtaattttattgttcgtcgcagtttgtggtcctgggctggggtccctctaatgtcaggcacactgtatatagcttgtaacctggtcagattgttgtattagagcacactagggtttgtgtgatagcacggaagttcggactactgagtatgtgtagagtatggcattataatgccagcatcaggtgatcaggcttcttctgggcattaggactcctgcatgatccagcaataatacttccatgcagctggacctggttagtcactagtaagttgtcaggaaacttagtactgccatgtgaactttttttgaaaccctctatgtaatgtaagcatctgtgtcctacttgcaaactgttgcacgaaattgggcacccaccctggcccattggctgcggttgcataattgcggcaactaacttgtgttttaagtttggaggaacaataataaagtttaggctcattgaactggtctggttcaacgaaacaaaccctcactttttgcttgtattttgagttaatgt

SEQ ID NO: 207246 - DNA, 1208 bp, Zea Mays
tcctcacaatgtcgtcggccaaattttgctggcgattgcgtgctaatgagggcatctgatgcttcaaagccaccttatgtggcaagagttgaggcaattgaagcagcaggatctcgaggcaccaatgtgagagtacgagtgcggtggtattatcgaccagaggagtccataggtggtcggcggccatttcatggttccaaggaggttttcctctctgaccactatgatgtacaaagtgctgacaccattgaggggaaatgcaatgtccacagcttccgtagctatacaaagcttgattctgtcaatgctgaggatttcttctgccgcttcgagtataaatcagctactggcagctttgtaccagatcgtatagcagtgttttgcaagtgcgagatgccatacaatccagatgaccttatgatccaatgcgaggaatgttctgactggtttcaccctgcttgcattgggatgacaatcaaagaagcaaagaaactcgagcattttttctgccagacctgtacagctgaaaatggtaagatggttgagaattcacatgaagctacagcgcaatcagaagaaaagccggtggagtcaaaaaggcggcgaaggtgatggccgtgctgattaaatttatgaaatctatgctcggttgtacaaagccttcccacgtttcacgtttgagaactgtaattttattgttcgtcgcagtttgtggtcctgggctggggtccctctaatgtcaggcacactgtatatagcttgtaacctggtcagattgttgtattagagcacactagggtttgtgtgatagcacggaagttcggactactgagtatgtgtagagtatggcattataatgccagcatcaggtgatcaggcttcttctgggcattaggactcctgcatgatccagcaataatacttccatgcagctggacctggttagtcactagtaagttgtcaggaaacttagtactgccatgtgaactttttttgaaaccctctatgtaatgtaagcatctgtgtcctacttgcaaactgttgcacgaaattgggcacccaccctggcccattggctgcggttgcataattgcggcaactaacttgtgttttaagtttggaggaacaataataaagtttaggctcattgaactggtctggttcaacgaaacaaaccctcactttttgcttgtattttgagttaatgt

SEQ ID NO: 207247 - DNA, 1229 bp, Zea Mays
cattggtctacctgcacggagaaatttatgctcgactaccttttcaaacttctgcttattggtgattctggtgttgggaaatcatgcttgcttctcagatttgcggatgattcatatttggacagctacatcagcacaattggggttgattttaaaattcggacagtagagcaagatgggaagaccataaaacttcaaatttgggatactgctgggcaagagcgcttcaggaccatcactagcagctactaccgtggagctcatggaatcattattgtatatgacgtgacagaccaagaaagcttcaataatgtgaagcaatggttaaatgaaattgatcgttatgcaagtgacaatgttaacaagctccttgttgggaacaagagcgacctaactgccaacaaagttgtggcaactgagacagcaaaggcatttgctgatgagatgggcatcccgttcatggagacgagtgccaaaaacgccaccaacgtggagcaggccttcatggctatggctgcatccatcaaggacaggatggccagccaaccagccgcggccaacgcaaggccagcgacggtgcagatccgcgggcaacccgtcaaccagaagacgtcttgctgctcgtcttaagcttgcctgatttctctggttccttgtgactattactaccgtttgtgcgagcatgcaaatgtatttgttgcattattgctgatagcatctgttcgttggccagatgagtagagagctgaaaaaatgttaagaacaccatagagagaagtctatccgtgctctctcaacttaaggagcaaacagcaagacttcattttttttctactttactgtttattagtcgcgttacatttgtgaacagttattgtaatgtctttttttttaactctgtattcgtagtgagatgaaatgcgtgtgtgggcaacaaatttcctttttggctagttgagtggtcttatcattgtgcccggtgacggtgacggtgcctctgtcctgtggccttgcaatggtctgtgggcttcgagtgggtgtgatactgatacgccctctagtgcgtttttgacatggagaagaacgccgcttggcccaccaccaccgccaattgctgtgtcctctgtggtgtgtcagcgcgagataacgtttgacaggcgaagcgatgttggggcacatgcgcaccaccgctgatcgtgaggcactgaaaatttcaaaaaaaaaaaaaa

SEQ ID NO: 207248 - DNA, 3101 bp, Zea Mays
atagaagaaactgggacgaccctttttctgtccgtccgtggtcccttcaatctctctgcgcaatcaaactgcggtggccaaccccggaagcggcggcgggcaaagcgcgcgacgcagagaagcgtaacttcaggccgccggtcgctctacgcatcctgctccccgttctcgtcggagatccaccggggcagcctttctttccccttcctcaatcaagtcgatccaatttcgcgcgcgggtcgggctcgccttctcctccagtctccacctccaccagcgctcgaggtcgacggacgctactcgcagcagttcttctttgcggtgcggccgagaagaagctaaggctcaggcatgagcttccgggaccaggagagtggcggggaggatgggggcaggacgtcctccgcctccgacctgcggaagccgctcatcaacaccgggagctggtaccgcatgccgccggcgggtggcgtgatgggctcgcggcaatctagcctcatggagcgattgggctcctctgcgttctctctccgcgacgtcgctatctcggcgacgctctgcacgctcattgtcgcgctaggtcccatccagttcggtttcacatgtggctactcctcacccacgcaggacgccatcattgctgaccttggcctctccctctctgagttctccctcttcggttcattatctaatgtaggggcgatggtaggcgccatctccagtgggcaacttgcagagtatatcggccgcaaggggtctctcatgatcgctgcgattccaaacataattgggtggctcgcgatatcatttgcaaaagattcctctttcttgtttatgggtcggctgctagaaggatttggagttggtgtaatatcgtatacagtaccggtttatattgcagaaatcgctcctcaagatcagaggggagctcttggttctgtcaatcagctctccgtcacgattggtatattgcttgcctatttgtttggcatgtttgttccctggagaattcttgctgttctaggcattttaccctgttcaatcctgattcctggactgttctttgtccctgaatccccaaggtggttggcaaaaatggggaagatggaggattttgaatattcattgcaagttctgcgaggatttcagacagatatcacagcagaagtaaatgaaataaagagatcattagcatcatcgaggaggaggacaaccataaggttcgctgatatcaaacagaagagatacagtgttccccttgtgataggaatcggtctccttgtcctgcagcagctaagtggtgtcaatggcattctattttatgctgcgagcatcttcaaagctgctggtattacaaacagtaatctagcaacatttggtttaggggctgttcaggtgattgctactggagtgacaacctggttgactgacaaagctggtcgaaggcttcttctcattatttccaccacaggaatggtcattactcttgttattgtttctgtgtcattttttgtgaaggacaacatagctgctggttcgcacttatactctgtaatgagtatgctttcactggctggacttgtggcatttgtgattgcattttctcttggcttgggagcgattccgtggatcattatgtctgagatccttcctgttaacatcaagagccttgctggaagtgttgcgaccctggcgaactggctgacagcatgggccattacaatgacggcaagcctgatgttgaactggagcagtggaggaacctttgctatctacgccgtcgtgtctaccatggccctcattttcgtgtgcttgtgggtgcctgagaccaagggaagaacgctagaggaaatcgccttctcattccgctgacacgtcgtcatgatctagtgttcataccaatgtacattgtacaatatgacgacgacgccatagcagaaaggcaagtgggtttatgtttgtacgatggactagtagcagaaagcactcgaacccctgtacgggttgcggaggagagcaatttatttgctgtattttcctggttcaataccggacacgttagaattttgaaaaataaaaatctgagcaaatttatcaacggtgctgccagctccatgcgtttgcctgcatgcggtcatgaagtagaagacattggagcctaaatatctaggaacggttttgatttaggaaaaaaaaaagggaaggaattttattctgaaacctaggggcatggttgtgcagcggcaaacttgactgctgaaggggctgatcggaattaggtaccttgtggttttgaagcgttgtttgaaatcggcgtcagcctcgccccaccagcctcttctaatcgtctgaaacgggggctgcaagatctccgtggacctcggccgccgcgtctgcctgcccatgcggcattagcgccttcatgcgacgtcggaggatcaggaaaccgtggcatgtgagaaggatcatttccatggacctcaacggcggacgccggatggcaggggcatcatctgatgatcatccgcctgccgcgtgcgccgccggagatcaggaagccgtgcccagtcaacactctgcaggccaccagcccaccaatttgggcacccggttgtggcagagcgagcgaatgcgaagcacggtcgacttcactaaccctgctgcgactgtgagaaaaaaaaggcccttttggcctaacccaatgcctagtttgctcggcccatctgctggatattttgtttcttttttccttttgcgaaaaagttggtacattttgttgaactcaaaccgtgaagacgcaaatccttaaattttttattggttcacgccaatctagttcaagatatatataatgaaaattacacaaggtacaaataacggtgataccaacaaaatattttataataaatacactataacacaaattataatgtctactctcatgaggagatggtaagccaacattcctctagagtgcaatggaggccactagcctaggccattgccctttctgatcagcaatcgaccccatccagataagtgaggataaggttgatgggggttgtttttgtactccatcatagggcgcacaaacgagttgg

SEQ ID NO: 207249 - DNA, 2365 bp, Zea Mays
cataaacgaagccctactaacccgagcctataaaaaaacgaatataggtaatggattcaaagagctaaatccgccgccatcccaaccgccctatagcagtccaccgctgttaagcacagtacgatttgccactcttctttttgccctaatacatattccatatatctatccctgttcgcatcacgactcgcgagctcccggtcccaaaccctaggcctagggggcgacctgacccgatgtcagcgtcttacggatccgaagactaccgcggcggcggcggtggcggaggctacggtggccgaggtggcggcggcggtcgtgggcgcggaggcgggggaggatatggaggtggcggcggtggaggaggatatggaggtggcggtagtggaggctacggcggcggcgggggtggaggcggtggcgggcgcgggggtggacgcgaaggagactgggtttgccctgacgcgagttgtggcaatgtgaactttgcgaggagggctgaatgcaataagtgtggagcaccttgcccaagtggaggtggtggcggcgggggtgggggttataatagatctggtggaggtggtggaggatacaaccgtggcagtggtgattatggttctggaggtggtggtttcgaccgagatggtggagactataattctggtgggcgtggtggtggaagcgggggtggaggaggctacaatcgaagtggtggcagtgaccgtggttttgatgaccaccgtggtggcagaggtggcagctatgggggacgagatcaggagaaccaaaggggtagtgaaggtggctacagtgctggtggctatgggcaagctcctccacaagctcctccttcgtatggtggtcctgcgggtgattatgcagcacctccgagctcctatggaggcaacaatgcttatggttcagattctgcagtgccgcctcctaatagctacagtggtggcccaggctcatacccaccaagctatggtgccccgcctccacaccaatatggtggtgccccaggggggcaagggggtctgcctcctacatatgatggtggatatggtggtcggtccatgcctgggggtggaggatctgggggtgcaccaccgccttatcatggtggcggcagcggttatactggtagtgctgaccctgaaccagctggaaaagttaagcagtgcgatgaaaattgtgacgagacatgtgacaacgcaaggatttacatctcaaatttgcctcctgatgtcactgttgaggaattacaagagctatttggaggaatcggccaggtcggaaggatcaagcaaaagcgtggttacaaagatcagtggccttggaacataaaaatctatgctgatgactctggaaaagccaaaggagatgcttgccttgcttatgaagatccttctgctgctcattcagctggtggattttacaataattatgacatgagaggttataaaatcagtgttgtgatggctgagaaatcagcacccagagcggcaccctcatatgggcatggcggtggtcgtggtggtggccgcggtggtggtggacgcagggataattacagagatggcggggggcatggacccaatagaaaccagggtggtggttcacgttcacgaccatactgaaaacaaaacaattgttgttactgtgattgtcatctatgagaaaccatttctattcctgttatacagatttgtactcatacaggctcataagaggcagatggatataagctccaaatgctggtaggtttgtgatgttatttcagccggtggatcactcatgtaagctttggattttgctgcgaagaacaggttgcagccccatcacttgtgccctaactcatcgtccccagcaacacgatatgacgtgtgttgaagtggtgatctataagtagaaaaggagctgaattgagtgaattgttgcttcatctgcccccgtgatgcctctcgaattgggactgggagctcgtgacttacagcacttgccacgaatgggaaaccctctgctccaaaggaagcagttcaagcatatcgacgtgcttgcagggtcatcgctaaaaataatgtctcgaccacatgctaagattggaggttgttgtccgattatatatgttacaaaatattacatatgtgatcaatccaaggggtgtaacagttttctcaaagggacacactccttgggatacgctccttcacttgtatataagtgtaatgatctctggaatacaatcagtggctgtcacattctctccattctctgtgtcctgttttcactgcgctttaacactatcaagatggataggtgagtacccgtacgttgcaacgagaacatataataacataataat

SEQ ID NO: 207250 - DNA, 2097 bp, Zea Mays
ttttgccctaatacatattccatatatctatccctgttcgcatcacgactcgcgagctcccggtcccaaaccctaggcctagggggcgacctgacccgatgtcagcgtcttacggatccgaagactaccgcggcggcggcggtggcggaggctacggtggccgaggtggtggaggatacaaccgtggcagtggtgattatggttctggaggtggtggtttcgaccgagatggtggagactataattctggtgggcgtggtggtggaagcgggggtggaggaggctacaatcgaagtggtggcagtgaccgtggttttgatgaccaccgtggtggcagaggtggcagctatgggggacgagatcaggagaaccaaaggggtagtgaaggtggctacagtgctggtggctatgggcaagctcctccacaagctcctccttcgtatggtggtcctgcgggtgattatgcagcacctccgagctcctatggaggcaacaatgcttatggttcagattctgcagtgccgcctcctaatagctacagtggtggcccaggctcatacccaccaagctatggtgccccgcctccacaccaatatggtggtgccccaggggggcaagggggtctgcctcctacatatgatggtggatatggtggtcggtccatgcctgggggtggaggatctgggggtgcaccaccgccttatcatggtggcggcagcggttatactggtagtgctgaccctgaaccagctggaaaagttaagcagtgcgatgaaaattgtgacgagacatgtgacaacgcaaggatttacatctcaaatttgcctcctgatgtcactgttgaggaattacaagagctatttggaggaatcggccaggtcggaaggatcaagcaaaagcgtggttacaaagatcagtggccttggaacataaaaatctatgctgatgactctggaaaagccaaaggagatgcttgccttgcttatgaagatccttctgctgctcattcagctggtggattttacaataattatgacatgagaggttataaaatcagtgttgtgatggctgagaaatcagcacccagagcggcaccctcatatgggcatggcggtggtcgtggtggtggccgcggtggtggtggacgcagggataattacagagatggcggggggcatggacccaatagaaaccagggtggtggttcacgttcacgaccatactgaaaacaaaacaattgttgttactgtgattgtcatctatgagaaaccatttctattcctgttatacagatttgtactcatacaggctcataagaggcagatggatataagctccaaatgctggtaggtttgtgatgttatttcagccggtggatcactcatgtaagctttggattttgctgcgaagaacaggtagggaggttttgttctgtgttaggtttattagatttcgtgtacattagacgacatatcaaccaccaatcatagaacgttccatatccgtttctgcttctgggcactcagcttattttggtgaaagagccaatttttttatcaaggttgcagccccatcacttgtgccctaactcatcgtccccagcaacacgatatgacgtgtgttgaagtggtgatctataagtagaaaaggagctgaattgagtgaattgttgcttcatctgcccccgtgatgcctctcgaattgggactgggagctcgtgacttacagcacttgccacgaatgggaaaccctctgctccaaaggaagcagttcaagcatatcgacgtgcttgcagggtcatcgctaaaaataatgtctcgaccacatgctaagattggaggttgttgtccgattatatatgttacaaaatattacatatgtgatcaatccaaggggtgtaacagttttctcaaagggacacactccttgggatacgctccttcacttgtatataagtgtaatgatctctggaatacaatcagtggctgtcacattctctccattctctgtgtcctgttttcactgcgctttaacactatcaagatggataggtgagtacccgtacgttgcaacgagaacatataataacataataat

SEQ ID NO: 207251 - DNA, 1171 bp, Zea Mays
ctgttcttgagctacatagcatcagattctgcctaatctcctcaagcagacaggttgctaggctgtttcttgtgctaatggcatcagattctgcctagcctcctgccccagagctgcagtagtctgacagagattgctcacacacacacacaccaaaaacagattcgtcctcagcagctcgccgctcataccatgtctaatatttaccatcgtatcgtctccatggtgctgcaccaattcaacgctcctccttattataggtcagcttagtagttggtggtgactcgatcggcgagatgggcatggtcgcttccatgtgcacggagcccatcaagcggcaccgggtggagagagacctcgacggcaaggtggcggacgcgctccgggagcggacgaggtcccggcagaggaccttcaggtcggtgaacagcatcaccatgcgcctgcccaggttcaaggaagggctcagggacgtcaagaacatcttcgaccagtacgacgaggattcagatggcacgatcgacagcgaagagctgcagagcttcggaagcagagtccgggtgcacatgtccgaggaggagatgagcaacctgcaccggtactgcgacatcgacagcaggaagggcgtccagttccaggagttcgtcgtgctcctctgcctcgcgtacctgctcttcgggccagacgtcacacgacgcgtacgtttcggagttcgagtccggcaagctcaattacgtcttcgacgagctcatcgacgcgtacatcttcttcgacaaggacggggacggcatgctgcggaggagagacgtcacccacaggatgaacgaggcgtcgcaccaggagaggacacccagccacataacagcacagctattcaaggagatggatctgaacaggaacgggaaggtgaacctcaaggagttcctctactccatgatcagatgggctggtctcgggaccgaagacgatggcagcgatgaggcctcaccatgatgtaacttttttttttcttttcttttggtctgcattttaacagttgaataagtaaaatgtatgttgacaattgaaagtaaaaataaaaaatatcatgaagaaaatcgaaggtccaaatctgattcgataaacctcgttattatgtaataatcgatggcactctgatttagcacatcta

SEQ ID NO: 207252 - DNA, 1805 bp, Zea Mays
ctgcattattggacagagacgcgccttgcaactttgagctctctggcctgcccccgttccagcaagatctgtactccgtatccatcatctccttgcttagtgggcactcaaagtgttgctcaaacaaatgatgattcatcgatagtggctgaggcgacagctctccaagtttcgtctgttcgctcgtggtggaaattccgctgagcgagcgagtgaatcctcctcttcctagccccggcgtgaggagcgccggcgatgtcgaccggcggcaggaagatgaggacggcgtgcgtgaccggaggaaacgggtatatcgcctcggcgctcatcaagatgacatggagaagaactcccacctcaaggacctgcaggcgctcgggtccttggaggtcttccgcgccgacctggacgaagacggcagcttcgacgacgccgtcgccggctgcgactacgccttcctggtcgccgctccggtgaacctccacacgaagaatcccgaggaagaaatgatcgagccggccgtcaggggaactctgaacgtgatggggtcgtgcgtgaaggcgcgcacggtgaggcgcgtggtcctgacctcgtcggcggccgcggtcaccaccaggccgcagctacaaggcgacgggcacgtgctggacgaggagtcatggtccgacgtcgagtacctcagagcccacaagcctgcaggcccctgggggtacccggtgtccaaggtgctcctggagaaggaggcgagcaggttcgcggaggagcacggcatcggcctcgtcaccgtctgccccggcctcaccgtgggcgccgcgccggccccgaccgcccgcaccagcgtccccaactgcctctctcttctatccggcgacgaagccgcgttcgccgtgctggacgccatcgagagcgccaccgggtgcctgccgctggtccacgtcgacgacgtctgccgcgccgagctgttcgccgccgaggagggcgcggccgcggggaggtacgtctgctgcggcctcaacacgaccgtcgccgagctcgcgcgtttcctggcggacaagtacccgcagtacggcgtcaaaacgaacctgctctccggcgagcggcttgagaagccgagagtgtgcctgtcgtcggcgaagctggtgaaggaaggtttcgagttcaggtacaggacgctggatgacatatacgacgacatggtcgagtacggcaaggacctgggaatcctgcccgacttgtgatgctgcttgcttcctctgctctcggccggcgatcaggactggactttaaaccgtccggcaaaataagcccgtctatttatgctgctactgtgccgaaccataattggaccttcaaaaaatgtcaagaaaatttgtctatgttatgcatttttgtctactcagaaccgtttgtctgactagtaaatatggaatcgaatcctgtattagcaagcgtgacaaatatgcatcaactgttgcaagctgttgttagcagaagcagagaagagaggtttcgtgggcaagaagaagaagaagatagcgggggaagcggggattggtattgtgatttctcatcattctctgtccaaagcgttctgcttattacatatttgtacctctcactactgcctcaaccattccggcccacatacacgcacattgggcttgcgaacacgtcttgccactcgcggcccattcacagccggcgtcttctccacagcgccttcatcagccaccggcgtcgccttctacatcgcgtcttcttcagccgcaccttccactggagagcccgtgggtggagtcctgaca

SEQ ID NO: 207253 - DNA, 2329 bp, Zea Mays
acaaaggtctatagaagacccagatatatgaattatgattataacatcagactggaaagatgaatctgtggtaggttttcaaatctttcagtgatagccaaacatctttgaatgaatttgtcttcagtctgaaatccactgtcggagcagaaacttttgtggaggtggttggggttggtaaagggaagcacgatttgactggattcgttacggaccaatctaaacctaatcatgctctctctgttcatagtgacttgcctacaggtaaagactgttcttcacttgcttcagaagatataatcaagttcttaaatggcgatttcagaagaagtaagactagatcaaatgatattttctgggaagctgtatggccccgtttgcttgcaaaagggtggcactcagagcagcccaaggatgttagcacaactaagagttgccttgtatttcttgtgccgggtataaagaagttctcgagaagtaaactcaccaaaggtactcattattttgattctgtcagtgatgtccttaaaagagtggcagcagatcctgttcttcttgagttaaaggtagatgcgataaacaatggtttaactgctgaggaaaatggcagtatcacagatgtgaaactgaaccaggatagtccgttagatggatatcaggagcttcctaagttcacaataatcgatactagcttagtcgaaggggaagagccattcaatatacgggaactgagaaacttacctgcagatgcaaatattacttttctcctttcacaacattcatctaatatggtgagttacagctcctctgaagaggaagctgccaatgatagattatcagatgaccaggaagattgtggacgagttaaagctgaggccaaggaaattgaaatggtttcagctggttcattgcaaaacatggttactgctaatggccactcttctaatgtcaatgataaaattgatctgacaggcatctatggcatcaaaacaaaacctgaaaggcgcaagtatttgtccccagtgtcaaagcgcagaagattaaatagctgtagtaatgaacaggccagccggcgcagtttttctttctcaaaaggtggtggttttgagaaacagaaaagcaagccaccgttgatttcatccaaaccagctgctgttgaagttggcgacacttttcagagtaaaacaatttcaagctgttctacaaaggagaagccatctgagcacacagcagatgcattgaactcccttatcgatgatgagcaaaatgcgagaatggttatggaggttgaagcagtggctgaagttcactcaaaggtcattgccgttcagccaaaatttgtcaaagaaagagctgagtttattggtccagttgatttgaataagctggaaacgctacatgatgataaggcaagtcgaagcattgacaccacatcattgggaaatcttggtagcatgaaggttgatgaagctccctccagttcagacaagaacatggcctgtgatccttcaggggcagcaggaagacctgttagcgaggcacctgatcctgctttgcaggtgaatgctcggaggcacggaaccagaaacaggcctcccaccgcaaaagctttagaagctgtcgcttttggacttcttggaagcgggaagcggaagggtgacctgaaaaacagggcgacaagccggccttctcagcgagctcgcaaatctgccaaagacttggttcccgtggcttctagtggtgacgcaaaggcgtcctgcatagatgcagaagaacagcgatgagcagatttctgtggtgacatatgctgacaatcaacggcaccatgacaatgtgcggatgatgaatatcaagcaactacatgaggcctggagctaagctgtccaaagctggtggttaccttaccattgtctaatgcctaccattcaggaggtcctgaaggtgacaatggttttacagggtgcatggtcaccgttcgtgcggaggaacccatccttagtttttttagtcaacagtcttgtgtctgtcaaggcttgcaaaaccaacttgtaccggagagagggagggaaatcgccaaattggcgaattaagttatgcgataccgggattaatgtttttgtacattggtctatcgactttccatgggtgaattcatctatgagcttcttttgcagggaaagaaggcattcgtcagcttcataaaccacaactaacattgatggtatctgcggtcttgcatggcttcttctttcccatgcattcctttttttctggtgaaggaaaaaagtatttcttagagttgatttgatgatcagaaaattaaagggga

SEQ ID NO: 207254 - DNA, 3203 bp, Zea Mays
cgtggcttggttggtgactctggaattacttggtttgcttgatctagtggctctggctgttgtcggctcacggtgacgatggagtctgaatcactcgattttgaagacaatggagaccaccaaccttcatcagaagcttctcttgcttcagatgtggtatatgatgactcgcttgtatgtccatgcattggaagtgagcaccaggcagaaatccccaatcttgctacagaggatgagtgccgtaagctcatggccagttcacataatgattccatattccatggctatggttaccctgttgtggttgggttagctttaccaattacgtgggcatcaccaagcgaagttgataagacggaagaggtactacaaacgcaaaaatgttcagaatttggaacaaaaggcagcactggagatgtgcacagtcaggtgacctcaacttgtgcaactagcaatgacactggcatatgtgctgcaacattccagtatccacatacagtagtgcctgtagttcaaattaaatctgacagtaatcaagcatacgatgaaaaaatggtcccttgccccactcaagaaggacagaatgttaccaataattcaataatgcagcagagagaaaccaaacaattaagtcctctaccttattcacccgttgctctttggagtgatcttgaggcagaggtatttctccttgggctctacatttttggcaagaatctcaacctgctgagcaggtttctgggtacaaagactgttggtgatgtgcttgcatactactatgggaagttctacagaagagatacatacaaaagatggtcggactgtagaaaggcaaaaactaggaaatgcattcttggggaacgcatttttcaaggatggcgacagcaggagctaatttcacgtctgaaatctaaaatccctaaagaagctcatgattcgttaattgaggttttcaaatctttcagtgatagccaaacatctttgaatgaatttgtcttcagtctgaaatccactgtcggagcagaaacttttgtggaggtggttggggttggtaaagggaagcacgatttgactggattcgttacggaccaatctaaacctaatcatgctctctctgttcatagtgacttgcctacaggtaaagactgttcttcacttgcttcagaagatataatcaagttcttaaatggcgatttcagaagaagtaagactagatcaaatgatattttctgggaagctgtatggccccgtttgcttgcaaaagggtggcactcagagcagcccaaggatgttagcacaactaagagttgccttgtatttcttgtgccgggtataaagaagttctcgagaagtaaactcaccaaaggtactcattattttgattctgtcagtgatgtccttaaaagagtggcagcagatcctgttcttcttgagttaaaggtagatgcgataaacaatggtttaactgctgaggaaaatggcagtatcacagatgtgaaactgaaccaggatagtccgttagatggatatcaggagcttcctaagttcacaataatcgatactagcttagtcgaaggggaagagccattcaatatacgggaactgagaaacttacctgcagatgcaaatattacttttctcctttcacaacattcatctaatatggtgagttacagctcctctgaagaggaagctgccaatgatagattatcagatgaccaggaagattgtggacgagttaaagctgaggccaaggaaattgaaatggtttcagctggttcattgcaaaacatggttactgctaatggccactcttctaatgtcaatgataaaattgatctgacaggcatctatggcatcaaaacaaaacctgaaaggcgcaagtatttgtccccagtgtcaaagcgcagaagattaaatagctgtagtaatgaacaggccagccggcgcagtttttctttctcaaaaggtggtggttttgagaaacagaaaagcaagccaccgttgatttcatccaaaccagctgctgttgaagttggcgacacttttcagagtaaaacaatttcaagctgttctacaaaggagaagccatctgagcacacagcagatgcattgaactcccttatcgatgatgagcaaaatgcgagaatggttatggaggttgaagcagtggctgaagttcactcaaaggtcattgccgttcagccaaaatttgtcaaagaaagagctgagtttattggtccagttgatttgaataagctggaaacgctacatgatgataaggcaagtcgaagcattgacaccacatcattgggaaatcttggtagcatgaaggttgatgaagctccctccagttcagacaagaacatggcctgtgatccttcaggggcagcaggaagacctgttagcgaggcacctgatcctgctttgcaggtgaatgctcggaggcacggaaccagaaacaggcctcccaccgcaaaagctttagaagctgtcgcttttggacttcttggaagcgggaagcggaagggtgacctgaaaaacagggcgacaagccggccttctcagcgagctcgcaaatctgccaaagacttggttcccgtggcttctagtggtgacgcaaaggcgtcctgcatagatgcagaagaacagcgatgagcagatttctgtggtgacatatgctgacaatcaacggcaccatgacaatgtgcggatgatgaatatcaagcaactacatgaggcctggagctaagctgtccaaagctggtggttaccttaccattgtctaatgcctaccattcaggaggtcctgaaggtgacaatggttttacagggtgcatggtcaccgttcgtgcggaggaacccatccttagtttttttagtcaacagtcttgtgtctgtcaaggcttgcaaaaccaacttgtaccggagagagggagggaaatcgccaaattggcgaattaagttatgcgataccgggattaatgtttttgtacattggtctatcgactttccatgggtgaattcatctatgagcttcttttgcagggaaagaaggcattcgtcagcttcataaaccacaactaacattgatggtatctgcggtcttgcatggcttcttctttcccatgcattcctttttttctggtgaaggaaaaaagtatttcttagagttgatttgatgatcagaaaattaaagggga

SEQ ID NO: 207255 - DNA, 3192 bp, Zea Mays
ccttctcctttgtctttaaagcccgagcaccccctctccagccccgtctccgcctcctctctccctctctacactccaacccaccaccgccccgcgaccggtcctcggcctcgccgtactctccactcgctccaccctgcggcgcgctgctccgtgttcttccctcccgcaaaccgtcggtgaatctcgccgctcctaccgtccggttcagattctcgctaccggtcgggggcgtctgtttctcgtccgggaggccggagggctcctcgtggccggagcctgggggaggagccgccagcgcggcgtgcatggaggctaagatggagtctgaatcactcgattttgaagacaatggagaccaccaaccttcatcagaagcttctcttgcttcagatgtggtatatgatgactcgcttgtatgtccatgcattggaagtgagcaccaggcagaaatccccaatcttgctacagaggatgagtgccgtaagctcatggccagttcacataatgattccatattccatggctatggttaccctgttgtggttgggttagctttaccaattacgtgggcatcaccaagcgaagttgataagacggaagaggtactacaaacgcaaaaatgttcagaatttggaacaaaaggcagcactggagatgtgcacagtcaggtgacctcaacttgtgcaactagcaatgacactggcatatgtgctgcaacattccagtatccacatacagtagtgcctgtagttcaaattaaatctgacagtaatcaagcatacgatgaaaaaatggtcccttgccccactcaagaaggacagaatgttaccaataattcaataatgcagcagagagaaaccaaacaattaagtcctctaccttattcacccgttgctctttggagtgatcttgaggcagaggtatttctccttgggctctacatttttggcaagaatctcaacctgctgagcaggtttctgggtacaaagactgttggtgatgtgcttgcatactactatgggaagttctacagaagagatacatacaaaagatggtcggactgtagaaaggcaaaaactaggaaatgcattcttggggaacgcatttttcaaggatggcgacagcaggagctaatttcacgtctgaaatctaaaatccctaaagaagctcatgattcgttaattgaggttttcaaatctttcagtgatagccaaacatctttgaatgaatttgtcttcagtctgaaatccactgtcggagcagaaacttttgtggaggtggttggggttggtaaagggaagcacgatttgactggattcgttacggaccaatctaaacctaatcatgctctctctgttcatagtgacttgcctacagtgatgtccttaaaagagtggcagcagatcctgttcttcttgagttaaaggtagatgcgataaacaatggtttaactgctgaggaaaatggcagtatcacagatgtgaaactgaaccaggatagtccgttagatggatatcaggagcttcctaagttcacaataatcgatactagcttagtcgaaggggaagagccattcaatatacgggaactgagaaacttacctgcagatgcaaatattacttttctcctttcacaacattcatctaatatggtgagttacagctcctctgaagaggaagctgccaatgatagattatcagatgaccaggaagattgtggacgagttaaagctgaggccaaggaaattgaaatggtttcagctggttcattgcaaaacatggttactgctaatggccactcttctaatgtcaatgataaaattgatctgacaggcatctatggcatcaaaacaaaacctgaaaggcgcaagtatttgtccccagtgtcaaagcgcagaagattaaatagctgtagtaatgaacaggccagccggcgcagtttttctttctcaaaaggtggtggttttgagaaacagaaaagcaagccaccgttgatttcatccaaaccagctgctgttgaagttggcgacacttttcagagtaaaacaatttcaagctgttctacaaaggagaagccatctgagcacacagcagatgcattgaactcccttatcgatgatgagcaaaatgcgagaatggttatggaggttgaagcagtggctgaagttcactcaaaggtcattgccgttcagccaaaatttgtcaaagaaagagctgagtttattggtccagttgatttgaataagctggaaacgctacatgatgataaggcaagtcgaagcattgacaccacatcattgggaaatcttggtagcatgaaggttgatgaagctccctccagttcagacaagaacatggcctgtgatccttcaggggcagcaggaagacctgttagcgaggcacctgatcctgctttgcaggtgaatgctcggaggcacggaaccagaaacaggcctcccaccgcaaaagctttagaagctgtcgcttttggacttcttggaagcgggaagcggaagggtgacctgaaaaacagggcgacaagccggccttctcagcgagctcgcaaatctgccaaagacttggttcccgtggcttctagtggtgacgcaaaggcgtcctgcatagatgcagaagaacagcgatgagcagatttctgtggtgacatatgctgacaatcaacggcaccatgacaatgtgcggatgatgaatatcaagcaactacatgaggcctggagctaagctgtccaaagctggtggttaccttaccattgtctaatgcctaccattcaggaggtcctgaaggtgacaatggttttacagggtgcatggtcaccgttcgtgcggaggaacccatccttagtttttttagtcaacagtcttgtgtctgtcaaggcttgcaaaaccaacttgtaccggagagagggagggaaatcgccaaattggcgaattaagttatgcgataccgggattaatgtttttgtacattggtctatcgactttccatgggtgaattcatctatgagcttcttttgcagggaaagaaggcattcgtcagcttcataaaccacaactaacattgatggtatctgcggtcttgcatggcttcttctttcccatgcattcctttttttctggtgaaggaaaaaagtatttcttagagttgatttgatgatcagaaaattaaagggga

SEQ ID NO: 207256 - DNA, 1839 bp, Zea Mays
aaaggcgcgcaccgttgtcaaatgcgtcgggtggctgagggagctgaggtcaccgccagtctcttgtcacaccaaacacccagtggttcaggctggccaaagttatgagttatctgccctgtcctcccaaactaatctagtcccaggaaactaatttcaacacacaactggacgacggtgcgttgcgttggtggccgccggcgacgatgtcgtcgtccgcgggcgacaagaggaagaagacggcgtgcgtgaccggagggaacgggtacatcggctccgcgctcatcaagatgctgctggaggacggatacgccgtcaagacgacgacgacatggacaagaactcccacctcaagggcctgcagcagctcgggccgctgacggttctccgcgccgacatggacgaggagggcagcttcgacgacgccgtcgccggctgcgactacgccttcctcgtcgccgccccggtgaacctctcggcacaggatccagagaaagagcagatcgagccgtccgtccgaggcacgctgaacgcgatgcggtcgtgcgcgaaggccgggacggtgcggcgcgtgatcctgacctcgtcggtggccggagtctacatcaggccggacctgctgcaactgcgaggcgacgggcacgtgctggacgaggagtcctggtccgacgtcgagtacctcagagccaacaggccaccaacctgggggtactgcgtgtcgaaggtgctcctcgagaaggaggcgtgcaggttcgcgggcgagcacggcatcagcctggtcaccgtctgccccgtcatcaccgtgggcgcggcgccggcgcccaaggtccgcacgagcatcatcgacagcctctccatgctgtccggcgacgagcgagggctcgccgtgctcaagggcatcgagaagacctccggcgcggtgcagctggtccacgtcgacgacctctgccgcgccgagctgttcctggcggaggcggcggcggccgacgggaggtacatctgctgcggcctcaacacgaccgtcctcgagctcgcgcgtttcctggcacacaagtacccgcagtacggcgtgaaaacaaacctcgacggcgatgaacagcagctactcgagaagccgagggtgagggtgtcgtcggagaagctcgtccgggaagggtttgagtacaggcacaacacgctggacgagatctacgacaatgtggttgagtacggcaagtcgttagggattctgccctactgatacatagatgcccgagcttaattaagtacgagggcagcatatatgttatcggacatatacgagtcttggaaagtaattaaataatttatggagatatttttcattggaaaaaacagtgtgagagttctaaactagctcaaaattgagctgaaaagcacttttgaacccccctccccctacattttactattgctgctgaacgacgtggaggtcagattccatgtccgactgagaggatcgtcgaggtcggcgcggaaggcctccaggctccaggagggcgagcgtctgaggtgggagtgggacgtcttcgccatgtcatctgcggtttcagaatcgagacggccaagcacgtttggtgtgatatggaatcgtgatgaacagctgtcaggactccacccacgggctctccagtggaaggtgcggctgaagaagacgcgatgcagaaggcgacgccggtggctgatgaaggcgctgtggagaagacgccggctgtgaatgggccgcgagtggcaagacgtgttcgcaagcccaatgtgcgtgtatgtgggccggaatggttgaggcagtagtgagatgtacaaatatgtaataagcagaac

SEQ ID NO: 207257 - DNA, 1799 bp, Zea Mays
cgccagtctcttgtcacaccaaacacccagtggttcaggctggccaaagttatgagttatctgccctgtcctcccaaactaatctagtcccaggaaactaatttcaacacacaactggacgacggtgcgttgcgttggtggccgccggcgacgatgtcgtcgtccgcgggcgacaagaggaagaagacggcgtgcgtgaccggagggaacgggtacatcggctccgcgctcatcaagatgctgctggaggacggatacgccgtcaagacgacggtcaggaaccccgacgacatggacaagaactcccacctcaagggcctgcagcagctcgggccgctgacggttctccgcgccgacatggacgaggagggcagcttcgacgacgccgtcgccggctgcgactacgccttcctcgtcgccgccccggtgaacctctcggcacaggatccagagaaagagcagatcgagccgtccgtccgaggcacgctgaacgcgatgcggtcgtgcgcgaaggccgggacggtgcggcgcgtgatcctgacctcgtcggtggccggagtctacatcaggccggacctgctgcaactgcgaggcgacgggcacgtgctggacgaggagtcctggtccgacgtcgagtacctcagagccaacaggccaccaacctgggggtactgcgtgtcgaaggtgctcctcgagaaggaggcgtgcaggttcgcgggcgagcacggcatcagcctggtcaccgtctgccccgtcatcaccgtgggcgcggcgccggcgcccaaggtccgcacgagcatcatcgacagcctctccatgctgtccggcgacgagcgagggctcgccgtgctcaagggcatcgagaagacctccggcgcggtgcagctggtccacgtcgacgacctctgccgcgccgagctgttcctggcggaggcggcggcggccgacgggaggtacatctgctgcggcctcaacacgaccgtcctcgagctcgcgcgtttcctggcacacaagtacccgcagtacggcgtgaaaacaaacctcgacggcgatgaacagcagctactcgagaagccgagggtgagggtgtcgtcggagaagctcgtccgggaagggtttgagtacaggcacaacacgctggacgagatctacgacaatgtggttgagtacggcaagtcgttagggattctgccctactgatacatagatgcccgagcttaattaagtacgagggcagcatatatgttatcggacatatacgagtcttggaaagtaattaaataatttatggagatatttttcattggaaaaaacagtgtgagagttctaaactagctcaaaattgagctgaaaagcacttttgaacccccctccccctacattttactattgctgctgaacgacgtggaggtcagattccatgtccgactgagaggatcgtcgaggtcggcgcggaaggcctccaggctccaggagggcgagcgtctgaggtgggagtgggacgtcttcgccatgtcatctgcggtttcagaatcgagacggccaagcacgtttggtgtgatatggaatcgtgatgaacagctgtcaggactccacccacgggctctccagtggaaggtgcggctgaagaagacgcgatgcagaaggcgacgccggtggctgatgaaggcgctgtggagaagacgccggctgtgaatgggccgcgagtggcaagacgtgttcgcaagcccaatgtgcgtgtatgtgggccggaatggttgaggcagtagtgagatgtacaaatatgtaataagcagaac

SEQ ID NO: 207258 - DNA, 3352 bp, Zea Mays
ctcgttctcactttctcagcctcgtccatgcttgccagctgtgcttcctgccgctcctctagtctccacaatccagtccttctccagtctgcccgctcattctgtcgaacacctcgtcctctacatcctcatcgacgtcttcccaattcaaaactcctaaaccctagcccttcttcccgacaccaccatccatccaaaatcactgggtgatgcggaagaggtagcctccgccgatggcctgctgcttcgtccgcgtcgctgcggcgccccgcctcctcatctaccgcgccgccgctccgcggcagctcccgtcgccgctcaacgtattcaggaagggtttttccgagcagtcagttctgccagtcacagattcgattgagtgtttccaaggaccatcagtgccgaatactccacggattccactgtatgatgacagcgtatcctcaagcatattggatacattgtcgaatccgactgggggtgtccctcatgctgatccttcaaagagcagaataatgctagttgatggaacgtcgatgatgtatagatcctactacaagatattagcacagctgcagcacggccagttggagcatgctgatggaaatggggattgggttttaactatattcaaagctctatccctgcttcttgacatgctggagttcattccatctcatgctgcggttgtgtttgaccacgatggagtcccatatggtcattatactgccatgccatctaaagaatgtcacatggcaaaaggtatgggtgtatgatgtctcaaagttgatgggaacatggtagaaggtaatctgtggctgtcaattagcatcttggggatgcatcagaggtcttggactgagcctcaatccactaattgtgtttcatggcatggagccctggcttgcacataagcaatgttctattatacatttatacttcattccttggtcaagaaagtgttgggtagagagaagtagaaatggtataggagtgttgggtaaccagttttagaatatgcaatataggctttgtaaaaaaacttgacctgcgggggtaagaccgcccccacggtattatattaagaagaccttctcacgcaggtcgagaaaacccccgaaccctgccccacccatacatagcggcaccgtagcccatgtgagaacgaccacaaccgtggccgagccttagacttgtgctttggcgtgggacaaacgaggtgatttatttaaccacagccgggaaattcgctcccacggggagtcgaacccaggacctgaggagtgctactcaaaccacctagccaactcggctagaggccctttagcactgcctacttttattttctaagaattttatgtcacttagtttcttggttcttattatcttcctagctatactttacttaaaaatgtgtagtatattggaagcaacaaacatacgagtcatcaagggcatcttcgatgctccaacttgggaggtcttagagatactttgcttacacattggaaagagagcataccaacacttattcatttaggttttcattagccacttcttagaagatacctttgcttatggagggttgggtaccaattgattgttttcagctgttgtatcatgttactctcatcttttgaatcctataaagaaacattaccattttttctcccctttaggaatgacctttcgtcatatgttgtaccctgcttacaagagcaaccgcactccaacacctgacaccgttgttcagggcatgcaatacttgaaggcatccattaaggcaatgtcaataaaagtaattgaggttccaggcgttgaagctgatgatgttattggcaccctggccataaacagtgtttcggctggttacaaggtacggattgtctctcctgataaagacttcttccaaattttatcaccttctttgcgtctgctcaggattgctccacgtggatcagggatggtttcatttggagttgaagacttcgtcaagcgatatggaccattgaaaccctcgcagtttgtggatgttgttgcactttcaggagacaaagctgacaatatacctggagttgaggggattggagatattaatgcagtaaagctgatatctaagtttggttccttggataatctactgaaatccgtggacgaagttgaggatgaacgaattaaacaggctttgatttctcactcggaacaggcaatcctttgcaaaaacctggccacgctgcgttctgatcttcctcattatatggttcctttcaagacagccgaccttgtatttaagaagccacaggatgatggagagaaattcataaaactcttacgagcattggaagcatatgcagaaggttcctcagtaaatccaatcatcagaagagcagcctatctttggaacaaacttaaatcatgatgacactgatgttttcagcgttgaataaaaaggaattttgtcaaggctgagagtttgggttcaaagcttggtgtcgtagtgctcaatactggcggcattgacttctgtggactcggcggccagctacactcacatcgcaacgcaaaatcaaattgttgctggcagaagtgcataaattgaaggtgccgatgcttaagcaaagcagctcagtgtttatacctcggaacttagctctgtagataagaaatgcacaacattgcccatgtattccgccttttttgagaggaaagctcgtggaatctatttgattttttttctctgtactaccaattacaaagggttgtaggtggagctgtggaggccagagcgggcaaccgtgtggcttaacattctaccacgcctagcactctagcaggtttcatgaagtctactacggtggtgaatcagatcgcacaactgttgtgttgtaggagcgagtatgtgctcgttttgtcgcacaaagatgttgtaaggctgagtccaatccttgtcgatcctgactgttgatgccggcggtcggtaccgagcaaactggctccaatgccggtcggtttgattggctggttggtgggcttgccaatcgatctgaggcctagtttgttttgtggtgattaaagtttagtgagtcacttttagtttctaaagaaacaaacatggtaactaaagtggtgtaactaaacttaagttctttagccacaagggagtgactaaaaggactaaagtaggatttctttcttagtgcatcacacatctactaattaataggagaaatgcagtcttattcgcgtcaaaccgtctcgtacaccagcacaaaccgtctcgtataataacaggactacaggagagcaacttcccctcgaaacgtcatgtacgaactacgaactaatggatgag

SEQ ID NO: 207259 - DNA, 1782 bp, Zea Mays
gttgcttattgacctattgggcagtatcctatgtaaagcgactaaatgtgccaagcggcatggtgggggcttgtcgccttgatgtagcatatgaacatttcaaggaaaagcctcacatgttccagtttgttccaaatgaaaagcaggtccaggctgccaataagctattgaagtcacttccacaaaggggcagaaggaaaaaacttgatggggttcctgtttttagtgcgcaaaacttgaatattgcagtggcaacaaatgatggaattagatggtacacaccatacttttttgataaaaacttgttggacaatatccttgaagcttctatggatcaacatttccattcgataatgcaaaatcgccatacacgtcgtagaagggatattgtcgatgatagtttaacatcagaaataattgaagaaagtgctgaaagcttgcttgagcccccagaggttcaagaattaatgaatgagattggcccagctggtataccattaaatgttgtaacgaaagctgcagagattcagtttcttgatgttgttgataaagtccttctaggaaataagtggttaaggaaagcttctggcatacaaccaaagttcccttatgttgttgattcatttgaagaaaggactgctgtttcaattgccaatattgctactaccagcagtttaactgcttcaaacgacgacagcagttgccagaataatcaagaaactcaatcttccgagccaagtggtgataacagcagctacagaaatcacaataatgaagatcataatcactttccgtttagcaatctgcttccaaatatatggccagggcatgacagaaagttcaaatcacaagagagtgacaataagtttagcagatatgatgccgacgtgaagagtaagttacaagcaaaccctcttcttccgaaaatcaccatggttggcatctcaatgggtgatggtgcacagatgagcaaagccaacttaaagaagacaatggaagacttgacaaaagagttggagcaaacgagtgaagaaaatatgttcggtgatgaaaaagacccactttttgttgccaacgttggtgactactcaaggataacaaagattagctctgcatgaggctcgttgaccaacaggcgacagcaagggtgttgtactgaactgctaacgaagtctacagtccatgatactgatcttagagggctctactgatataatgatgcaaatcggaggtcatcagatcatatggacattcgactgtcgaccgttctgactttagaggctatccaacgtcaacagttacaagccaatctaaattttcggatatgatttgccaaaaggatgattgtaaatagaaaagtttgcagaatgtccaccatgcagttaggcgtgaagatctgaagcaacatgttgttggatttctaagatcttagctcgtaacagctgtagagtatggtggtatatagcttcaggattgagatgggggtcacaggagtctgtcaggtgagcagagtcgaataaattgatgtgggtagcatttttcttcactagctgcgtatcggatctgagtgtgtatggcgagagttacggtaaatgttggttcgcatataggtccttggattatttattgtacgcgatatggtgaaaggaggttgtagctaacatgttgtgtctccgatcatcatactgacattattgtctctcatgatcttatacttgcttataaatagaacttaaaactttattttgagttgacagcatgagcgacaattgagagttgggt

SEQ ID NO: 207260 - DNA, 2111 bp, Zea Mays
acaaaaaggcacgccccacccagtccagtccccaccaagcaggcgccacccgttcggtccgtacaggaggggtccaccatgccgtgctcctcttcgtcgtccaaccccttccactccctcgcctccgccttccccttcctctcctccacatccccacccccatccccacccgcctcgcccgcgcccgccgctccccacctcgccgtcccgctcctcctccccgtctcctcggcttccgagtcccgccgcggggcgcagccgctgccgggcacgcggatggtcggcgcgggcgcgaccggcgggggtaacatggccagcggtggtggggggcccgcgttcgtgggccaggtgttcaccatgctcgacccatccgggaacgggctcatggccgttaccacacgcttcgagctcccgcgcttcctcaccaacaggactcctatgtggttcaaaaggatgctatcaccgtcgaagaagactgaaaatagtccagtatttaggttttttatggatctgaatgatgcagtatcctatgtaaagcgactaaatgtgccaagcggcatggtgggggcttgtcgccttgatgtagcatatgaacatttcaaggtacacaccatacttttttgataaaaacttgttggacaatatccttgaagcttctatggatcaacatttccattcgataatgcaaaatcgccatacacgtcgtagaagggatattgtcgatgatagtttaacatcagaaataattgaagaaagtgctgaaagcttgcttgagcccccagaggttcaagaattaatgaatgagattggcccagctggtataccattaaatgttgtaacgaaagctgcagagattcagtttcttgatgttgttgataaagtccttctaggaaataagtggttaaggaaagcttctggcatacaaccaaagttcccttatgttgttgattcatttgaagaaaggactgctgtttcaattgccaatattgctactaccagcagtttaactgcttcaaacgacgacagcagttgccagaataatcaagaaactcaatcttccgagccaagtggtgataacagcagctacagaaatcacaataatgaagatcataatcactttccgtttagcaatctgcttccaaatatatggccagggcatgacagaaagttcaaatcacaagagagtgacaataagtttagcagatatgatgccgacgtgaagagtaagttacaagcaaaccctcttcttccgaaaatcaccatggttggcatctcaatgggtgatggtgcacagatgagcaaagccaacttaaagaagacaatggaagacttgacaaaagagttggagcaaacgagtgaagaaaatatgttcggtgatgaaaaagacccactttttgttgccaacgttggtgactactcaaggataacaaagattagctctgcatgaggctcgttgaccaacaggcgacagcaagggtgttgtactgaactgctaacgaagtctacagtccatgatactgatcttagagggctctactgatataatgatgcaaatcggaggtcatcagatcatatggacattcgactgtcgaccgttctgactttagaggctatccaacgtcaacagttacaagccaatctaaattttcggatatgatttgccaaaaggatgattgtaaatagaaaagtttgcagaatgtccaccatgcagttaggcgtgaagatctgaagcaacatgttgttggatttctaagatcttagctcgtaacagctgtagagtatggtggtatatagcttcaggattgagatgggggtcacaggagtctgtcaggtgagcagagtcgaataaattgatgtgggtagcatttttcttcactagctgcgtatcggatctgagtgtgtatggcgagagttacggtaaatgttggttcgcatataggtccttggattatttattgtacgcgatatggtgaaaggaggttgtagctaacatgttgtgtctccgatcatcatactgacattattgtctctcatgatcttatacttgcttataaatagaacttaaaactttattttgagttgacagcatgagcgacaattgagagttgggt

SEQ ID NO: 207261 - DNA, 3962 bp, Zea Mays
atggcggcagccgttgccgttcttcgcgccgccctccgccggggccgtccggcagctgcgtcgctactgcaccgccttcccaacccctctgctcggagcctcccgccaccgcctcctctcggtcgagcgcttcgtcccctctcgcggcttggtttctccgccggattcgggcactcctcctccaccgaggattttggcttcggctactcccccgccaccgaggattcagcggccgccgcgaagcccaagaccaagaccaaggccaggaagcaccccatgaagcagtcgcgcttcgacttcaccaaggtggacgccgcgcttctccccaccgtcatcctcgtcggccgccccaacgtcggcaagtcagccctcttcaacagatttatacggaggagggaggcgttggtgtacaatactcctggggaccatgtcactcgtgacatccgtgaaggagttgccaagcttggggatctccgtttccgtgtgcttgactcagctggacttgagactgcagcaacatctgggagcattctcgctcggacagcagacatgacagggaatgtattggctaggtctcaatttgccattttcttgattgatgtgagggatggtcttcagccgctggatcttgaggttgggcaatggctgcgcaagcatgcatctggtatacatacgcttgttgcaatgaacaagtccgagtcacttgatgagcatggatttctgactgctgctgctggagaagcacacaagttggggtttggtgaccctgttgcaatatccgcagagacaggcctggggatggcagaactctatgagatactcaggccattgtttgaagaatacatgtttcagcttcgaaataatgacctcaaccaagatgatcctatctcggaggttgaaactgaggcccatgatggtgatgagagcaagttacctttgcagttggcaattgtgggacgtcctaatgttgggaagtccacccttttaaataccttgttgcaagaacagagagttcttgttggtccagaggcaggcctaacaagggactcgattcgggctcagtttcaatttgatagtcgaaccgtgtatttagtggatactgctggttggatggaaagatcagggaaggagaaagggccagcatctttgagtgttgtgcagtctaggaagaacttaatgagagctcacattgttgctcttgtgctggatgctgaaaagattgctaagtccaaaagtagcatgaatcatccagaaatcgtgatagcacggcaagcaatagaagagggccgtggactagttgtgattgtcaataaaatggatctccttagagataaccaaacactgtttaacaaggttatggacgctgttcctagagaaatccagacagtcattcctcaggtgacaggaataccagctgttttcgtgtcagcgctggaggggagggggcggattgctgtgatgcgccaggttatagatacctatgagaagtggtgtttaagattgtcaacatcacggctcaaccgttggttgcgtaaggttatgagcagacattcctggaaagattcagctactcagccaaaagtcaagtacttcactcaagtgaaggcacgaccaccaacatttgttgccttcatgagtgggaagactcagctttctgatacagatactaggttcttgacaaagtccctcaaggaagatttcgacatcgggggaataccgatacggatcatacaacgttctgttccaagaaaagcttatgctaagcgcaacaacacaaggaacactggccctagggttgtcaggatgaaaacagacaaacggacagcggtatctgacccagccctgtcatagagggtgagcaccagtatcagccgcctaacctgaagaagggaggtcatgtttcgcgtttgagctatatatatatgcttctcatggggaaacgggaagtgaatgtttttctgactcgggaagttatacaaagctatgagctagccggtccggctgcctgcaccgcatgctcaagaagaagaatgactgtaagaaacaagcccagcaattcgaaggacagcatcacttctcaacattgggtgcaaggtggtattgatgagcgtcaagcactcaagttcaccccagaactccagatcagatgaagaggactcctatgtggttcaaaaggatgctatcaccgtcgaagaagactgaaaatagtccagtatttaggttttttatggatctgaatgatgcagtatcctatgtaaagcgactaaatgtgccaagcggcatggtgggggcttgtcgccttgatgtagcatatgaacatttcaaggtccaggctgccaataagctattgaagtcacttccacaaaggggcagaaggaaaaaacttgatggggttcctgtttttagtgcgcaaaacttgaatattgcagtggcaacaaatgatggaattagatggtacacaccatacttttttgataaaaacttgttggacaatatccttgaagcttctatggatcaacatttccattcgataatgcaaaatcgccatacacgtcgtagaagggatattgtcgatgatagtttaacatcagaaataattgaagaaagtgctgaaagcttgcttgagcccccagaggttcaagaattaatgaatgagattggcccagctggtataccattaaatgttgtaacgaaagctgcagagattcagtttcttgatgttgttgataaagtccttctaggaaataagtggttaaggaaagcttctggcatacaaccaaagttcccttatgttgttgattcatttgaagaaaggactgctgtttcaattgccaatattgctactaccagcagtttaactgcttcaaacgacgacagcagttgccagaataatcaagaaactcaatcttccgagccaagtggtgataacagcagctacagaaatcacaataatgaagatcataatcactttccgtttagcaatctgcttccaaatatatggccagggcatgacagaaagttcaaatcacaagagagtgacaataagtttagcagatatgatgccgacgtgaagagtaagttacaagcaaaccctcttcttccgaaaatcaccatggttggcatctcaatgggtgatggtgcacagatgagcaaagccaacttaaagaagacaatggaagacttgacaaaagagttggagcaaacgagtgaagaaaatatgttcggtgatgaaaaagacccactttttgttgccaacgttggtgactactcaaggataacaaagattagctctgcatgaggctcgttgaccaacaggcgacagcaagggtgttgtactgaactgctaacgaagtctacagtccatgatactgatcttagagggctctactgatataatgatgcaaatcggaggtcatcagatcatatggacattcgactgtcgaccgttctgactttagaggctatccaacgtcaacagttacaagccaatctaaattttcggatatgatttgccaaaaggatgattgtaaatagaaaagtttgcagaatgtccaccatgcagttaggcgtgaagatctgaagcaacatgttgttggatttctaagatcttagctcgtaacagctgtagagtatggtggtatatagcttcaggattgagatgggggtcacaggagtctgtcaggtgagcagagtcgaataaattgatgtgggtagcatttttcttcactagctgcgtatcggatctgagtgtgtatggcgagagttacggtaaatgttggttcgcatataggtccttggattatttattgtacgcgatatggtgaaaggaggttgtagctaacatgttgtgtctccgatcatcatactgacattattgtctctcatgatcttatacttgcttataaatagaacttaaaactttattttgagttgacagcatgagcgacaattgagagttgggt

SEQ ID NO: 207262 - DNA, 3991 bp, Zea Mays
atggcggcagccgttgccgttcttcgcgccgccctccgccggggccgtccggcagctgcgtcgctactgcaccgccttcccaacccctctgctcggagcctcccgccaccgcctcctctcggtcgagcgcttcgtcccctctcgcggcttggtttctccgccggattcgggcactcctcctccaccgaggattttggcttcggctactcccccgccaccgaggattcagcggccgccgcgaagcccaagaccaagaccaaggccaggaagcaccccatgaagcagtcgcgcttcgacttcaccaaggtggacgccgcgcttctccccaccgtcatcctcgtcggccgccccaacgtcggcaagtcagccctcttcaacagatttatacggaggagggaggcgttggtgtacaatactcctggggaccatgtcactcgtgacatccgtgaaggagttgccaagcttggggatctccgtttccgtgtgcttgactcagctggacttgagactgcagcaacatctgggagcattctcgctcggacagcagacatgacagggaatgtattggctaggtctcaatttgccattttcttgattgatgtgagccgctggatcttgaggttgggcaatggctgcgcaagcatgcatctggtatacatacgcttgttgcaatgaacaagtccgagtcacttgatgagcatggatttctgactgctgctgctggagaagcacacaagttggggtttggtgaccctgttgcaatatccgcagagacaggcctggggatggcagaactctatgagatactcaggccattgtttgaagaatacatgtttcagcttcgaaataatgacctcaaccaagatgatcctatctcggaggttgaaactgaggcccatgatggtgatgagagcaagttacctttgcagttggcaattgtgggacgtcctaatgttgggaagtccacccttttaaataccttgttgcaagaacagagagttcttgttggtccagaggcaggcctaacaagggactcgattcgggctcagtttcaatttgatagtcgaaccgtgtatttagtggatactgctggttggatggaaagatcagggaaggagaaagggccagcatctttgagtgttgtgcagtctaggaagaacttaatgagagctcacattgttgctcttgtgctggatgctgaaaagattgctaagtccaaaagtagcatgaatcatccagaaatcgtgatagcacggcaagcaatagaagagggccgtggactagttgtgattgtcaataaaatggatctccttagagataaccaaacactgtttaacaaggttatggacgctgttcctagagaaatccagacagtcattcctcaggtgacaggaataccagctgttttcgtgtcagcgctggaggggagggggcggattgctgtgatgcgccaggttatagatacctatgagaagtggtgtttaagattgtcaacatcacggctcaaccgttggttgcgtaaggttatgagcagacattcctggaaagattcagctactcagccaaaagtcaagtacttcactcaagtgaaggcacgaccaccaacatttgttgccttcatgagtgggaagactcagctttctgatacagatactaggttcttgacaaagtccctcaaggaagatttcgacatcgggggaataccgatacggatcatacaacgttctgttccaagaaaagcttatgctaagcgcaacaacacaaggaacactggccctagggttgtcaggatgaaaacagacaaacggacagcggtatctgacccagccctgtcatagagggtgagcaccagtatcagccgcctaacctgaagaagggaggtcatgtttcgcgtttgagctatatatatatgcttctcatggggaaacgggaagtgaatgtttttctgactcgggaagttatacaaagctatgagctagccggtccggctgcctgcaccgcatgctcaagaagaagaatgactgtaagaaacaagcccagcaattcgaaggacagcatcacttctcaacattgggtgcaaggtggtattgatgagcgtcaagcactcaagttcaccccagaactccagatcagatgaagaggactcctatgtggttcaaaaggatgctatcaccgtcgaagaagactgaaaatagtccagtatttaggttttttatggatctgaatgatgcagtatcctatgtaaagcgactaaatgtgccaagcggcatggtgggggcttgtcgccttgatgtagcatatgaacatttcaaggaaaagcctcacatgttccagtttgttccaaatgaaaagcaggtccaggctgccaataagctattgaagtcacttccacaaaggggcagaaggaaaaaacttgatggggttcctgtttttagtgcgcaaaacttgaatattgcagtggcaacaaatgatggaattagatggtacacaccatacttttttgataaaaacttgttggacaatatccttgaagcttctatggatcaacatttccattcgataatgcaaaatcgccatacacgtcgtagaagggatattgtcgatgatagtttaacatcagaaataattgaagaaagtgctgaaagcttgcttgagcccccagaggttcaagaattaatgaatgagattggcccagctggtataccattaaatgttgtaacgaaagctgcagagattcagtttcttgatgttgttgataaagtccttctaggaaataagtggttaaggaaagcttctggcatacaaccaaagttcccttatgttgttgattcatttgaagaaaggactgctgtttcaattgccaatattgctactaccagcagtttaactgcttcaaacgacgacagcagttgccagaataatcaagaaactcaatcttccgagccaagtggtgataacagcagctacagaaatcacaataatgaagatcataatcactttccgtttagcaatctgcttccaaatatatggccagggcatgacagaaagttcaaatcacaagagagtgacaataagtttagcagatatgatgccgacgtgaagagtaagttacaagcaaaccctcttcttccgaaaatcaccatggttggcatctcaatgggtgatggtgcacagatgagcaaagccaacttaaagaagacaatggaagacttgacaaaagagttggagcaaacgagtgaagaaaatatgttcggtgatgaaaaagacccactttttgttgccaacgttggtgactactcaaggataacaaagattagctctgcatgaggctcgttgaccaacaggcgacagcaagggtgttgtactgaactgctaacgaagtctacagtccatgatactgatcttagagggctctactgatataatgatgcaaatcggaggtcatcagatcatatggacattcgactgtcgaccgttctgactttagaggctatccaacgtcaacagttacaagccaatctaaattttcggatatgatttgccaaaaggatgattgtaaatagaaaagtttgcagaatgtccaccatgcagttaggcgtgaagatctgaagcaacatgttgttggatttctaagatcttagctcgtaacagctgtagagtatggtggtatatagcttcaggattgagatgggggtcacaggagtctgtcaggtgagcagagtcgaataaattgatgtgggtagcatttttcttcactagctgcgtatcggatctgagtgtgtatggcgagagttacggtaaatgttggttcgcatataggtccttggattatttattgtacgcgatatggtgaaaggaggttgtagctaacatgttgtgtctccgatcatcatactgacattattgtctctcatgatcttatacttgcttataaatagaacttaaaactttattttgagttgacagcatgagcgacaattgagagttgggt

SEQ ID NO: 207263 - DNA, 3976 bp, Zea Mays
tttttctccgtttccccgacacacacacacacacaaaagaattatggcggcagccgttgccgttcttcgcgccgccctccgccggggccgtccggcagctgcgtcgctactgcaccgccttcccaacccctctgctcggagcctcccgccaccgcctcctctcggtcgagcgcttcgtcccctctcgcggcttggtttctccgccggattcgggcactcctcctccaccgaggattttggcttcggctactcccccgccaccgaggattcagcggccgccgcgaagcccaagaccaagaccaaggccaggaagcaccccatgaagcagtcgcgcttcgacttcaccaaggtggacgccgcgcttctccccaccgtcatcctcgtcggccgccccaacgtcggcaagtcagccctcttcaacagatttatacggaggagggaggcgttggtgtacaatactcctggggaccatgtcactcgtgacatccgtgaaggagttgccaagcttggggatctccgtttccgtgtgcttgactcagctggacttgagactgcagcaacatctgggagcattctcgctcggacagcagacatgacagggaatgtattggctaggtctcaatttgccattttcttgattgatgtgagggatggtcttcagccgctggatcttgaggttgggcaatggctgcgcaagcatgcatctggtatacatacgcttgttgcaatgaacaagtccgagtcacttgatgagcatggatttctgactgctgctgctggagaagcacacaagttggggtttggtgaccctgttgcaatatccgcagagacaggcctggggatggcagaactctatgagatactcaggccattgtttgaagaatacatgtttcagcttcgaaataatgacctcaaccaagatgatcctatctcggaggttgaaactgaggcccatgatggtgatgagagcaagttacctttgcagttggcaattgtgggacgtcctaatgttgggaagtccacccttttaaataccttgttgcaagaacagagagttcttgttggtccagaggcaggcctaacaagggactcgattcgggctcagtttcaatttgatagtcgaaccgtgtatttagtggatactgctggttggatggaaagatcagggaaggagaaagggccagcatctttgagtgttgtgcagtctaggaagaacttaatgagagctcacattgttgctcttgtgctggatgctgaaaagattgctaagtccaaaagtagcatgaatcatccagaaatcgtgatagcacggcaagcaatagaagagggccgtggactagttgtgattgtcaataaaatggatctccttagagataaccaaacactgtttaacaaggttatggacgctgttcctagagaaatccagacagtcattcctcaggtgacaggaataccagctgttttcgtgtcagcgctggaggggagggggcggattgctgtgatgcgccaggttatagatacctatgagaagtggtgtttaagattgtcaacatcacggctcaaccgttggttgcgtaaggttatgagcagacattcctggaaagattcagctactcagccaaaagtcaagtacttcactcaagtgaaggcacgaccaccaacatttgttgccttcatgagtgggaagactcagctttctgatacagatactaggttcttgacaaagtccctcaaggaagatttcgacatcgggggaataccgatacggatcatacaacgttctgttccaagaaaagcttatgctaagcgcaacaacacaaggaacactggccctagggttgtcaggatgaaaacagacaaacggacagcggtatctgacccagccctgtcatagagggtgagcaccagtatcagccgcctaacctgaagaagggaggtcatgtttcgcgtttgagctatatatatatgcttctcatggggaaacgggaagtgaatgtttttctgactcgggaagttatacaaagctatgagctagccggtccggctgcctgcaccgcatgctcaagaagaagaatgactgtaagaaacaagcccagcaattcgaaggacagcatcacttctcaacattgggtgcaaggtggtattgatgagcgtcaagcactcaagttcaccccagaactccagatcagatgaagaggactcctatgtggttcaaaaggatgctatcaccgtcgaagaagactgaaaatagtccagtatttaggttttttatggatctgaatgatgcagtatcctatgtaaagcgactaaatgtgccaagcggcatggtgggggcttgtcgccttgatgtagcatatgaacatttcaaggaaaagcctcacatgttccagtttgttccaaatgaaaagcaggtccaggctgccaataagctattgaagtcacttccacaaaggggcagaaggaaaaaacttgatggggttcctgtttttagtgcgcaaaacttgaatattgcagtggcaacaaatgatggaattagatggtacacaccatacttttttgataaaaacttgttggacaatatccttgaagcttctatggatcaacatttccattcgataatgcaaaatcgccatacacgtcgtagaagggatattgtcgatgatagtttaacatcagaaataattgaagaaagtgctgaaagcttgcttgagcccccagaggttcaagaattaatgaatgagattggcccagctggtataccattaaatgttgtaacgaaagctgcagagattcagtttcttgatgttgttgataaagtccttctaggaaataagtggttaaggaaagcttctggcatacaaccaaagttcccttatgttgttgattcatttgaagaaaggactgctgtttcaattgccaatattgctactaccagcagtttaactgcttcaaacgacgacagcagttgccagaataatcaagaaactcaatcttccgagccaagtggtgataacagcagctacagaaatcacaataatgaagatcataatcactttccgtttagcaatctgcttccaaatatatggccagggcatgacagaaagttcaaatcacaagagagtgacaataagtttagcagatatgatgccgacgtgaagaatgagcaaagccaacttaaagaagacaatggaagacttgacaaaagagttggagcaaacgagtgaagaaaatatgttcggtgatgaaaaagacccactttttgttgccaacgttggtgactactcaaggataacaaagattagctctgcatgaggctcgttgaccaacaggcgacagcaagggtgttgtactgaactgctaacgaagtctacagtccatgatactgatcttagagggctctactgatataatgatgcaaatcggaggtcatcagatcatatggacattcgactgtcgaccgttctgactttagaggctatccaacgtcaacagttacaagccaatctaaattttcggatatgatttgccaaaaggatgattgtaaatagaaaagtttgcagaatgtccaccatgcagttaggcgtgaagatctgaagcaacatgttgttggatttctaagatcttagctcgtaacagctgtagagtatggtggtatatagcttcaggattgagatgggggtcacaggagtctgtcaggtgagcagagtcgaataaattgatgtgggtagcatttttcttcactagctgcgtatcggatctgagtgtgtatggcgagagttacggtaaatgttggttcgcatataggtccttggattatttattgtacgcgatatggtgaaaggaggttgtagctaacatgttgtgtctccgatcatcatactgacattattgtctctcatgatcttatacttgcttataaatagaacttaaaactttattttgagttgacagcatgagcgacaattgagagttgggt

SEQ ID NO: 207264 - DNA, 1302 bp, Zea Mays
gagaccggccggacgatggcagcagcagagcgcgaccgcgagcgatggatcctgcccggcgcgacggcgctggtcaccggcgggagcaaggggatcgggcacgcgatcgtggaggagctggcggcgctgggcgcgcgcgtgcacacgtgctcccgcaacgccgcggagctggaggagtgccgccggaggtgggcagagaagggcggcggcctgctgcagcaggtgaccgtctccgtctgcgacgtcgccgtgcgcgccgacagggaggcgctcatggccaccgtcagggatgtcttcggcggcaagctggacatcctcgtgaataacgcggcgcaggtggtcttcaagccggcggtggagtgcaccggggaggagtacacgcggatcatggcgaccaacctggagtcctgcttccacctcagccagctcgcgcacccgctgctccgcgacgcctccctcgccggcggcgggagcgtcgtgcacatctcctccaccgcgggcctcctcggctttcgaggggcggtgctttacagcactgcgaaaggaggagtgaaccagctcacgaggagcctggctgctgagtgggcctgtgacaagattcgtgtcaactcggtcgcgccaggaatcgtcatgactgacatggttaagaaccaagctcggaggccgtcgagcaagaaacttcacggattccgctgcggcgggccggcgagccggcagaggtggcgtccgtggtgtcgtttctgtgcatgccggcggccgcctacgtcaccggccaagtcatctacgttgacggtggccgaaccataagagcttgacgatgaccagcatcatcatcatctacgtctacgtggaatctaacaaacgcactccatccacaaacctagctacagtggcccgggatttcacatatatgtagccacacacatgcatgacacatgtgtgtgtgataaataaaagaattctttatgcgtgcatatcaccaacgacaaaagtaaataacaagcaggaaagaaaaaataaataaaaccatggagaaatcttgtttcatgcgcacaggcttgggccggggcaaaaaacccgtaacccgaagccgaaatacttgaacctgaacccgaaatacccaaaatccgaattttgttcgggaatttcgggtagcaacttgcaaaaccccgaatttatttcgggtaattcgggtatcacaatcgggtatccgaactacccgaattacccaaactttcagtgtcatgtactcatgtcatgtttaattattaatttataaatctataattatgtgtaagcgtg

SEQ ID NO: 207265 - DNA, 1927 bp, Zea Mays
aaaatatagtatattttaaataaaaataaagctcgacgtcgtcgtcacctctctcgccgtccacgagtcacggcgagcggcgtcgacggcgggcgggggtcctggccgttcactgccatgcctgaccccaccaccaaacccccttcgccacgcccccgccgtcgccgcaggctctgcggcctctgcctcggcaccgcgctcctcgcgctcctcgtcgccgcgctcgtccatgtcgtcgccccgcttccgcgcgccgcttccgcctccgcgcgcttctccgtcatcatagacggaggcagcacgggcacccgggcccacgtcttcgtcacggggcacgacggcagcccggatctggcgctatccaccgtgatgcgcgtctccccgggcctctcgtccttcgccgccgacccggcgcgggccggggagtctttgaagccgctgatagattttgcgagggataagattgacggcgcgggcagcgccgctggggaggcggaggtgcgactcatggccaccgcagggctgcgcctgctcgaggagcgcacccaggaggcaatcttagcgtcctgcagggacgttctacgagcctctgggttccggttcgaggacgcgtgggccaaggtgatcccaggctcggatgaaggtatctatgcttgggttgcagcaaattatgctcttggaagacttggaggggatcctaacagaaccgttggaataattgaacttgggggcgcttcagctcagcttgccttcgtttctgatgaagtacttccacccaaactgtcatataattatacttttattgaaacaacatacactctctataccaacagctttttaaactttggtcaaaatgcagctcaagactcgttccatgaaatgctgaggtcaagaggctcttctgaaaatgctacacttgctgatccttgtgctcccagaggatattcacgcaatgaagaaatgatgctgaggatgagtggtgcttcaaggtcaacattagagaaccagtatgttgataatgggactggaaactttacagaatgcatatcttcttcactgcttttactgcaaaaaggaaaggagaagtgccagtatcaacaatgtcacctgggatctactttcgtacctgagctgcgtggatacttcttggcaactgaaaatttctattttacatcaaagttctttggacttaagaagtcttcatcactctctgatttcatgtttgctggagaacaattttgcaatcaggatttgtccacccttagaaaaaaacatcctaataggtcagatgaagatttttcacggtattgcttctcgatggcatatattgtggctctactgcatgacagtcttggtgtatcactggatgataagaggattgagtattcaaaccaggttggagacattcaggttgaatgggctctaggagctttcatcacactgattcaaaatgcaagtttaaagccattacacaccgctgtggaatcaacccatagcaatagaccattgtttgctgtgctgggaatgtttcttttatgtggagtactttttgtatcaagatggaggaagcacaagacgaaagtcatatacgacttagagaaaggccggtacatcataacacacatcagctgatgctgaaccttgtgcagaagaactatatttatacgacaggaatagatgttgtgttgtacaacaatgtaccagttcaattatttgttttattttaggtagcagagctgggtgggtagagcatgaaatatagcacaaatgcgtatagaagaatgtgtagaacaagttgccatgtgttaattgaattattttggtgaataattatacctgttttgtttatcttatgagctccacatttttcatctgttacatctaattcttttggcgaataagtatacttaaattggttcacgttgat

SEQ ID NO: 207266 - DNA, 2076 bp, Zea Mays
aaaatatagtatattttaaataaaaataaagctcgacgtcgtcgtcacctctctcgccgtccacgagtcacggcgagcggcgtcgacggcgggcgggggtcctggccgttcactgccatgcctgaccccaccaccaaacccccttcgccacgcccccgccgtcgccgcaggctctgcggcctctgcctcggcaccgcgctcctcgcgctcctcgtcgccgcgctcgtccatgtcgtcgccccgcttccgcgcgccgcttccgcctccgcgcgcttctccgtcatcatagacggaggcagcacgggcacccgggcccacgtcttcgtcacggggcacgacggcagcccggatctggcgctatccaccgtgatgcgcgtctccccgggcctctcgtccttcgccgccgacccggcgcgggccggggagtctttgaagccgctgatagattttgcgagggataagattgacggcgcgggcagcgccgctggggaggcggaggtgcgactcatggccaccgcagggctgcgcctgctcgaggagcgcacccaggaggcaatcttagcgtcctgcagggacgttctacgagcctctgggttccggttcgaggacgcgtgggccaaggtgatcccaggctcggatgaaggtatctatgcttgggttgcagcaaattatgctcttggaagacttggaggggatcctaacagaaccgttggaataattgaacttgggggcgcttcagctcagcttgccttcgtttctgatgaagtacttccacccaaactgtcatataattatacttttattgaaacaacatacactctctataccaacagctttttaaactttggtcaaaatgcagctcaagactcgttccatgaaatgctgaggtcaagagttcaaaaatgaactagcggacgacaaatattcgagaatggagagagtaccaagcaagtatctcttcaagttcaccacccacatttgcaggctcttctgaaaatgctacacttgctgatccttgtgctcccagaggatattcacgcaatgaagaaatgatgctgaggatgagtggtgcttcaaggtcaacattagagaaccagtatgttgataatgggactggaaactttacagaatgcatatcttcttcactgcttttactgcaaaaaggaaagggtctctcttcacagcctctcttcagttgttcacataaactgacataaaaatcacttgaagagaagtgccagtatcaacaatgtcacctgggatctactttcgtacctgagctgcgtggatacttcttggcaactgaaaatttctattttacatcaaagttctttggacttaagaagtcttcatcactctctgatttcatgtttgctggagaacaattttgcaatcaggatttgtccacccttagaaaaaaacatcctaataggtcagatgaagatttttcacggtattgcttctcgatggcatatattgtggctctactgcatgacagtcttggtgtatcactggatgataagaggattgagtattcaaaccaggttggagacattcaggttgaatgggctctaggagctttcatcacactgattcaaaatgcaagtttaaagccattacacaccgctgtggaatcaacccatagcaatagaccattgtttgctgtgctgggaatgtttcttttatgtggagtactttttgtatcaagatggaggaagcacaagacgaaagtcatatacgacttagagaaaggccggtacatcataacacacatcagctgatgctgaaccttgtgcagaagaactatatttatacgacaggaatagatgttgtgttgtacaacaatgtaccagttcaattatttgttttattttaggtagcagagctgggtgggtagagcatgaaatatagcacaaatgcgtatagaagaatgtgtagaacaagttgccatgtgttaattgaattattttggtgaataattatacctgttttgtttatcttatgagctccacatttttcatctgttacatctaattcttttggcgaataagtatacttaaattggttcacgttgat

SEQ ID NO: 207267 - DNA, 2016 bp, Zea Mays
aaaatatagtatattttaaataaaaataaagctcgacgtcgtcgtcacctctctcgccgtccacgagtcacggcgagcggcgtcgacggcgggcgggggtcctggccgttcactgccatgcctgaccccaccaccaaacccccttcgccacgcccccgccgtcgccgcaggctctgcggcctctgcctcggcaccgcgctcctcgcgctcctcgtcgccgcgctcgtccatgtcgtcgccccgcttccgcgcgccgcttccgcctccgcgcgcttctccgtcatcatagacggaggcagcacgggcacccgggcccacgtcttcgtcacggggcacgacggcagcccggatctggcgctatccaccgtgatgcgcgtctccccgggcctctcgtccttcgccgccgacccggcgcgggccggggagtctttgaagccgctgatagattttgcgagggataagattgacggcgcgggcagcgccgctggggaggcggaggtgcgactcatggccaccgcagggctgcgcctgctcgaggagcgcacccaggaggcaatcttagcgtcctgcagggacgttctacgagcctctgggttccggttcgaggacgcgtgggccaaggtgatcccaggctcggatgaaggtatctatgcttgggttgcagcaaattatgctcttggaagacttggaggggatcctaacagaaccgttggaataattgaacttgggggcgcttcagctcagcttgccttcgtttctgatgaagtacttccacccaaactgtcatataattatacttttattgaaacaacatacactctctataccaacagctttttaaactttggtcaaaatgcagctcaagactcgttccatgaaatgctgaggtcaagagttcaaaaatgaactagcggacgacaaatattcgagaatggagagagtaccaagcaagtatctcttcaagttcaccacccacatttgcaggctcttctgaaaatgctacacttgctgatccttgtgctcccagaggatattcacgcaatgaagaaatgatgctgaggatgagtggtgcttcaaggtcaacattagagaaccagtatgttgataatgggactggaaactttacagaatgcatatcttcttcactgcttttactgcaaaaaggaaaggagaagtgccagtatcaacaatgtcacctgggatctactttcgtacctgagctgcgtggatacttcttggcaactgaaaatttctattttacatcaaagttctttggacttaagaagtcttcatcactctctgatttcatgtttgctggagaacaattttgcaatcaggatttgtccacccttagaaaaaaacatcctaataggtcagatgaagatttttcacggtattgcttctcgatggcatatattgtggctctactgcatgacagtcttggtgtatcactggatgataagaggattgagtattcaaaccaggttggagacattcaggttgaatgggctctaggagctttcatcacactgattcaaaatgcaagtttaaagccattacacaccgctgtggaatcaacccatagcaatagaccattgtttgctgtgctgggaatgtttcttttatgtggagtactttttgtatcaagatggaggaagcacaagacgaaagtcatatacgacttagagaaaggccggtacatcataacacacatcagctgatgctgaaccttgtgcagaagaactatatttatacgacaggaatagatgttgtgttgtacaacaatgtaccagttcaattatttgttttattttaggtagcagagctgggtgggtagagcatgaaatatagcacaaatgcgtatagaagaatgtgtagaacaagttgccatgtgttaattgaattattttggtgaataattatacctgttttgtttatcttatgagctccacatttttcatctgttacatctaattcttttggcgaataagtatacttaaattggttcacgttgat

SEQ ID NO: 207268 - DNA, 1729 bp, Zea Mays
attttaaataaaaataaagctcgacgtcgtcgtcacctctctcgccgtccacgagtcacggcgagcggcgtcgacggcgggcgggggtcctggccgttcactgccatgcctgaccccaccaccaaacccccttcgccacgcccccgccgtcgccgcaggctctgcggcctctgcctcggcaccgcgctcctcgcgctcctcgtcgccgcgctcgtccatgtcgtcgccccgcttccgcgcgccgcttccgcctccgcgcgcttctccgtcatcatagacggaggcagcacgggcacccgggcccacgtcttcgtcacggggcacgacggcagcccggatctggcgctatccaccgtgatgcgcgtctccccgggcctctcgtccttcgccgccgacccggcgcgggccggggagtctttgaagccgctgatagattttgcgagggataagattgacggcgcgggcagcgccgctggggaggcggaggtgcgactcatggccaccgcagggctgcgcctgctcgaggagcgcacccaggaggcaatcttagcgtcctgcagggacgttctacgagcctctgggttccggttcgaggacgcgtgggccaaggtgatcccaggctcggatgaaggtatctatgcttgggttgcagcaaattatgctcttggaagacttggaggggatcctaacagaaccgttggaataattgaacttgggggcgcttcagctcagcttgccttcgtttctgatgaagtacttccacccaaactgtcatataattatacttttattgaaacaacatacactctctataccaacagctttttaaactttggtcaaaatgcagctcaagactcgttccatgaaatgctgaggtcaagagagaagtgccagtatcaacaatgtcacctgggatctactttcgtacctgagctgcgtggatacttcttggcaactgaaaatttctattttacatcaaagttctttggacttaagaagtcttcatcactctctgatttcatgtttgctggagaacaattttgcaatcaggatttgtccacccttagaaaaaaacatcctaataggtcagatgaagatttttcacggtattgcttctcgatggcatatattgtggctctactgcatgacagtcttggtgtatcactggatgataagaggattgagtattcaaaccaggttggagacattcaggttgaatgggctctaggagctttcatcacactgattcaaaatgcaagtttaaagccattacacaccgctgtggaatcaacccatagcaatagaccattgtttgctgtgctgggaatgtttcttttatgtggagtactttttgtatcaagatggaggaagcacaagacgaaagtcatatacgacttagagaaaggccggtacatcataacacacatcagctgatgctgaaccttgtgcagaagaactatatttatacgacaggaatagatgttgtgttgtacaacaatgtaccagttcaattatttgttttattttaggtagcagagctgggtgggtagagcatgaaatatagcacaaatgcgtatagaagaatgtgtagaacaagttgccatgtgttaattgaattattttggtgaataattatacctgttttgtttatcttatgagctccacatttttcatctgttacatctaattcttttggcgaataagtatacttaaattggttcacgttgat

SEQ ID NO: 207269 - DNA, 1872 bp, Zea Mays
attttaaataaaaataaagctcgacgtcgtcgtcacctctctcgccgtccacgagtcacggcgagcggcgtcgacggcgggcgggggtcctggccgttcactgccatgcctgaccccaccaccaaacccccttcgccacgcccccgccgtcgccgcaggctctgcggcctctgcctcggcaccgcgctcctcgcgctcctcgtcgccgcgctcgtccatgtcgtcgccccgcttccgcgcgccgcttccgcctccgcgcgcttctccgtcatcatagacggaggcagcacgggcacccgggcccacgtcttcgtcacggggcacgacggcagcccggatctggcgctatccaccgtgatgcgcgtctccccgggcctctcgtccttcgccgccgacccggcgcgggccggggagtctttgaagccgctgatagattttgcgagggataagattgacggcgcgggcagcgccgctggggaggcggaggtgcgactcatggccaccgcagggctgcgcctgctcgaggagcgcacccaggaggcaatcttagcgtcctgcagggacgttctacgagcctctgggttccggttcgaggacgcgtgggccaaggtgatcccaggctcggatgaaggtatctatgcttgggttgcagcaaattatgctcttggaagacttggaggggatcctaacagaaccgttggaataattgaacttgggggcgcttcagctcagcttgccttcgtttctgatgaagtacttccacccaaactgtcatataattatacttttattgaaacaacatacactctctataccaacagctttttaaactttggtcaaaatgcagctcaagactcgttccatgaaatgctgaggtcaagagaggatattcacgcaatgaagaaatgatgctgaggatgagtggtgcttcaaggtcaacattagagaaccagtatgttgataatgggactggaaactttacagaatgcatatcttcttcactgcttttactgcaaaaaggaaaggagaagtgccagtatcaacaatgtcacctgggatctactttcgtacctgagctgcgtggatacttcttggcaactgaaaatttctattttacatcaaagttctttggacttaagaagtcttcatcactctctgatttcatgtttgctggagaacaattttgcaatcaggatttgtccacccttagaaaaaaacatcctaataggtcagatgaagatttttcacggtattgcttctcgatggcatatattgtggctctactgcatgacagtcttggtgtatcactggatgataagaggattgagtattcaaaccaggttggagacattcaggttgaatgggctctaggagctttcatcacactgattcaaaatgcaagtttaaagccattacacaccgctgtggaatcaacccatagcaatagaccattgtttgctgtgctgggaatgtttcttttatgtggagtactttttgtatcaagatggaggaagcacaagacgaaagtcatatacgacttagagaaaggccggtacatcataacacacatcagctgatgctgaaccttgtgcagaagaactatatttatacgacaggaatagatgttgtgttgtacaacaatgtaccagttcaattatttgttttattttaggtagcagagctgggtgggtagagcatgaaatatagcacaaatgcgtatagaagaatgtgtagaacaagttgccatgtgttaattgaattattttggtgaataattatacctgttttgtttatcttatgagctccacatttttcatctgttacatctaattcttttggcgaataagtatacttaaattggttcacgttgat

SEQ ID NO: 207270 - DNA, 1177 bp, Zea Mays
gtttaactacagtgcatgctaatgagtccctgatagtcttgccttcgtttctgatgaagtacttccacccaaactgtcatataattatacttttattgaaacaacatacactctctataccaacagctttttaaactttggtcaaaatgcagctcaagactcgttccatgaaatgctgaggtcaagagaggatattcacgcaatgaagaaatgatgctgaggatgagtggtgcttcaaggtcaacattagagaaccagtatgttgataatgggactggaaactttacagaatgcatatcttcttcactgcttttactgcaaaaaggaaaggagaagtgccagtatcaacaatgtcacctgggatctactttcgtacctgagctgcgtggatacttcttggcaactgaaaatttctattttacatcaaagttctttggacttaagaagtcttcatcactctctgatttcatgtttgctggagaacaattttgcaatcaggatttgtccacccttagaaaaaaacatcctaataggtcagatgaagatttttcacggtattgcttctcgatggcatatattgtggctctactgcatgacagtcttggtgtatcactggatgataagaggattgagtattcaaaccaggttggagacattcaggttgaatgggctctaggagctttcatcacactgattcaaaatgcaagtttaaagccattacacaccgctgtggaatcaacccatagcaatagaccattgtttgctgtgctgggaatgtttcttttatgtggagtactttttgtatcaagatggaggaagcacaagacgaaagtcatatacgacttagagaaaggccggtacatcataacacacatcagctgatgctgaaccttgtgcagaagaactatatttatacgacaggaatagatgttgtgttgtacaacaatgtaccagttcaattatttgttttattttaggtagcagagctgggtgggtagagcatgaaatatagcacaaatgcgtatagaagaatgtgtagaacaagttgccatgtgttaattgaattattttggtgaataattatacctgttttgtttatcttatgagctccacatttttcatctgttacatctaattcttttggcgaataagtatacttaaattggttcacgttgat

SEQ ID NO: 207271 - DNA, 2742 bp, Zea Mays
ccctttctttcgtggacccaccggcagtcgcctccgctgcatggccttagggccggcccttgggaaggctcctcctccatcagaatccagagctccatcaccggccacctgccatggcaggatcctccagtcgaaggagacatcccttaatgtacagtcctgacgagaaacaacagcatcccttccgaaagcatcacatcgcccgccaccgcctcctcaaacgccgcctcctcctctctgggtcaccgctgccgcttgccacctcgaccacgacaactgcacaggaaaaagaacacggggagtacgtacggatgggggagaaatgctcacgcgaaaatttgtgggagatgaggtctccaattaggacccgttcggtagacatggaagggaggaccgtaattgttcctacctagattacttctctaatttgtataagttttaatcaacaggaataattcttggtgcattccggtagaaacgaacgggcccttagggatgtggattttttttggaggggtacaggagctgttggttggagcaagcaaaattagttttttttctctaatatatgttttggggtgattttctgtggtggtggtgatgtgcgatcgcaggaacaatcaccaatcaccatccttaagaagatgatgcgatgcactgtaacgggcggcgggtgcgttgcttcgtggattggtgatcggaggtcgccggcggtcaaccccttcagcgtgcggatgtcgacgggcaacggtgggtggtgcggcggcctgaggtcgcgggcggcggaactctccggcctcgagatggcccatctacgtggcggcatcggggggctcttccgcgcgagcccgcgctatgggcgcttgcaagccacggccgcagttgaccctgaagatattccactggagaaggttcaagttaaatcctcaggacatgttatgccatatgttggtgttgcttgtttgggggctattctgtttggttatcatcttggtgtggtcaatggtgcgcttgaatatcttgcgaaggatcttggaattgctgaaaatgccgtcttacagtggacatctgcttattgctcaggatgggtggttagcacatccctagctggtgcaacactaggttcctttaccgggggatctttggcagataaatttgggcggacaagaacattcatcctggatgcagccccactggctgtaggtgcattcttgagcgcaacagctcaagatatccgcaccatgattattggtcggttgcttgctggaattggtattgggatctcatctgcacttgtacccctttacatatctgagatatcaccaactgaaattcgtggaacacttggttccgttaatcaactttttatctgcattggaattcttgcagctttgttagctggattgcctttggcaggaaatcctgcctggtggaggacaatgtttggaattgctgtagttccatccattttgctggctgtaggaatggccttttcgcctgaaagccctcgatggctattccagcaaggaaaggttattcaagcagaatcggctgtaaaaagactatatggaaaagaaatggttaccgaaattatgtatgatctgagagctagtggccaaagttcttctgagaccgaagctggctggtttgatcttttcagcaagcgttactggaaagttgtgagtgtgggggcagcactgtttttgttccagcagcttgctggtataaacgctgttgtatattactctacatcggtgttccgtaatgcaggcattacatctgatgttgctgctagtgctcttgttggagcagccaatgtttttggcaccatggttgcatcttctctaatggacaagcaaggaaggaaaagccttctgatgacaagcttttctggaatgggtgcttcaatgctactcctagcattgtccttcacctggaaagctctggcaccttattctggtattcttgctgttgttggcactgttctgtatgtgctgtcttttgctctaggagctggtcctgttcctgccctgcttcttcctgaaatatttgcctccagaataagggccaaggctgttgcattatctctaggcatgcactgggtatccaacttttttattggcctgtacttcttgagtgttgtcaacaagtttgggatcagcaatgtatatttgggatttgcatcagtgtgcgtccttgcagttctctacatagctgggaatgtggtcgagaccaaggggcgatcacttgaagagattgaacgggaactaagtgtagcagaatgatgtgcttttgctagtcatgctgcggcgccgttttggtgattttgagaatgcaaccaagcacacaaccgagcatccttggacctggagactttctagtttcatgtagcagttaccaatcagattcagaaacaatgaactcgtcaatgtttctggagataagttttcattttttgttctaaaatttcttgtttctcttgtataggagactttgagatagtttcagctctaaagacgtgaatatggagcagctccgctaacgaatctaggattcactagtaaaatgtttagctatacactagctctagatttacgaaacagaggtctcccttggaatgacttgttttgctcttgatgttggctgacatatccttcgaagcaatttggagtaaaaatacacaatgaaataactgccatgttctcaatatggactatataggcctatgccgtgtgtgcattg

SEQ ID NO: 207272 - DNA, 666 bp, Zea Mays
attctatatgtaatcctttatagctggtatccaacttttttattggcctgtacttcttgagtgttgtcaacaagtttgggatcagcaatgtatatttgggatttgcatcagtgtgcgtccttgcagttctctacatagctgggaatgtggtcgagaccaaggggcgatcacttgaagagattgaacgggaactaagtgtagcagaatgatgtgcttttgctagtcatgctgcggcgccgttttggtgattttgagaatgcaaccaagcacacaaccgagcatccttggacctggagactttctagtttcatgtagcagttaccaatcagattcagaaacaatgaactcgtcaatgtttctggagataagttttcattttttgttctaaaatttcttgtttctcttgtataggagactttgagatagtttcagctctaaagacgtgaatatggagcagctccgctaacgaatctaggattcactagtaaaatgtttagctatacactagctctagatttacgaaacagaggtctcccttggaatgacttgttttgctcttgatgttggctgacatatccttcgaagcaatttggagtaaaaatacacaatgaaataactgccatgttctcaatatggactatataggcctatgccgtgtgtgcattg

SEQ ID NO: 207273 - DNA, 4074 bp, Zea Mays
ctcgaattttgctgtgagtatattatgaaaaaaaatactaaatggaaatatgacgactggcgagagctagctagcacaaaggtcgtcgtcgaccatgtctgtggcgtctataaagcaaagctacatacatggcgcgtactgcaccaccgtaccttgcgtaccggctggaagaagcaaacaagccaagctataggctctagctagctccggcggacctcagcggccgggatcagatcggaatcggatgggcagcgtgggcgtggaggcggatgacgacggcagcatcgtcaaggagttcctgcagcggtgcgagccctccggcgacgccgcctacggcgagctcagggctctgctggcgcgcctccacgacccggccaccaggcgcgacgcgcgcctcttcctcgccgcgctccaccgccaccagcagcgcagctcgtcggccgccggcggactaacgcacgagcaattctttcgacgcttcggcttccgcatgcaggagctgctgctccaggataccgccaccgacataaccgcctccagcttcatcgccaccaagcccgccgcagccgcaggtttccaacaaatgaagaagttgacaatgatggagataccaagcatcttcattcctgaagattggtcattcactttctatgagggcctcaaccgtcatccagactccattttcagggataagacagtagctgagctgggatgtggcaacggttggatatctattgctcttgcagagaagtggtgcccttcaaaggtctatggcctggatataaacccaagagctgtgaagattgcatggataaacctgtacttgaacgcattagatgacgacggtctcccgatctatgacggggaggggaaaacattgctcgatagagttgaattctatgaatctgatctcctttcttactgtagagacaacaagatagagctcgatcgtattgttggatgcataccacagattctcaacccaaatccagaggcgatgtcaaagattgtaacagagaattcaagtgaggagttcttgtacgccttgagtaactactgtgctcttcagggttttgtcgaggaccaatttggccttgggttgattgctcgtgcggtggaagaagggatatctgtcataaagccttcaggtattatggtattcaacatgggaggtcgaccaggacagggtgtctgtgaacgtctatttcgacggcgtgggtttcgcattactaagctctggcaaaccaaaattatgcaggctgctgacacagatatttcagctttggttgaaattgagaaaaacagcagacatcgattcgagttcttcatggatcttgttggggatcagcctatctgtgctcgcacagcctgggcatacatgaaatctggtggtcacatttcacatgctttgtctgtgtatagctgtcaacttcgccagcccaaccaggtgaagaaaatatttgagtttcttaaagatggattccatgaagtcagcagttcccttgatttatcctttgacgatgattctgtagctgaggaaaaaattcccttcctagcttaccttgctagttttctgaaagagaacaagtcaaatccctgtgagccaccagctggatgtctaaactttaggaaacttgttgctggatttatgaagagctaccatcacattcctctaactcctgataatgtcgttgtgttcccttctcgctctgtggcaatagagaatgctcttcaattgttctcaccggcgcttgcaattgttgatgaacatttaaccagacacttgcccaagcaatggttaacatctttagcaattgagggaagagcagattgtaatcacgccgatggtacagttactgtaattgaggcaccacgccaatcagatttactgattgagttgatcaggaagctgcagcctcaggtggttgttactggcatggctcaatttgaggctatcaccagtgctgcttttgagaacctactaaacgtaacaaaagatgttggctcccggctgttcctggatatttctgagcatctggagttgtctagcctgccaagctctaatggtgtattgaaatatcttgctggaaagacattaccgtcacatgcagctatactgtgtggtttagtaaagaatcaggtgtactctgatctggaggttgcttttgccatttccgaagatgcagctgtatataaagcattatcacaaactattgagctattggaaggccacacttctctgatcagccagcactattatggttgccttttccacgagcttctggcatttcagattgctgaccgtcatccacagcaagagagacaacctgcggaagtgatacctcagcagatgataggattttctgacccagctgtgtctaccctaaaggctactgaatttttcgttcctggttcagctgaatccagcattattcatatggatttagatcgcagcttcctgccagtaccttcagcagtgaatgcgtctgtttttgaaagttttgtcaggcagaacatcactgattctgaaaccgatgtccgttccagcatccaacagctggtgaaagacagctatggtttatccgcagctggttgtgcagaaattatctacggaaacacctccgtagcactcttcaacaagctcgtcctttgttgcatgcaagaacagggcaccttgcttttccccttgggcaccaatggccactacgtctccgcagcaaagtttgtgaacgctagcaccgtgactataccgacaaatcccagttcagggttcaggatcgagcccaaggttctagctgacactcttaagaatgtatctcggccgtgggtgtatgtttgcggccccacgatcaaccctactggctttctgtacagtgacagtgacatccgagagctgctctccgtatgcgctgaatatggagccagggtagtgatagatacatccttctctggcctggagtacgagaccgatggatggaggcagtggaatctggcaggatgcctttcctctttgaagcgttcagagccatcgttctctgtggtcctgctcggagagctgtcctttgcgctgactgcaggtgggcatgactttgggtttgtgatattgggtgactcgtcgttggctgagacgttccatagtttttctagcttgagtcgaccgcacaccacattgaagtacactttcaagaagctgctggggcttaagaaccagaaggaccagcatttctcggatctgatagtggagcagaaggaggagctgaagaatcgcgccaaccagttgatacagacactggagagctgtggctgggaagctgccatcggttgcggtggcatctcgatgctggcgaagcccaccgcgtacatggggaaggccttcaaagctgctggcttcgacggcgagctggacgcgagcaacatccgggaagccatcctgagggccactgggctgtgcataaacagcagctcctggacggggatccctggctactgccggttcagctttgctctggagaggggggaattcgagcgtgcgatgggatgcatagctcggttcaaggagctggttctgggaggcgctcagatgaatggtgcctgatggagcaatccatgttatacgtaaccttggtgctgtgtagtagcgatgatattgttccaggtgatggagatatcaaggaataacaagagcctacctgctgtgaagtcaatgtactactaggatggatagggcgcttcgatgcgccctttctgtcttcgaattgctgtgctgtgcacggagaataaacatatactattatatatatacatacaatttgctaagatatactcctatttgttgtcgttccatgcataaccgtaacccattaattccaaagaaacctggggggtcatgatcttgtgaaccgttgggatcatgattagagggaaatttttgtttttagaatggattgcgcagcttgatttaactggaaatactgatttgatggatggaatggaacaagtgtacataaattgttggaggttacaatgtaggcctgcatcaggccttaggtgcaagcagacacgagctacaacagt

SEQ ID NO: 207274 - DNA, 3332 bp, Zea Mays
catgtatacaagatggattatgaggtctatggcctggatataaacccaagagctgtgaagattgcatggataaacctgtacttgaacgcattagatgacgacggtctcccgatctatgacggggaggggaaaacattgctcgatagagttgaattctatgaatctgatctcctttcttactgtagagacaacaagatagagctcgatcgtattgttggatgcataccacagattctcaacccaaatccagaggcgatgtcaaagattgtaacagagaattcaagtgaggagttcttgtacgccttgagtaactactgtgctcttcagggttttgtcgaggaccaatttggccttgggttgattgctcgtgcggtggaagaagggatatctgtcataaagccttcaggtattatggtattcaacatgggaggtcgaccaggacagggtgtctgtgaacgtctatttcgacggcgtgggtttcgcattactaagctctggcaaaccaaaattatgcaggctgctgacacagatatttcagctttggttgaaattgagaaaaacagcagacatcgattcgagttcttcatggatcttgttggggatcagcctatctgtgctcgcacagcctgggcatacatgaaatctggtggtcacatttcacatgctttgtctgtgtatagctgtcaacttcgccagcccaaccaggtgaagaaaatatttgagtttcttaaagatggattccatgaagtcagcagttcccttgatttatcctttgacgatgattctgtagctgaggaaaaaattcccttcctagcttaccttgctagttttctgaaagagaacaagtcaaatccctgtgagccaccagctggatgtctaaactttaggaaacttgttgctggatttatgaagagctaccatcacattcctctaactcctgataatgtcgttgtgttcccttctcgctctgtggcaatagagaatgctcttcaattgttctcaccggcgcttgcaattgttgatgaacatttaaccagacacttgcccaagcaatggttaacatctttagcaattgagggaagagcagattgtaatcacgccgatggtacagttactgtaattgaggcaccacgccaatcagatttactgattgagttgatcaggaagctgcagcctcaggtggttgttactggcatggctcaatttgaggctatcaccagtgctgcttttgagaacctactaaacgtaacaaaagatgttggctcccggctgttcctggatatttctgagcatctggagttgtctagcctgccaagctctaatggtgtattgaaatatcttgctggaaagacattaccgtcacatgcagctatactgtgtggtttagtaaagaatcaggtgtactctgatctggaggttgcttttgccatttccgaagatgcagctgtatataaagcattatcacaaactattgagctattggaaggccacacttctctgatcagccagcactattatggttgccttttccacgagcttctggcatttcagattgctgaccgtcatccacagcaagagagacaacctgcggaagtgatacctcagcagatgataggattttctgacccagctgtgtctaccctaaaggctactgaatttttcgttcctggttcagctgaatccagcattattcatatggatttagatcgcagcttcctgccagtaccttcagcagtgaatgcgtctgtttttgaaagttttgtcaggcagaacatcactgattctgaaaccgatgtccgttccagcatccaacagctggtgaaagacagctatggtttatccgcagctggttgtgcagaaattatctacggaaacacctccgtagcactcttcaacaagctcgtcctttgttgcatgcaagaacagggcaccttgcttttccccttgggcaccaatggccactacgtctccgcagcaaagtttgtgaacgctagcaccgtgactataccgacaaatcccagttcagggttcaggatcgagcccaaggttctagctgacactcttaagaatgtatctcggccgtgggtgtatgtttgcggccccacgatcaaccctactggctttctgtacagtgacagtgacatccgagagctgctctccgtatgcgctgaatatggagccagggtagtgatagatacatccttctctggcctggagtacgagaccgatggatggaggcagtggaatctggcaggatgcctttcctctttgaagcgttcagagccatcgttctctgtggtcctgctcggagagctgtcctttgcgctgactgcaggtgggcatgactttgggtttgtgatattgggtgactcgtcgttggctgagacgttccatagtttttctagcttgagtcgaccgcacaccacattgaagtacactttcaagaagctgctggggcttaagaaccagaaggaccagcatttctcggatctgatagtggagcagaaggaggagctgaagaatcgcgccaaccagttgatacagacactggagagctgtggctgggaagctgccatcggttgcggtggcatctcgatgctggcgaagcccaccgcgtacatggggaaggccttcaaagctgctggcttcgacggcgagctggacgcgagcaacatccgggaagccatcctgagggccactgggctgtgcataaacagcagctcctggacggggatccctggctactgccggttcagctttgctctggagaggggggaattcgagcgtgcgatgggatgcatagctcggttcaaggagctggttctgggaggcgctcagatgaatggtgcctgatggagcaatccatgttatacgtaaccttggtgctgtgtagtagcgatgatattgttccaggtgatggagatatcaaggaataacaagagcctacctgctgtgaagtcaatgtactactaggatggatagggcgcttcgatgcgccctttctgtcttcgaattgctgtgctgtgcacggagaataaacatatactattatatatatacatacaatttgctaagatatactcctatttgttgtcgttccatgcataaccgtaacccattaattccaaagaaacctggggggtcatgatcttgtgaaccgttgggatcatgattagagggaaatttttgtttttagaatggattgcgcagcttgatttaactggaaatactgatttgatggatggaatggaacaagtgtacataaattgttggaggttacaatgtaggcctgcatcaggccttaggtgcaagcagacacgagctacaacagt

SEQ ID NO: 207275 - DNA, 1079 bp, Zea Mays
tttcattcgttccaaggtgaaatttttaaaaccagatccgtagaaatggcacccggacaaatgctcgtcctccagcagcgtgaagcacatggaggaagccaaggagaagttccaagagatccagggcgcctattccgtactctccgacgccaataaacggctcctctacgatgtgggagtatatgacgatgaggacgacgaggaaagcatgcaggggatgggggacttcatcggtgagatggcccagatgatgagccaggcgcagccgacgaggcaagaaagctttgaggagctgcagcagctttttgtggacatgtttcagtccgatattgattcaggattctgcaataggactgccaaggcccatcagtttcaggggccagccaaaagtagaacatgctcgacctcaccttcatcatcaccgtcccctcctcctaccacagcaaaggatgcagaggtgccatcatgtaatggcttcaataagcggggttcatcagctctggactcagggaagcctccaaagcctgttgaaggtggtgcaggtcagaaccaggctggattctgttttggggtgagcgacacgaaggaaacgccgaagctgccaggtcagaacgccagccggaggaggaacggccggaaacagaagctgtcatccaagcacgatgtttcatctgaagatgaaacggcggccggttcgtagcacaccagcagtttgacccattggcttcggtgatatatcattcgttggcccttggctgtgcctaggggccctagtagctagcagcagcagcagggacggcacatcatgccagctgctgtgatctgaagaggcgtttagctcatcatatgcctcaccttaggcctgtgggggattttccattcaaactcgtcgatgatactacatctttctttctccatctgtgtcgtttgtgttgtaagacagtgacttctgaagtctgatcgtctcggttctttttattaacatctgatatacgttactgcctgtctatagtagttaaagattgtcagcgtatctcaaaagacttaatacctttcgaaggagaagatatgcatcgttg

SEQ ID NO: 207276 - DNA, 1342 bp, Zea Mays
atgagacccaaatatttaacgggcaagtggccatcatggccgtgtttctggagacttcctgcggcgcgtggagagtggaggcagggggagaaggaagcagcagcagcagcagcagcagctccatccgctcgcttccttcccccaccgccagcgtcgcctctccgtgtgcgcgccccgccgggggtggcgtcgctgcacctttgggcagcaggcacctacgtgcggggggagccacacgcctccctctcgcctcttggcatggacgccggcggagagaagtgcggcgacgcggcggcagagggcggagacctctacgcggttctcgggctaaaaaaggagtgctccgaggccgagcttaaggtcgcttaccggaagctcgccaagaaatggcacccggacaaatgctcgtcctccagcagcgtgaagcacatggaggaagccaaggagaagttccaagagatccagggcgcctattccgtactctccgacgccaataaacggctcctctacgatgtgggagtatatgacgatgaggacgacgaggaaagcatgcaggggatgggggacttcatcggtgagatggcccagatgatgagccaggcgcagccgacgaggactgccaaggcccatcagtttcaggggccagccaaaagtagaacatgctcgacctcaccttcatcatcaccgtcccctcctcctaccacagcaaaggatgcagaggtgccatcatgtaatggcttcaataagcggggttcatcagctctggactcagggaagcctccaaagcctgttgaaggtggtgcaggtcagaaccaggctggattctgttttggggtgagcgacacgaaggaaacgccgaagctgccaggtcagaacgccagccggaggaggaacggccggaaacagaagctgtcatccaagcacgatgtttcatctgaagatgaaacggcggccggttcgtagcacaccagcagtttgacccattggcttcggtgatatatcattcgttggcccttggctgtgcctaggggccctagtagctagcagcagcagcagggacggcacatcatgccagctgctgtgatctgaagaggcgtttagctcatcatatgcctcaccttaggcctgtgggggattttccattcaaactcgtcgatgatactacatctttctttctccatctgtgtcgtttgtgttgtaagacagtgacttctgaagtctgatcgtctcggttctttttattaacatctgatatacgttactgcctgtctatagtagttaaagattgtcagcgtatctcaaaagacttaatacctttcgaaggagaagatatgcatcgttg

SEQ ID NO: 207277 - DNA, 1419 bp, Zea Mays
atgagacccaaatatttaacgggcaagtggccatcatggccgtgtttctggagacttcctgcggcgcgtggagagtggaggcagggggagaaggaagcagcagcagcagcagcagcagctccatccgctcgcttccttcccccaccgccagcgtcgcctctccgtgtgcgcgccccgccgggggtggcgtcgctgcacctttgggcagcaggcacctacgtgcggggggagccacacgcctccctctcgcctcttggcatggacgccggcggagagaagtgcggcgacgcggcggcagagggcggagacctctacgcggttctcgggctaaaaaaggagtgctccgaggccgagcttaaggtcgcttaccggaagctcgccaagaaatggcacccggacaaatgctcgtcctccagcagcgtgaagcacatggaggaagccaaggagaagttccaagagatccagggcgcctattccgcaaacggaaccgatctagcctgttggtaaactcattgcgtggagcccttgtgctcccatcccattgttcttgtgcagtactctccgacgccaataaacggctcctctacgatgtgggagtatatgacgatgaggacgacgaggaaagcatgcaggggatgggggacttcatcggtgagatggcccagatgatgagccaggcgcagccgacgaggactgccaaggcccatcagtttcaggggccagccaaaagtagaacatgctcgacctcaccttcatcatcaccgtcccctcctcctaccacagcaaaggatgcagaggtgccatcatgtaatggcttcaataagcggggttcatcagctctggactcagggaagcctccaaagcctgttgaaggtggtgcaggtcagaaccaggctggattctgttttggggtgagcgacacgaaggaaacgccgaagctgccaggtcagaacgccagccggaggaggaacggccggaaacagaagctgtcatccaagcacgatgtttcatctgaagatgaaacggcggccggttcgtagcacaccagcagtttgacccattggcttcggtgatatatcattcgttggcccttggctgtgcctaggggccctagtagctagcagcagcagcagggacggcacatcatgccagctgctgtgatctgaagaggcgtttagctcatcatatgcctcaccttaggcctgtgggggattttccattcaaactcgtcgatgatactacatctttctttctccatctgtgtcgtttgtgttgtaagacagtgacttctgaagtctgatcgtctcggttctttttattaacatctgatatacgttactgcctgtctatagtagttaaagattgtcagcgtatctcaaaagacttaatacctttcgaaggagaagatatgcatcgttg

SEQ ID NO: 207278 - DNA, 3154 bp, Zea Mays
aaaaaatatttgtgcgctctcttccaggtgggccctttctctccccttctcccctcaccggctcaccctctcccctcgacgatacatttcacctccccggatctatctcgccgcgtcggcgcgctggtcacccgacgaagctaggaggcagtcaaggcggacgaagcgctgcaccaaatttgacgggggatcgagcacaggaggcgtagtggaaaatgtttaagtttctcaaggaggtggtcgcgggatccggatcggggctcaaggacttcccctacaccattggtgagacatacgcatccgcctggggttcatggacacaccaccgcggtacctccaaggatgatgggtcacctgtgtcaattttttctctgtcagggagcaaccctcaggacagacacatggttgctggccgtaatggtgttaagagattacgaacggtgcggcatccaaatatcttatcctttttacacagtactgaagcagaagttgcggatggacctgccatcaaacacacgatttatattgtaacagagcctgttatgccactttctgaaaagctcaaggaactgaatcttggtggtacacagagagatgagtactttgcatgggggcttcatcagatatccaaagctgtgagctttctcaataatgattgcaaacttgttcatgggaatgtatgcttagccagtgttgttgttacacaaaccctggattggaagcttcatgccttcgatgttctgtcagaatttgatgctaacaatgaagcctctggtagccccatgctgcaatttgagtggttagttgggatgcaatacaagccaatggagctgtcaaagtcagattgggcttcaattagaaaatcacctccgtgggccattgattcttggggactggggtgtttaatatatgaactcttttctggtgcaaagctggctagaacagaggaccttcgaaatactgcttcaatcccaaagtctctacttccagattaccagaggctcttgaattccacacctactcgtagactaaatccttcaaaacttattgacaacagcgagtttttccagaataagttagtagagactatccagttcatggaaattcttaatttgaaagacacctttgagaaagacagctttttccggaagcttcccaatatagctgaacagcttccccgtgagatagtcctgaaaaagctgctccctgtcttggcttcttctcttgagtttggctcagctgctgctccagccttaactgttttgttaaagatgggttcctggcttcctacggaccaatttagtatcaaggtcttgccaactattgtcaagctttttgcctccaatgaccgagctatccgagcatgtcttttgcaccacatagatcagtttggggaatcaatgtctgctcaaactgttgatgaacaacaactggattttccgatactgatggtactatccgtgaactgacattaaagtcaatgctcatattagcaccaaaactatctcagcgtacaatctcaggatctctcttgaaatatctctctaagctacaggtggatgaagaacctggaatcaggacgaacactacaattcttcttggcaatattgcaagctacatgaatgatgggactaggaagagagtactgatcaatgcattcacagttcgtgcactacgtgataccttccctccggccagagcagctggaatcatggcactgagtgtcactggttcatactacgaaatgacagagattgcaactcgcatcctgcctaacattgttgtcctcacatttgacccagatagtgatgtccggaccaaggctttccaggctactgatcagttcttgcaaatagcaaagcaacaccatgaaaagcttaatacgggagacaacagggtggctgaaagtactggtgttaagttaaagcctggaaatgcaggtttacttgggtgggccatgagttctgttacacaaaagggtaaaccttctgaccacgccccaatatctactgcaaatgctaataattctcaagcatcaacagctttgactgccgctccagagactcaggcttccacaccagcgtatgcacaatccacatccagctcccttgatcaagctgcaccagcatcagcaaggtcttcagaagatgggtggggtgagcttgaggatgacaatatccatgaggagaatagtgataaagatggatgggatgatgtagacccgtttgaggacaagccatcaccatctcttctatccaacatacaggctgcacagaaacgtccagtggcgcaaccaaagcaagctgttgcaaactcatctaaatccaacccactaaaagcgccaaaatcagaagacgatcctctatggggtcctatagctgctgcaccacccaaaagcgcagcaaaacctgcagacatcaagccatcaacatcacataacgatgaggatgacctgtggggttcaatagcggcacctcctccaaaatcatctggaaagcctttgaagccagctgcagcgaatagtgacgacctatggggtgccattgcagcacctccaccaggaaccaaagccaggcccttagcctcatcaggtaagggccgaggaacaaagcctgcgcaaccaaaacttggtgctcaaagaataggaagaacatcctcaactggaatgtgatggcttatgatatcaaatgttgtacaagagtgcgaagttttcctttttgtcccccatgctttgagtctgaccaggatgtcattctttgtaaactagcaaaaggtatcaatatatggacacaattttgacaaatgtattaatattgtttcaccattgtgtattaaaatagacacatacgtttttttttgtttttgtattttttgtacatcacagctgtttcgagtaaatattattaatatatttgcccctgccttattttggcttgattactttgacatttcctttttgttgggataaaacttgtcggtgtagcgctgtatagaacttacatgtttgcccctttgtaatgggcttcaggcttcagcctcttctatataatataacacccaatccctggattagggttagagttttcattctccaacttggtactagatctaggtttaggtttatctctcttcctccccaccccatagcccctct

SEQ ID NO: 207279 - DNA, 2238 bp, Zea Mays
aaatatttgtgcgctctcttccaggtgggccctttctctccccttctcccctcaccggctcaccctctcccctcgacgatacatttcacctccccggatctatctcgccgcgtcggcgcgctggtcacccgacgaagctaggaggcagtcaaggcggacgaagcgctgcaccaaatttgacgggggatcgagcacaggaggcgtagtggaaaatgtttaagtttctcaaggaggtggtcgcgggatccggatcggggctcaaggacttcccctacaccattggtgagacatacgcatccgcctggggttcatggacacaccaccgcggtacctccaagggagcaaccctcaggacagacacatggttgctggccgtaatggtgttaagagattacgaacggtgcggcatccaaatatcttatcctttttacacagtactgaagcagaagttgcggatggacctgccatcaaacacacgatttatattgtaacagagcctgttatgccactttctgaaaagctcaaggaactgaatcttggtggtacacagagagatgagtactttgcatgggggcttcatcagatatccaaagctgtgagctttctcaataatgattgcaaacttgttcatgggaatgtatgcttagccagtgttgttgttacacaaaccctggattggaagcttcatgccttcgatgttctgtcagaatttgatgctaacaatgaagcctctggtagccccatgctgcaatttgagtggttagttgggatgcaatacaagccaatggagctgtcaaagtcagattgggcttcaattagaaaatcacctccgtgggccattgattcttggggactggggtgtttaatatatgaactcttttctggtgcaaagctggctagaacagaggaccttcgaaatactgcttcaatcccaaagtctctacttccagattaccagaggctcttgaattccacacctactcgtagactaaatccttcaaaacttattgacaacagcgagtttttccagaataagttagtagagactatccagttcatggaaattcttaatttgaaagacacctttgagaaagacagctttttccggaagcttcccaatatagctgaacagcttccccgtgagatagtcctgaaaaagctgctccctgtcttggcttcttctcttgagtttggctcagctgctgctccagccttaactgttttgttaaagatgggttcctggcttcctacggaccaatttagtatcaaggtcttgccaactattgtcaagctttttgcctccaatgaccgagctatccgagcatgtcttttgcaccacatagatcagtttggggaatcaatgtctgctcaaactgttgatgaacaagtttttcctcatgtagcaactggattttccgatactgatggtactatccgtgaactgacattaaagtcaatgctcatattagcaccaaaactatctcagcgtacaatctcaggatctctcttgaaatatctctctaagctacaggtggatgaagaacctggaatcaggacgaacactacaattcttcttggcaatattgcaagctacatgaatgatgggactaggaagagagtactgatcaatgcattcacagttcgtgcactacgtgataccttccctccggccagagcagctggaatcatggcactgagtgtcactggttcatactacgaaatgacagagattgcaactcgcatcctgcctaacattgttgtcctcacatttgacccagatagggatctgaaatagatgatcgcgtgtaaggtttttatggcgctagaccaggcgtaccatcttgggcacatggaaggatgtgttttgatgaagattgcacaagtgtaatcagcatatttttgacacatatattgtagacagaagaaggaagggaaattaaagacatattgtagagtgtagacagaagaagcaagggaaattaaagataggaggcactagtctatcttgggttttggctcatcaccaaactcaagcccaacaggtctctgatcaccaatctgctgtataccctgtgctactgcatacctactactaggtcattgtgcaatgcctgaaagaaacacaacactaggatattaaattgattgtcttgacctctagggttaatggtgctgtatatttatacgggcagaaactgattattacaagaggaatactactcggttacaacatcccaa

SEQ ID NO: 207280 - DNA, 3259 bp, Zea Mays
aaatatttgtgcgctctcttccaggtgggccctttctctccccttctcccctcaccggctcaccctctcccctcgacgatacatttcacctccccggatctatctcgccgcgtcggcgcgctggtcacccgacgaagctaggaggcagtcaaggcggacgaagcgctgcaccaaatttgacgggggatcgagcacaggaggcgtagtggaaaatgtttaagtttctcaaggaggtggtcgcgggatccggatcggggctcaaggacttcccctacaccattggtgagacatacgcatccgcctggggttcatggacacaccaccgcggtacctccaaggatgatgggtcacctgtgtcaattttttctctgtcagggagcaaccctcaggacagacacatggttgctggccgtaatggtgttaagagattacgaacggtgcggcatccaaatatcttatcctttttacacagtactgaagcagaagttgcggatggacctgccatcaaacacacgatttatattgtaacagagcctgttatgccactttctgaaaagctcaaggaactgaatcttggtggtacacagagagatgagtactttgcatgggggcttcatcagatatccaaagctgtgagctttctcaataatgattgcaaacttgttcatgggaatgtatgcttagccagtgttgttgttacacaaaccctggattggaagcttcatgccttcgatgttctgtcagaatttgatgctaacaatgaagcctctggtagccccatgctgcaatttgagtggttagttgggatgcaatacaagccaatggagctgtcaaagtcagattgggcttcaattagaaaatcacctccgtgggccattgattcttggggactggggtgtttaatatatgaactcttttctggtgcaaagctggctagaacagaggaccttcgaaatactgcttcaatcccaaagtctctacttccagattaccagaggctcttgaattccacacctactcgtagactaaatccttcaaaacttattgacaacagcgagtttttccagaataagttagtagagactatccagttcatggaaattcttaatttgaaagacacctttgagaaagacagctttttccggaagcttcccaatatagctgaacagcttccccgtgagatagtcctgaaaaagctgctccctgtcttggcttcttctcttgagtttggctcagctgctgctccagccttaactgttttgttaaagatgggttcctggcttcctacggaccaatttagtatcaaggtcttgccaactattgtcaagctttttgcctccaatgaccgagctatccgagcatgtcttttgcaccacatagatcagtttggggaatcaatgtctgctcaaactgttgatgaacaagtttttcctcatgtagcaactggattttccgatactgatggtactatccgtgaactgacattaaagtcaatgctcatattagcaccaaaactatctcagcgtacaatctcaggatctctcttgaaatatctctctaagctacaggtgaagttcacttttggatttgaaaaggtttatactgcagttatgatagacactgctttctgtgacaggtggatgaagaacctggaatcaggacgaacactacaattcttcttggcaatattgcaagctacatgaatgatgggactaggaagagagtactgatcaatgcattcacagttcgtgcactacgtgataccttccctccggccagagcagctggaatcatggcactgagtgtcactggttcatactacgaaatgacagagattgcaactcgcatcctgcctaacattgttgtcctcacatttgacccagatagcaaatttctttgatgtttctatagtgatgtccggaccaaggctttccaggctactgatcagttcttgcaaatagcaaagcaacaccatgaaaagcttaatacgggagacaacagggtggctgaaagtactggtgttaagttaaagcctggaaatgcaggtttacttgggtgggccatgagttctgttacacaaaagggtaaaccttctgaccacgccccaatatctactgcaaatgctaataattctcaagcatcaacagctttgactgccgctccagagactcaggcttccacaccagcgtatgcacaatccacatccagctcccttgatcaagctgcaccagcatcagcaaggtcttcagaagatgggtggggtgagcttgaggatgacaatatccatgaggagaatagtgataaagatggatgggatgatgtagacccgtttgaggacaagccatcaccatctcttctatccaacatacaggctgcacagaaacgtccagtggcgcaaccaaagcaagctgttgcaaactcatctaaatccaacccactaaaagcgccaaaatcagaagacgatcctctatggggtcctatagctgctgcaccacccaaaagcgcagcaaaacctgcagacatcaagccatcaacatcacataacgatgaggatgacctgtggggttcaatagcggcacctcctccaaaatcatctggaaagcctttgaagccagctgcagcgaatagtgacgacctatggggtgccattgcagcacctccaccaggaaccaaagccaggcccttagcctcatcaggtaagggccgaggaacaaagcctgcgcaaccaaaacttggtgctcaaagaataggaagaacatcctcaactggaatgtgatggcttatgatatcaaatgttgtacaagagtgcgaagttttcctttttgtcccccatgctttgagtctgaccaggatgtcattctttgtaaactagcaaaaggtatcaatatatggacacaattttgacaaatgtattaatattgtttcaccattgtgtattaaaatagacacatacgtttttttttgtttttgtattttttgtacatcacagctgtttcgagtaaatattattaatatatttgcccctgccttattttggcttgattactttgacatttcctttttgttgggataaaacttgtcggtgtagcgctgtatagaacttacatgtttgcccctttgtaatgggcttcaggcttcagcctcttctatataatataacacccaatccctggattagggttagagttttcattctccaacttggtactagatctaggtttaggtttatctctcttcctccccaccccatagcccctct

SEQ ID NO: 207281 - DNA, 958 bp, Zea Mays
ctaaaaccctaaaccgcacaaaaccgcctacgccattccgctgtccgcaatccactccctcctcccacgaaactcttggccatggcttggcgcggcgccgcctcccgctcaatcttcgccgccgtccgtgcccgcgccgcatcctcctcctcctcctcagcggccacgcgcctccgctcggcggctccaattgccgccaccccgcgccgcaccgtccccgcctttgctttcgcggccgcgaggccgttggcggcgatggcggggtaccccgcggcggtcgcggtgaggctcaccgggcactcggcgacgagcgtgcgggcgtgctgtgagctctcccagggcacttgaatgcacacttttgtcttccaatgcaagggtaggatctctcgtcgggcttgcggcctttttcctgcattttgcagagtgcctcgtgtgtcggcaaacggacagtacacttgctgcaactaaaatataaacaagcctatgttagcctgctacgcagtacgcactgtgttcgtgcatgttttcatttgaccttgtttccatgatgcttcgacgtgttacgcgtgctcgtgcttcttgctgtgtcatcactggtccacattttcttgcggaaagtgttcctttgtacgagcttatgaaaccagtgtgcacaagcgacggacggatttgtaccatccagaacgatagtgatccgttttaccaactcctgaaaccagctgtgtaaagtgttccttcgtcgatgctgtgggcgctgacgaactccttccagcctactccgtcactgtctattgcctactccgacgctccatgcttcgccacttgggggcttcagactgatgacctttcgatgcggccgttgaaattgttggcaaatcttgcaggcttctcgtgcaaggaaggagactaacaaaatgtgaagttacttttgatgagactagtctaggaactagttcag

SEQ ID NO: 207282 - DNA, 2677 bp, Zea Mays
gcacgacgcctacatctgtcaaccacaacccaagcgctcccccctccccgtcgcctgcaggatctcctcgggccaaggaatcgttcccctccggcgaccttcctccctccctccgttccgtttcggtccttccactgtatcaccggcaaagcaaaggatcggaggccactccgcccggaggagcaagccgactctgagcattggagttgtgcttgttcaaaagtgtgaattgcatggagatgggaatgactcctgatgtaatgtatggacaaaatgtttttgttcctgctactgcaactccctaccaatatggttatgcagttggatcacagatggaatggtgtaaccagtcgagctctttaggatatgatggccaagataatttctatccgactgaaggcatgcaatgcgtatactacgcagccccagacaacggatctgtgcatcctacctacagttcttacccttctgatccttctttcgtacccgatggctcatttatgcctcaggagtatgttgctgaccctgctaactccacatgccaaatagcccagacatcctattatattccagctgttcttccttatgcacaagatagtgccttgggaagcgcgaccacacatcttcactccaactccaatgttgcatttcttcctggcataccaggttatgctgcaacatctgcaaatgcagcatttcctttaattgctcccgtcaccacaaaaagtgacattgttatgcatccacatgtacagtctactattgtcccttcaaagcagttccaggactatgcaaagccaccaaaggttcagctgcacaattcagttccacagaagcaagagttgccagatagatgtatgattcctgctaaactccctcatgcttctcaggtatcagcacatttgtctggaaacaattgtcttggatgtgctgctgggtctgatcttcggaagtgggctgctgccgagaaattccaaccatcttcaaagtcaagtggccatctaaatgctactggccaaaaagcgcatagcttagttgattctgagaaaccaagcaatcagaggcctgctataattgtgaagtctcacacaacaaggctccctgttggtaatccggatgggacaatcgttataagaaccgaccagtacaacagagatgatctccgactcgactatatgtatgcaaagttctttgttatcaagtcaattggtgaggcagatgtgcacaaatcgataaaatatggtgtatggtcaagttcctccagtggaaacagcaagctagatagcgcattcagggatgctgacaggatatcgaggaggcattctactaagtgtccggttttcttgttcttctctgtcaatggtagtgggcacttctgtggcatggctgagatggtcggacctgttgattttcacaaggacatggacttctggtgtcaggataaatggaccggatgctttcctgtgagatggcacatcgttaaagacataccaaatggttctttgcagcatatcacactgcagaataacgaaaacaagcctgtgacgcacagcagagatacacaggaagtaccatacctccctggaatgtctgtgatcaatatcttcaaagacatcaaagtgcggtactgcctttttgatgattttatgagctatgaggcagaagaggcgcaaaagagggcacacagaaggtgcaagctaagttcgaatgctccagactttgtacctgtctcacagcgtacaaaagatgagtctggcactgagcagagagaatccaggagcgtacttgtagacaggacatctgggatacaaaatgcggccgagaagccccacgataccaaggtgatcaagcctcaggatccgtgcgtctccgaagagcaggctagcgaggccgagaaagagaatggacctcagggatgtcgttgcagcggcaatcagggccaagaggaggcagcgaaaactgcaactaaccacccgccagcttcaggcttgaaggcggcaggtgcggaggggaagcagcagcagcagcgctggaagaaggtcgaaaatccaaagcagcatgcggacagcgtccctgcccagtgctcacaggaagaagcacctgagaagcggttaaatggggtcagcggctgttcgagcgcagttcaagagggttgcgaggagcagagggccgctgccaaacttgcttctctcaagatcggttccagggcggcagtggaagctgaccgtaaaactagcgcagttggtgtggtgacaatcggctcgatgcctgtccgggttgactgttgtgacgtctagtagtggcccatccggagctttttttttttggtctcacccacagttttttccctttttgcccttctgggttaatcttttacccctccctgtctgccaaggctttcatttccatttccatttccattttcctttttcttttggttgaatgtgcctgccatggttggtggttcctagcttctatatggcatcaaaaaaagaaaaaaagaaaagaacaaaaaaagatgatgattagttaggttcaagtttcattgagtgaaaagctagttttaaaggcaacattctggtggtgggtggtggtttcttttgtggaaaagaaagaagagactatatcagacgttcgttttaatgacattattaagaaaaaaagagagtaggttaaa

SEQ ID NO: 207283 - DNA, 2978 bp, Zea Mays
agggtcgctgctgcattaaaagtcgtacgaggactttgtgatgaatttcgtgacgcagatgacccactgacctagggtagggggcgtaggggtactccactgtagctgggcatgcacgctcctcctgtcctggttggtacagtggtggtgcatttcccttccctaggtgcagggatgtgctctacttcactgcagcgtgttgcgtgaacatcaagtgtacagtgtagcactggactaggcttgtactagcttgcttgcttgcttctttattcattaatgtgttgaaccaatgtacgagagagagagagagagagagagagagagagagagagagagagagagagagagagagaggtgcctaccgtactagtggcatcaggcatgtgtacgcatacgagtactactccatgtctgctccgatccctccacaacagatctctatgggttaatgacttaattctttgccattctagcagttaaatcaccaacacccattaatactattagttgggtcacctacaatctccactaggtaatcaccaagctcccgatcgacaccaaaccgtcgaccatcaagagtaacaagcacgaacactcacttgatctaaacaagcctaataaggatgatggatgcacacttgttactctgtatgcactaattaggttcctaatctcacgatttcatcaaatcttagacaacctcaccagccaaaggctctatctatatctctaatgtgtttctttggcaaaaataaatgggcaagaacactaaaattaacaagttgaagggtatttatactccctaaccaccaaactagcagttagaagaactctggcatgaaaacacatgtgtccgacctattcatagggcccgacaacatgtagagcggaccctagctcctacaatcataatgtctggcccgacagcacacgtcgaatcagtccaatgcgtgaaaaacctctctatctgtttatggactgtgtcgagctgagacgttatagtccgacgaccctgatacacacagtcatctagcctttttaaacaccccatgtgtaggtgcccaaccaaactcaatggtccgacgacccttattttttagggttcagtgagacaatgactataaaaccccgccaaaaacactttctgcaaatgagatttgttccaaaagatttttagacctctaagctaactagtgctaaggccacacctaacacattagactcacttaggtcaagctattaatctataccccttatagtacatccaaacgaaacaaatgcctaaactaagtgtctctcaactctaatcgacacttaaaactagtttatccttagtcttgtcgtttattctttaaatccgaaacaaaatttagttttggaggcatgaaaatcattgattgactaaacaaccactattattttgacctaactcaaatgcctctataaaacacgtgttagtcataataatcttgtgttgtcattagtcactaaactccattattagcctgaatgctttaaatcttctttttggtgattgatgacaacagtgtctcaagtatgtaacgggtactagactatgctgcctctctgccgtacgtctactctgcgtgcagactgttggccggcggcatcgtcgacgacagaccgcgcggcggcgattccgacccatccatggggcggccgccgtgctgcgacaaggagagcgtgaagaaggggccgtggacgcccgaggaggacctggtcctcgtctcttacgtccaggagcacggccccggcaactggcgcgcagtccccgccaacacagggctgctgcggtgcagcaagagctgccgcctccggtggaccaactacctccgcccgggcatccgccgcggcggcttctccgaccaggaggacaggctcatcgtccacctccaggcgctcctcggcaaccgctgggccgccatcgcctcctacctccccgaccgcaccgacaacgacgtcaagaactactggaacacgcacctcaagaagaagctcctcgctcagcagcagcagcagctgcgcgcctcgccgtcgccgcccaaggggcagtgggagctcaagctgcagaccgacatcaacctcgccaggcgcgccctgcgcgacgccctctccatcgacgccggcccgccagggatggccgtcgcgggctcggcggcgccggcgccgtccgccggcccagcagcgccacaacaagcgtacgctctcaccgcgcgcagcgtcgacaggatgatgctggacgggtgggcggcggcggctccagcggcagggaggaggagctgcgtcgtcggtggcaccgtcgtcatcccggccccggcgacgacgcccggcgcggccgagagcgcgtcgaggtcgtcgtcggagctaacgacggcggagtgttctgcctccatctccagcgcctccgatcagcgcgccgcgccggtggccgaccaccagctgctcgcgtccgaggagaataattatacggcgtcggccgtgcagcagggagaggtgccgctgtcggcgatcgagtcgtggctgctggaggacgccggcgccggcgagcagaagctggcgcacgatggccccctgctcgatgccgcgctgcatagttttggcttctagtaaaatgtcaaaatgtgttactagaaatcgagtgtggttaattatgccagtcggtgccactactagctagtccttttctgccctactaatttagctcactagctgttctacttgtcatccgtagtacacagatgacgatttgtgtcactgcatgaagcaatgtgcaagtgggtgatcgtgatatatatactacgtcgaaagtgaaatgtaacacgatccgtctgctcgttttgtcactgcatgaagcaatgtgcaagtgggtgtgtctttattgtagtttttgagaaacgagtcgttctattttgcgtttgtcaaacatatcacatcagagtcactcattcttttggttg

SEQ ID NO: 207284 - DNA, 1340 bp, Zea Mays
aataactactgcgtacggagataggcaataactataagtagttggatagggcatgaaacttggaaccgtcggcgaacattgagccatagtaatagatcgccttctccgccgccgccgccgtaagtagttcgatcgacgtcgcggcggttcacgttccgttcccacgtaacgtagccatggtgctcggcagtgtcttcatcgtcctcggctccggcgtcgctggatcccttctcaccggtgacaccaaacttccgaaactgggggatgtattctctggagccgccaagtttgtgaagaaacatgaaggcggtgccgcaaagtctgggtctggcagcagcgataatcagaatacttctcagcagttgctatctcagatcaactatatcagggaagagctacacaccctacaggcctcaacaccaactacagtagtgacatcggctgtgaaatctggttctggaccatatgctataacagcagttgttgttgctggggctatcggctacgcttatataaagtggaagggatggaatctctctgatatgatgtttgtgacaaggcgtggtttatctgaagcttgctctgctgttggcagccatttggataaagtttcagactctgttgtcgtgacaaggaaacatctggctgggaggattgcccgtgtggatattagtttagatgaaacccagcagattatcgagggcacaagggatgaggtcggaatcatacatggagatctaagtgctttccaggaggacttgcaatcagtaaatcttgtagttcgaactctggaatccaagatgggacgtcttgaatgctctcaggatcaaatggtagacggaataaatcacttgtgtgagttcacccggaagctggaatatagccagacgaaggccaatatctcgtcgccatccgttcctgcagtcatggattcctcctattcagagcgaattgtagagaaggctactagctgtttgccaagactagctctggaggcgccaaactcacctgtagtgcctagaccagaagagacatccctgctgcaggtggccgaacagcctaaagctctgaaggagcaggagaaggagaacgaggaaggtcctgctagaattggcaacgcagtgccaccagatagctcgaaaaacgatcaaaactatctagatagggtgaaggttatctgcattggcagcgaattaagatttgcattgccatcttacttgtcttaagggctttagaaactagagacagctctaattatagtcacttatatgactcacgttctcccagtcacagaactccccagcccagataaaaatacatcaagctgagggtacctgcag

SEQ ID NO: 207285 - DNA, 408 bp, Zea Mays
gcgtttaatttttggacaattgggcagttccgagacgatttcgaaacccgtggaggatccctcggaactaccaaaatggaactacgatggatctagcacaggacaagccccgggagaagacagtgaagtcattctatacccccaggctatcttcaaggacccattccgaggtggcaacaacgttttggttatctgtgacacctacacgccacagggggaaccccttccaactaacaaacgccacagggctgcgcaaattttcagtgacccaaaggtcgctgaacaagtgccatggtttggcatagagcaagagtacactttgctccagaaagatgtaaattggcctcttggttggcctgttggaggcttccctggtccccagaaaagaaaaacatattgtatcaaaat

SEQ ID NO: 207286 - DNA, 1493 bp, Zea Mays
ctcgcttccgttggcttcactcccaactctttactcgctcactcccccgcgccactgatctctccttccgggaccctaattccgcaggaggccgcgccgggggagtgacgccgatgcagcgccgggtgggcatggcggacggcgaggctaggtgtcggacgctcggcgccgtcatcaaggagaaggatgaggagttcgcgctcttcctcgagatgcgccgacgcgagaaggagcgcggcgctgcggccgccgcggcggaccagcttctgctctccggggacgtcgcggcggagaacgggatgctgctcctcgacccgccgccacccgctgagcccaaaccggcggcgtacaaggtggctggcggcggatttaggagggcgcctgggggagtggacgacttcctcaatgcagacgccagcgacaagaacgattacgactggtgagtgcttcggcagtagctaccaactttccactaattagctagtatcaaatttctgctttttcggttgtgggcagcatagccattggtgtgacaatgattctagccaaaccacattgtagcattgtgaacttcaattttgttctgctcttttgtcgtttaaggcttcagagaatttggtgaggtgttaagttttaaccattttaaggcttcagggaatttggtgaggttttaacagtgtaatatttagtacgggttccctaaatcttgattcctcattcccaatgctgaatgcaaagctgcaggactgacaaaactgagaactctacagcttcataagtttcaagctaaatcttcattcttcagttgccttgctagaagcggagcgatgagttccatttttctgtaattttgccttctgtgcatacagtctatctgctgtccatgcattgtctgttaagttgacggtgtaccataaagtttgtctttcgtgaaacttgatgttagttagaattcagctggtgttgctgggaaggatgggtcatggacatggtggttgttggaggcttctgacaccaccaggaactccattattctcatctctaaaagttgagccaaaaaggtccctggtgagtcaagctggaacgccaaaggctcgtccaactgccttgaaatcaaggggagaaggtgatgatggtgacatcgagtctgtggaatttccaaagtgtgtggtggcaagtaattaggcacatggtcacatactcacattgaggagatggaggagagggagagataggacccgggagaggagacatgagaggcacatggtcattatattttgttggctgtaactgtaagcctgtaattgttggttgcaacttgtaagttgcaactgttgctaacctgacatattttgttggctccctgcaactttgtcctgaactcctgaacctgaagtcctgatctataattgttggctgcatcactgcatgtatttggttctagaactgaaactctgaaagtatggaattatggattatggaatggaatggaa

SEQ ID NO: 207287 - DNA, 864 bp, Zea Mays
ctcgcttccgttggcttcactcccaactctttactcgctcactcccccgcgccactgatctctccttccgggaccctaattccgcaggaggccgcgccgggggagtgacgccgatgcagcgccgggtgggcatggcggacggcgaggctaggtgtcggacgctcggcgccgtcatcaaggagaaggatgaggagttcgcgctcttcctcgagatgcgccgacgcgagaaggagcgcggcgctgcggccgccgcggcggaccagcttctgctctccggggacgtcgcggcggagaacgggatgctgctcctcgacccgccgccacccgctgagcccaaaccggcggcgtacaaggtggctggcggcggatttaggagggcgcctgggggagtggacgacttcctcaatgcagacgccagcgacaagaacgattacgactggcttctgacaccaccaggaactccattattctcatctctaaaagttgagccaaaaaggtccctggtgagtcaagctggaacgccaaaggctcgtccaactgccttgaaatcaaggaggcacatggtcacatactcacattgaggagatggaggagagggagagataggacccgggagaggagacatgagaggcacatggtcattatattttgttggctgtaactgtaagcctgtaattgttggttgcaacttgtaagttgcaactgttgctaacctgacatattttgttggctccctgcaactttgtcctgaactcctgaacctgaagtcctgatctataattgttggctgcatcactgcatgtatttggttctagaactgaaactctgaaagtatggaattatggattatggaatggaatggaa

SEQ ID NO: 207288 - DNA, 951 bp, Zea Mays
ggcgatatcacggttccaaaaagctcgcttccgttggcttcactcccaactctttactcgctcactcccccgcgccactgatctctccttccgggaccctaattccgcaggaggccgcgccgggggagtgacgccgatgcagcgccgggtgggcatggcggacggcgaggctaggtgtcggacgctcggcgccgtcatcaaggagaaggatgaggagttcgcgctcttcctcgagatgcgccgacgcgagaaggagcgcggcgctgcggccgccgcggcggaccagcttctgctctccggggacgtcgcggcggagaacgggatgctgctcctcgacccgccgccacccgctgagcccaaaccggcggcgtacaaggtggctggcggcggatttaggagggcgcctgggggagtggacgacttcctcaatgcagacgccagcgacaagaacgattacgactggcttctgacaccaccaggaactccattattctcatctctaaaagttgagccaaaaaggtccctggtgagtcaagctggaacgccaaaggctcgtccaactgccttgaaatcaaggggagaaggtgatgatggtgacatcgagtctgtggaatttccaaagtgtgtggtggcaagtaattaggcacatggtcacatactcacattgaggagatggaggagagggagagataggacccgggagaggagacatgagaggcacatggtcattatattttgttggctgtaactgtaagcctgtaattgttggttgcaacttgtaagttgcaactgttgctaacctgacatattttgttggctccctgcaactttgtcctgaactcctgaacctgaagtcctgatctataattgttggctgcatcactgcatgtatttggttctagaactgaaactctgaaagtatggaattatggattatggaatggaatggaa

SEQ ID NO: 207289 - DNA, 1002 bp, Zea Mays
ggcgatatcacggttccaaaaagctcgcttccgttggcttcactcccaactctttactcgctcactcccccgcgccactgatctctccttccgggaccctaattccgcaggaggccgcgccgggggagtgacgccgatgcagcgccgggtgggcatggcggacggcgaggctaggtgtcggacgctcggcgccgtcatcaaggagaaggatgaggagttcgcgctcttcctcgagatgcgccgacgcgagaaggagcgcggcgctgcggccgccgcggcggaccagcttctgctctccggggacgtcgcggcggagaacgggatgctgctcctcgacccgccgccacccgctggtgggagcttcatttcggcctcttcttcgggtttcctgcagccgtgagccgttcctttgcattttactcatgtgcttatgaagccctagcttatcgtggtttgaatttttggttctttgtggtcgtagagcccaaaccggcggcgtacaaggtggctggcggcggatttaggagggcgcctgggggagtggacgacttcctcaatgcagacgccagcgacaagaacgattacgactggcttctgacaccaccaggaactccattattctcatctctaaaagttgagccaaaaaggtccctggtgagtcaagctggaacgccaaaggctcgtccaactgccttgaaatcaaggggagaaggtgatgatggtgacatcgagtctgtggaatttccaaagtgtgtggagacatgagaggcacatggtcattatattttgttggctgtaactgtaagcctgtaattgttggttgcaacttgtaagttgcaactgttgctaacctgacatattttgttggctccctgcaactttgtcctgaactcctgaacctgaagtcctgatctataattgttggctgcatcactgcatgtatttggttctagaactgaaactctgaaagtatggaattatggattatggaatggaatggaa

SEQ ID NO: 207290 - DNA, 949 bp, Zea Mays
ggcgatatcacggttccaaaaagctcgcttccgttggcttcactcccaactctttactcgctcactcccccgcgccactgatctctccttccgggaccctaattccgcaggaggccgcgccgggggagtgacgccgatgcagcgccgggtgggcatggcggacggcgaggctaggtgtcggacgctcggcgccgtcatcaaggagaaggatgaggagttcgcgctcttcctcgagatgcgccgacgcgagaaggagcgcggcgctgcggccgccgcggcggaccagcttctgctctccggggacgtcgcggcggagaacgggatgctgctcctcgacccgccgccacccgctgagcccaaaccggcggcgtacaaggtggctggcggcggatttaggagggcgcctgggggagtggacgacttcctcaatgcagacgccagcgacaagaacgattacgactggcttctgacaccaccaggaactccattattctcatctctaaaagttgagccaaaaaggtccctggtgagtcaagctggaacgccaaaggctcgtccaactgccttgaaatcaaggggagaaggtgatgatggtgacatcgagtctgtggaatttccaaagtgtgtggtggcaagtaattgcacatggtcacatactcacattgaggagatggaggagagggagagataggacccgggagaggagacatgagaggcacatggtcattatattttgttggctgtaactgtaagcctgtaattgttggttgcaacttgtaagttgcaactgttgctaacctgacatattttgttggctccctgcaactttgtcctgaactcctgaacctgaagtcctgatctataattgttggctgcatcactgcatgtatttggttctagaactgaaactctgaaagtatggaattatggattatggaatggaatggaa

SEQ ID NO: 207291 - DNA, 786 bp, Zea Mays
tggcttcactcccaactctttactcgctcactcccccgcgccactgatctctccttccgggaccctaattccgcaggaggccgcgccgggggagtgacgccgatgcagcgccgggtgggcatggcggacggcgaggctaggtgtcggacgctcggcgccgtcatcaaggagaaggatgaggagttcgcgctcttcctcgagatgcgccgacgcgagaaggagcgcggcgctgcggccgccgcggcggaccagcttctgctctccggggacgtcgcggcggagaacgggatgctgctcctcgacccgccgccacccgctggtgggagcttcatttcggcctcttcttcggagcccaaaccggcggcgtacaaggtggctggcggcggatttaggagggcgcctgggggagtggacgacttcctcaatgcagacgccagcgacaagaacgattacgactggcttctgacaccaccaggaactccattattctcatctctaaaagttgagccaaaaaggtccctggtgagtcaagctggaacgccaaaggctcgtccaactgccttgaaatcaaggcaacttgatgttgtgatggaggaggggcaaggggaggaattggaggttatgttgtcggaatcagatgacagtgagtttgatcatgatgatgagtttccaccgtcaactgatggagatgagttgtcaaaaactgaaaagacaaagagaggaggaaagaggtcaagagctggtattcagttgtccccctccaagtgcaaggcgaatagagtaaag

SEQ ID NO: 207292 - DNA, 1332 bp, Zea Mays
ctcgcttccgttggcttcactcccaactctttactcgctcactcccccgcgccactgatctctccttccgggaccctaattccgcaggaggccgcgccgggggagtgacgccgatgcagcgccgggtgggcatggcggacggcgaggctaggtgtcggacgctcggcgccgtcatcaaggagaaggatgaggagttcgcgctcttcctcgagatgcgccgacgcgagaaggagcgcggcgctgcggccgccgcggcggaccagcttctgctctccggggacgtcgcggcggagaacgggatgctgctcctcgacccgccgccacccgctgagcccaaaccggcggcgtacaaggtggctggcggcggatttaggagggcgcctgggggagtggacgacttcctcaatgcagacgccagcgacaagaacgattacgactggtgagtgcttcggcagtagctaccaactttccactaattagctagtatcaaatttctgctttttcggttgtgggcagcatagccattggtgtgacaatgattctagccaaaccacattgtagcattgtgaacttcaattttgttctgctcttttgtcgtttaaggcttcagagaatttggtgaggtgttaagttttaaccattttaaggcttcagggaatttggtgaggttttaacagtgtaatatttagtacgggttccctaaatcttgattcctcattcccaatgctgaatgcaaagctgcaggactgacaaaactgagaactctacagcttcataagtttcaagctaaatcttcattcttcagttgccttgctagaagcggagcgatgagttccatttttctgtaattttgccttctgtgcatacagtctatctgctgtccatgcattgtctgttaagttgacggtgtaccataaagtttgtctttcgtgaaacttgatgttagttagaattcagctggtgttgctgggaaggatgggtcatggacatggtggttgttggaggcttctgacaccaccaggaactccattattctcatctctaaaagttgagccaaaaaggtccctggtgagtcaagctggaacgccaaaggctcgtccaactgccttgaaatcaaggcaacttgatgttgtgatggaggaggggcaaggggaggaattggaggttatgttgtcggaatcagatgacagtgagtttgatcatgatgatgagtttccaccgtcaactgatggagatgagttgtcaaaaactgaaaagacaaagagaggaggaaagaggtcaagagctggtattcagttgtccccctccaagtgcaaggcgaatagagtaaag

SEQ ID NO: 207293 - DNA, 2460 bp, Zea Mays
gtgctgcgcttcttcgctcgatttgaagtcctcgttggctatgtagatgtagctacatcgtcaacatgttcactgctgacaacagagtccattggaaaccgcaacaatagactatccacgtttttttgcggaaccatgcctatttatatagttttggtggagttggtcttgtatagtagagattttaaggagtacaaagtctaaaggcatctccggatccttcctcgaatattcatatgatacgaagacccaatcatgaaccgcgtttgtctgtagtatcctttttatttgtccataataatgtaagcaggcaagcgcagtgacgactgacctcacgaccaccctgaacttctcggatcgacacctcatggtcagccggtcagggacactgtcaaagatctgaaaccaagttgcagttcggcactccggcgacacgccatgaggggattaagaaaatgcagcctctgaggtcagacgacgggtgcgatcgccgttgccgtcgccatctccgggggaggcgatggcgcgtccgcgtgcgtgccggcggcagaatccgtccttgcgcctgtgccgccgggtgcggcttcccgcaatggacaacagctatgggcctacgggctacggctgtgctgctccgcctcttcaagattgcgaggagagggaagattgagctgggagggggttcatggagatggaggggaggggcctgtctgatttgttcaggaacaccagcgaggagatcttcctcaaggcagtgatggagaactcaatgggagtggcagcagcgccaccaagcatggagatgctggggttcaaggccatgtcgcaaggtctcagagaagacagcgaggagctgttcaacagctggcttatgaatgaagagatcccaggatttggttcagcgaacaatcgccctcgacagccatctaggttgtcatcagaagctgtaggccttccaaatcaacagcatgacatttctcaacaaaattttctcactgacaacttggttccacagaatctagcaattccttcagtcgaatatccaaataatcacaagcaccaatcactcaaaaatgcagcagagaagggaatgcaagccagtgacttacttctagcaaaagcctggttccacagcactcaaccaatgactagaagtcgttcgtcagagttaaggaggaggtatgctgcaatgcaaactaatatgacaccaataactataggaagcattgaagcaattaaccagttaaaacaagattttacaaccacgacaaacagcatacctatgagcaacacacctgttcagacaccaaattttgcatctccttcaagttcatcaacatcccatctggataatccacatatggcagcacaagatactgttacctcagtggtgagcatgctcaaggacacgctcgagcgcaagaagcttggtagccatgctaacaaagacacctcagtaggccatccttttggattctatgatactcagcagtttcaacagaacattcttggaggaacggatttctttcccatcatgacaactgcccaggctcaggattccctgatgcttcccaaggtcgagaggcccatggaaccaaacaatggtagcttcgttccttctacaaaccaagtttggttcggtgcagcttctcgagagccttcgcacagtggatcttctactgctatgaccacttattcagctgggttcgaaatgtgcgatgagctaccacctgcagggcaagcgatgtctatttgtgagagctccagaaaaaacgctgcaaatggaacaaccatcggcagatcgaaaggcaaagaatacagagagagggtacaacaggataatttgaaagatgagagaaagatgagctcaactaatacttctggagcatcgaaagctgataatggagatcctatgaaaaagcgcagggttgagcgctcccgcaaaatggcagaagcgaaggaaagaagctctacaccagtaataccgtccgacatgcaggccgttcttaagcgctgcgaaaccctagagaaggaggttcggtcgctaaagcttaatctgtccttcatgaacaggaaagattcagagcagaccaagcagatcgaggagcttcaacagaagaacgaggacttggccgaagagaaggagcggttgctggaagagatcgagagaattgtctccgaccccaacacttgagcacccaatctcctttttttttgggtaacttatttttgtgtactaatagagttaggcttgaaatggtccttgatacaaatacgtacagtccagcagggcagcaagaattaagtgctggcctaaatgtatcaccattctttccttgttatcacaagtttaatgtatattaataccaacaagcaaagggatcagggattacagtttacttcctttgacttgtatcttgaactaattacagtatgaaatggagcccaaaaagggtggta

SEQ ID NO: 207294 - DNA, 1593 bp, Zea Mays
ctcagatcgtattacccattttttctgaagagaaaagctctgactttaagaaaacatataaaggttgtcatcagaagctgtaggccttccaaatcaacagcatgacatttctcaacaaaattttctcactgacaacttggttccacagaatctagcaattccttcagtcgaatatccaaataatcacaagcaccaatcactcaaaaatgcagcagagaagggaatgcaagccagtgacttacttctagcaaaagcctggttccacagcactcaaccaatgactagaagtcgttcgtcagagttaaggaggaggtatgctgcaatgcaaactaatatgacaccaataactataggaagcattgaagcaattaaccagttaaaacaagattttacaaccacgacaaacagcatacctatgagcaacacacctgttcagacaccaaattttgcatctccttcaagttcatcaacatcccatctggataatccacatatggcagcacaagatactgttacctcagtggtgagcatgctcaaggacacgctcgagcgcaagaagcttggtagccatgctaacaaagacacctcagtaggccatccttttggattctatgatactcagcagtttcaacagaacattcttggaggaacggatttctttcccatcatgacaactgcccaggctcaggattccctgatgcttcccaaggtcgagaggcccatggaaccaaacaatggtagcttcgttccttctacaaaccaagtttggttcggtgcagcttctcgagagccttcgcacagtggatcttctactgctatgaccacttattcagctgggttcgaaatgtgcgatgagctaccacctgcagggcaagcgatgtctatttgtgagagctccagaaaaaacgctgcaaatggaacaaccatcggcagatcgaaaggcaaagaatacagagagagggtacaacaggataatttgaaagatgagagaaagatgagctcaactaatacttctggagcatcgaaagctgataatggagatcctatgaaaaagcgcagggttgagcgctcccgcaaaatggcagaagcgaaggaaagaagctctacaccagtaataccgtccgacatgcaggccgttcttaagcgctgcgaaaccctagagaaggaggttcggtcgctaaagcttaatctgtccttcatgaacaggaaagattcagagcagaccaagcagatcgaggagcttcaacagaagaacgaggacttggccgaagagaaggagcggttgctggaagagatcgagagaattgtctccgaccccaacacttgagcacccaatctcctttttttttgggtaacttatttttgtgtactaatagagttaggcttgaaatggtccttgatacaaatacgtacagtccagcagggcagcaagaattaagtgctggcctaaatgtatcaccattctttccttgttatcacaagtttaatgtatattaataccaacaagcaaagggatcagggattacagtttacttcctttgacttgtatcttgaactaattacagtatgaaatggagcccaaaaagggtggta

SEQ ID NO: 207295 - DNA, 815 bp, Zea Mays
atttcatccattgcaaccgaacaagaccttatatattatctaagaaatttggctgcactgaattcgttaaccccaaggaccacgacaagccagtgcaagaggtgctgattgagctgaccaacggcggcgtcgaccgcagcgtggagtgcaccggtaacatcaacgccatgatatccgccttcgaatgtgtccacgacggctggggtgtcgccgtgctggtgggtgtcccgcacaaggacgaccagttcaagacccaccccatgaacttcctcagcgagaagacactcaagggcaccttcttcggaaactacaagccccgcaccgacctgcccaacgtcgtcgagatgtacatgaagaaggagctggagctggagaagttcatcacgcacagcgtgcccttctcggagatcaacacggcgttcgacctgatgctcaagggggagagcctgcgctgcatcatgaggatggaggattagagcttcattgcaagcttgctcctcctgcagggcaggcatgtcgcacagcaaatgggcatgaaaagttgaaggcgctccagtcctccagcttgtgtagtacacagtagcaataaaacgttagtgtttgtcctgtgcccatcctgtattattctgttccagggtttcacctttatcgtcagtgtgtggtcaggtttcaacccttctcagaacaaccccctcccagaaaaaaaacaaaggaagaagtttgtgtccaggtttcagaatcccctgtctgtaattaccattttgcatgacaataatgagatactgtagatattaataatgttccagaccttcaag

SEQ ID NO: 207296 - DNA, 1646 bp, Zea Mays
cttcccccacttgcgccgctacggtccaggcgttcttgctgcctccctcgtagactagactctagaccactatatatacagtactcgtccccgttttcttcctcaccaacttctcatcatcagccaagtgtaaagagtgcgaagaagcagtagcaaaaggattccattctcgtgttcttggagtggtccatcgatcgagctccgtgaaagagagagagagagagcaagcaatggcgacagcagggaaggtgatcaagtgcagagccgccgtggcgtgggaggccggcaaaccgctgtccatcgaggaggtggaggtagcgccgccgcaggccatggaggggcaaaccccggtgttcccgaggatcttaggacacgaagcgggaggcatcgtggagagcgtcggagagggcgtgaccgagctcgcgccaggcgaccacgtcctcccggtgttcaccggcgagtgcaaggagtgcgcccactgcaagtcggaggagagcaacatgtgcgacctcctcaggatcaacgtcgaccgcggcgtgatgatcggcgacggtaagtcccgcttcaccatcagcgggcagcccatcttccacttcgtcgggacgtccaccttcagcgagtacaccgtcatccacgtcggctgcctggccaagatcaaccccgaggcgcctctcgacaaagtctgcatcctcagctgtggtatctcgaccggccttggcgcgacactgaatgtggcgaaaccagccaagggctcgacggtggcgattttcgggcttggggctgtaggccttgctgctatggaaggtgctagactggctggtgcatcaaggatcatcggcgtggacatcaacccagcaaaatacgagcaagctaagaaatttggctgcactgaattcgttaaccccaaggaccacgacaagccagtgcaagaggtgctgattgagctgaccaacggcggcgtcgaccgcagcgtggagtgcaccggtaacatcaacgccatgatatccgccttcgaatgtgtccacgacggctggggtgtcgccgtgctggtgggtgtcccgcacaaggacgaccagttcaagacccaccccatgaacttcctcagcgagaagacactcaagggcaccttcttcggaaactacaagccccgcaccgacctgcccaacgtcgtcgagatgtacatgaagaaggagctggagctggagaagttcatcacgcacagcgtgcccttctcggagatcaacacggcgttcgacctgatgctcaagggggagagcctgcgctgcatcatgaggatggaggattagagcttcattgcaagcttgctcctcctgcagggcaggcatgtcgcacagcaaatgggcatgaaaagttgaaggcgctccagtcctccagcttgtgtagtacacagtagcaataaaacgttagtgtttgtcctgtgcccatcctgtattattctgttccagggtttcacctttatcgtcagtgtgtggtcaggtttcaacccttctcagaacaaccccctcccagaaaaaaaacaaaggaagaagtttgtgtccaggtttcagaatcccctgtctgtaattaccattttgcatgacaataatgagatactgtagatattaataatgttccagaccttcaag

SEQ ID NO: 207297 - DNA, 1352 bp, Zea Mays
cccaaatcggtcatcgaagtgcgcaacggatttactttcctcgacctgattgtcatccagatcgagtcactcaacaagaagtacggcagcaatgtgccgctgcttctgatgaactccttcaacacccatgacgacaccttgaaattgttgagaaatacacgaattcgagcattgaaatccacacattcaaccagagccagtaccctcgtgtggtagctgacgagttcttgccatggccgtccaagggaaagactgataaggatggctggtaccctcctggccatggtgatatcttcccatcattgatgaacagtggaaagctcgatttactactctcacagggaaaagagtatgtgttcattgcaaactcggataacttgggtgctattgttgacatgaagatactgaaccatttgatccacaagcagaatgaatattgcatggaggtcaccccaaaaactttggctgatgtaaaaggtggcacactgatctcctacgaaggaagggttcagcttctggagattgcacaagtgcctgatgcacatgtgaatgagttcaaatcaattgagaaattcaagatattcaacaccaacaatctgtgggtgaacttgaaggccatcaaacgccttgttgaagctgatgcactcaagatggagatcattccgaatcctaaggaagtcgatggtgtgaaagttcttcagctggaaacagcagctggtgcagcaattaggttctttgaccatgccattggtatcaacgttccaaggtcccgcttcctaccagttaaggcgacatcagatttgcagctagtacagtctgatctatataccttggttgatggcttcgttacacgtaattcagccagaacaaatccatcaaatccatcaattgaacttggtcctgagttcaagaaggttgggagcttccttggtcgcttcaagtcgatacctagcattgttgagcttgacagcttgaaggtttccggtgatgtttggttcggttctggaattgtactgaaggggaaagtgaccatcactgcaaaacctggcgtcaagctagaaatcccagacggagcagtgattgggaataaggatatcagtggccctgaggacctttagataagaatcagcgaatcagcaaggaggctcacttcgccaagtggcggatcatttttcgtgtttttttcctgtatattcaaacaggttccatgatattatggagaatattaattgccagtataatccagaaattttacatgtattttactttgagggaaatgttttacacactccagttctgcttattgtccaaaaggaaatttctgtgtcttgaacagaaaaatatcttgcccc

SEQ ID NO: 207298 - DNA, 1494 bp, Zea Mays
tatcttatcttaaggctatctgttcgtatgataaaaaaaagtattccttttgaaacaaaaaagaagacaaaatgaatggatcaaataaaaggagaaaaaataaataaaaatagcggttcctccgcgggtaacgggcatcccgccatcgctctgcacttctgcagtctgctctggcttataataaccggcaccttctccttcctccgatctcctcgcctccctcctctctcccagatccgtctcccggcgtcagacgcgcatctccagcaatggcggacgagaagcttgccaagctgcgcgaagccaccgccggcctcacgcagatcagcgagaacgagaagtccggcttcctcagcctcgtcggccgctacctcagcggcgacgaggagcacatcgagtgggccaagatccacacgcccaccgacgaggtggtggtgccgtacgacaccctggagtccccgccagaaggcactgaggcgaccaagaagctgctcgacaagctcgccgtgctcaagctcaacggcggcctggggaccaccatgggatgcaccggacccaaatcggtcatcgaagtgcgcaacggatttactttcctcgacctgattgtcatccagatcgagtcactcaacaagaagtacggcagcaatgtgccgctgcttctgatgaactccttcaacacccatgacgacaccttgaaaattgttgagaaatacacgaattcgagcattgaaatccacacattcaaccagagccagtaccctcgtgtggtagctgacgagttcttgccatggccgtccaagggaaagactgataaggatggctggtaccctcctggccatggtgatatcttcccatcattgatgaacagtggaaagctcgatttactactctcacagggaaaagagtatgtgttcattgcaaactcggataacttgggtgctattgttgacatgaagatactgaaccatttgatccacaagcagaatgaatattgcatggaggtcaccccaaaaactttggctgatgtaaaaggtggcacactgatctcctacgaaggaagggttcagcttctggagattgcacaagtgcctgatgcacatgtgaatgagttcaaatcaattgagaaattcaagatattcaacaccaacaatctgtgggtgaacttgaaggccatcaaacgccttgttgaagctgatgcactcaagatggagatcattccgaatcctaaggaagtcgatggtgtgaaagttcttcagctggaaacagcagctggtgcagcaattaggttctttgaccatgccattggtatcaacgttccaaggtcccgcttcctaccagttaaggcgacatcagatttgcagctagtacagtctgatctatataccttggttgatggcttcgttacacgtaattcagccagaacaaatccatcaaatccatcaattgaacttggtcctgagttcaagaaggatgaccgtgtttcttcacatattg

SEQ ID NO: 207299 - DNA, 2354 bp, Zea Mays
gactggtggaccagacccagcgaccgaacccgactcgatttcccaactccaaacctccttgcccctccgtgactcgccttcctctcctgactcctccgccttggcccgccgtctctcgccgccccggccccaacccctctcggactaggtgagggggccggctgcccagcgtcgtcgccggcgagatcttcccaccgccgctggcaatggctgccccgcacgacgaggccgcggcgtgggcggaggaggcggcgcgccgggtctgggccggcgccgtgccgctccaggtccacctccacgacgccgacgtcaccgcgctacccccgccgccgcccttcctggtatgcatggtcgcttagctgttaattaagaccacagctgctcaatttctagggtgctacagcctacagcagcgcacattacctaccggccgcccgtgggagattcagttgctggcttgctgctgtaggatttgcctgtcttttgtggctgatacccaactacgggtccaattaatattttgaagttgaatatcattgggtcgtcatgactcctgagccaatttctcggggcttacaaggtcctttctgctctatatctagaactagaacctacccccttccatttatatgaggaactggatttttttccttccgatccctgcaaagttttatgcagtgcccagtggtaggtttagtacacaaggctagctccgttgctgctacaattataacgcaggagaatccgtggtgcctgtctcgttaacttctgactgagcgtgattttcagtcttataatcatgtgtgcgctctaatttgtattttcttggcttgtttagtttgcatcttatgtgcactcagatggagtatactttataccagtgtttctacggaattcattgaaaattcatatatttatcctttcctaccctcaagtacaacaagagtgcaaagctactattcatcttttgtttctgtgcaaaggcctatctttccctttacaggattgttgctcgttgagaaaacttgggagttttggcgtatgcttttagtcctccatgatcttatctgtttcatttggaccatccttttgtcttgaacagactttgggaccaagaattgggtatttgcccctcttgatacctgttataagggctcatttcagcaatgcactcccacctggtgttgacactgtttggtttgaatataaagggctgcctttgaaatggtatgtaccaattggtgttctttttgatcttctatgtgcagatccagaaagaccatggaatctaatagtccattttaggggatatccctcagaaatcttgtcaccatgcgagggtgaagatagtgtgaagtggagctacatgaattccctgaaagaggccaccttcatcattactgggaacagtaagagtgtgatgaatatgtcgcatgctgatcaagtcgctctgtgggaatctgtaatgaaaggtaacttagatgggtataaaaatatctccaccaggcttaagcttggaccatttgaagatgatgtgttagtacggacagcctccgtggagcggcaacgtcaacaaaattctgatgaacctgaatctcctggatctagcaaaccgtgcagggtccctgttcgattatacgtacgcaatgttcaagaagaccttgagtacatagaacatgcagttcctgtcagtgactgggaaaacgtgtcctacataaatcggccatttgagactcgcaaggctgaaggtagaagctacatcaccctggaacatgcgttgcaaacattgcttccggagttcttcagctcaaagcccccaggcagcgctgacggctcccaacacgcaggcgcaatggacgcagccgcagacagttcagatgccaccaactcttcaagtcgttctcaggaggcagagcaagccctggcaagtccagcagaggcgggttctgccaagagagcgaaagtgaagctggtgagggtgcaaggtgttgagctcgacatggacatcccgttcctgtgggtcgccgaccacctcaagaaccccgaatactacgtccacatctgtgtatacgtcggcactagaaaacaatagagataagagtacatggggaaattgttagatactgcgttaggagtgtgtcccagaaatcattttctttgttctttggttattacatgtgctatcctgtgtgcagatacagacgctgaaatttgtaacccttttggatgcacagtcatggaaggatggaattggatggtgaaccattttgtgtgtgtgtgtgtgtgtgtatccgatcgacgtattgcaatatatatcctgcctggagcatagcagaattctttcgttgtagaac

SEQ ID NO: 207300 - DNA, 2559 bp, Zea Mays
aggcgaacagtcaaggctggcatcgtgctgcggtgtccgagtcacatcgtcttcccggaaccaacaagtcgttgggtctgaccgtctgccgtggccgtaccgggccgccctgttcatcgggtcaaatccttcgtcttcttcctcgtcgcatcctctccacctaatccacaatccggaacctcaccgtggagaaccccagatcaaaccctttccccgcccattccccttcgcacttccactctcccagtcctccggtgcgattcgtttcttccttacttccctgcccgcccgagggagaagacgaaatcgggcgaggaatccggccgccagggtttcttgatccgggcgcgtgattcgtcgtgcccaggcaccagtgagaaatcaaatcaagaacacgccagcggaagtgagacgagggcgcggggaggaatcaagatcgcttctttgagctgccagttcccccgcgccaatgccggatccggccggcggcgccgggctggcatgttccctctaactgcccctgtccgccgccgcggctcccgatgctcgtgtggtcttcgggagcaggagagggagcagcggccgtcgtgggcggcggctaggagcgaagatgcagatccggctgtcgccgagcatgaggagcatcaccatctccactagccatggcctgctagacttgatgaggctcaaggtcgccgcgcgacacttttcctaccgcaccgtcttccacaccgtcctcatcctcgccttcctcctgcccttcgtcttcatactcaccgccatcatgacgctagagggcttcaacaagtgctcctcactagaggcttgtgagggatttatatgtgatgcttgataaagtaaattctgaggaagcacctcttgacttgaaggttccagaaacttttgatgaatttatctgggacatgaagaataatgattatgatttaaggtcatttgcttttaagctgaaggctacgatggagagcatggataaggaattgaggtcatcaaggctatcagagcagttgaacaagcactatgctgcaattgctattcctaaaggcctttattgcctttcattgcgtttaactgatgaatactcctcaaatgcccttgcaaggaaacaattaccgcccccagagttggtgccttgtctttcagacaactcctatttccattttgtgttagcatcagataacatccttgcagcctcagttgtggtcagatcaacaattagatcatcactgaagcctgagaggattgttttccatgttattactgataaaaagacctatcctgccatgcattcatggtttgctttaaattctctcagtcctgctattgttgaggtgaaaggtgttcatcaatttgattggttaacacaagaaaatgttcctgtacttgaatcaatagaaactcagcgcgctgccagagatcgttaccatggaagtcgccgcccaataaccagtgctaatgatagcccaagggtttttgctgccaagcttcaggcaggaagtccaacatatactaatgtgctcaatcatattcgaatatacatgcctgagttgttcccaagcctcaacaaagtcgtatttcttgatgatgatgttgttgtccagcatgacctatcaccactttgggatattgatctatctgggaaggttaatggcgctgttgagacttgcagaggtggagatagttgggtgatgtctaagaggttcaggaattatttaaacttttctcatcccctcattgcaaaaaactttgatccttcagagtgtgcttgggcatatggtatgaatatttttgacctgaatgcatggaggaagacaacaatcaaagacaaataccatcattgggtcaaggagaacctgaagtcaaacttcacactttggaggctgggaacattaccaccaggccttatagcatttaaaggccatgttcacccaattgatccatcatggcatctgttaggtttggggtatcaggaaaagacagatatcagtagtgttgaacaagcagcagttatacattataacgggcaaagtaaaccatggctggagattggttttaaacatcttcagccattttggacaaaatatgtgaactactcaaatgaattcttaagaaactgccatataatggagccacagttgtagattgtcgtgacaaaataaataaaaagcatatatcaagtgaaattaaattcgttattttggaagtcaacatcagagagtttatgaagggtaactggggagctcagtaacccccctccatggtcatatgcgttgatggtgaatatccaatgaacagagcatctttcccctcataggaccccttcccttttaatttattccatttgtatcatagctcatgaaattatgatattgtttaggatggttcttttgtattcgatggagcaatatatgagttgaattgatggtagtcccatcattattgtaattgattaagagtatacacagttcatgtgaaaagcatggattttgattatgcaaagcaaaccttgtatacttgttacttatttttagattctctcaa

SEQ ID NO: 207301 - DNA, 415 bp, Zea Mays
aaccaataaaacaatggaaaagggacaacaagatggacagatcagcggggtgctgcaagaagcttacatgccgtggacggggcgggagctggtgcccgctgacgtcgcagacgagcgggccaactgggagcggtgggtgccgcagatgcacgcggagttcgccggcgacagcaagcggcccagagcgtcgccttcgcctccctgttcgtactggtgaaaagctcgccgttacccgttattagtagagttgatttactgggtaccgtaggaacgaagagaaatatgagccaaaaaaaatcatggaacggaccggtgtttctctgttggattattattgggtccatttcgatcgagctgctttaaggtgacgtttggttcataaaatgtaacgtaaataacaataataacgattgac

SEQ ID NO: 207302 - DNA, 3600 bp, Zea Mays
tggtctccggccaaggggtcgtcacatacaaggaccagcgagatgggcggcgaggctgagcctgacaacgcggtgctcttcgttggggtgtcgctggtgctgggcatcgcctcccggcacctcctccgcggcacccgcgtgccctacaccgtcgcccttctcgtcctcggcgtcgcgcttggatccctcgagtacggaacacaacatggtctaggcaagcttggagctggaattcgtatctgggctaacataaaccctgatcttctgctggctgtttttctacctgccctcctctttgaaagctccttctccatggaagtacaccaaataaagagatgtatggcacagatggtgttacttgctggacctggtgtgctaatatcaacagttttacttggcgttgccgtaaagctcacttttccttacaactggagctggaaaacatcattgttgcttggcggactgcttagtgcaactgatccagttgctgtggttgcactgctaaaagaactcggagcaagtaaaaagcttagcacaatcattgaaggtgaatccttaatgaatgatgggaccgctattgttgcctatcagctattctatcgaatggtgcttggaagaacctttgatgctggctcaataataaagttcttgtctgaagtttcacttggagctgttgctctgggccttgcatttggaatcatgtcaatactgtggctgggctttatttttaacgatacaatcatagagattgcacttactcttgctgtcagttatatagctttcttcactgcacaagactcactggaggtctctggtgttttgactgtcatgacactgggaatgttctatgcagcttttgcaaaaactgcttttaagggtgaaagtcagcaaagcttacaccatttctgtgttggttaccaaaagtaccatgaaatcttcagttgacactgaattaagggaaatggttgcttacattgcaaatacacttatttttatactgagtggggttgttattgcagatggtgttctacaaaataatggccactttgagaggcacggcagttcatggggcttccttcttctgctctatgtctttgtacaaatatctcgagttatagttgttggtgttttgtacccgatgttgcgtcactttgggtatgggttggacttgaaagaggccatgattcttgtttggtcagggctgcgaggggctgttgctctgtcactatcattatctgttaagcgtaccagcgattcagttcaaccttaccttaaaccagaagttggaacaatgtttgtgttcttcactggtggcattgtgtttctgacattgatttttaatggctcaaccacacaatttttgctacatatactcggcatggacaaattgttgcccacaaagcttcgtatattgaaatatacaaggtacgaaatgctaaagaaagcattagaggcttttggtgaactaagggatgacgaggaacttggacctgctgactgggttactgtaaagaaatatatcacatgtttgaatgacctagactatgagccagagcatccccatgatgttggtgacgaagatgactgcatgcatatcatgaacttaacagatatccgagtgcggcttttgaatggtgtgcaagccgcgtactggggaatgcttgaagaaggacgaataactcaagttacagcaaatattctgatgagatcggttgatgaagctatggaccttgtttctggacaaacattatgtgattggaaaggtttaaagtccaatgtgcagttcccaaattactataggttccttcagaggagtaggttaccacgaaagcttgtcacatacttcacagtcgaaagattagagtctggatgttacatctgtgctgcatttcttcgtgctcacagaatcgcaaggcggcagctacatgattttcttggtgatagtgaggttgcaagaactgttattgatgaaagtaacgctgagggggaggaagctagaaaattcttggaagatgttcgagttacattcccgcaggtgctacgagtgctaaagacacgacaagtcacatattctgtgctgacacacttgagtgagtatattcaaaacctccagaagactgggctgctggaagagaaggaaatggtccatttagatgatgctctgcagacagacttgaagaagttgcagaggaatccaccaatagtgaaaatgccaagagtcagtgatcttctgaacactcatcctttagttggcgcgctgcctgctgctgtacgtgatactttgctaagcaatacgaaggaaaccctgcgagggcagggcacaacgctgtatagagaaggatccaggccaaccggtatctggcttgtttctattggtgtagtgaagtggacaagtcagagattaagcagaaggcattccttggatccaattttatcgcatgggagcactctgggtctgtatgaggtgctgattggaaagccatatatctgtgacatgaccacagattcgatggtacagtgtttcttcatcgaaactgaaaagatagaagagctgctccattcagatccttcgattgagattttcctgtggcaggaaagtgctctggtgcttgccaggcttttggtccctcatagattcgagaaaatgggaatgcatgagatgagggttctggttgctgaaaggtcgacgatgaacatatacatcaagggagaagacttggaagtggagcagaattgcattggcattttgctggaagggttcttgaagatcgagaacctgactctcatcacgcccccagcgttgcttctgccatggaatgctgacttgagcttattcggtctcgagtcctcagactactgccatactgcacgcaggtatcaggtggaagccagagcgcggatcatcttcttcgacgaggcagaggccgcccatcttcatgttcagacaagtgcgtcgctgccccaaggtgagccagcacggagcatgagcaaggagcacagcggcttgctcagctggcccgagagcttccggaggtctcgtggcagcctaggcttagcagctgagatgctgccgggcggcttgtcttccagggccctgcaactgagcatgtacgggggcagcgtggtgagcctctcctccggccagcagggtcaccggcggcagaggccacgtcatcgcgtgcagtcggagggctccaacatgaagagagtggcagctctacctgaggttgctgccaccgctcctgctccggcaggggcagcacaggggcagcggagggctatgaacttgcaggaggaatacaactcgagcgaagactccgccggcgaagaagtcatcgtcagagttgactcgcccagcatgctctctttccgtgagtccaccgccgtgcctccgccccaggagcagtagctggatgcctggatgtggtcttctcttctcgtgtattgtattgtactgtatgtattgtatcagggaagctttggcgcagtggtgtggtgtggtgtggtgtggtaaacaaaataaataaaacacatttccgcgttccatattttctcttcatgatcaccgaataaataaaagaaacagagacaatgatgcgg

SEQ ID NO: 207303 - DNA, 3641 bp, Zea Mays
cttgctcttccggctcacggcggtggtctccggccaaggggtcgtcacatacaaggaccagcgagatgggcggcgaggctgagcctgacaacgcggtgctcttcgttggggtgtcgctggtgctgggcatcgcctcccggcacctcctccgcggcacccgcgtgccctacaccgtcgcccttctcgtcctcggcgtcgcgcttggatccctcgagtacggaacacaacatggtctaggcaagcttggagctggaattcgtatctgggctaacataaaccctgatcttctgctggctgtttttctacctgccctcctctttgaaagctccttctccatggaagtacaccaaataaagagatgtatggcacagatggtgttacttgctggacctggtgtgctaatatcaacagttttacttggcgttgccgtaaagctcacttttccttacaactggagctggaaaacatcattgttgcttggcggactgcttagtgcaactgatccagttgctgtggttgcactgctaaaagaactcggagcaagtaaaaagcttagcacaatcattgaaggaccgctattgttgcctatcagctattctatcgaatggtgcttggaagaacctttgatgctggctcaataataaagttcttgtctgaagtttcacttggagctgttgctctgggccttgcatttggaatcatgtcaatactgtggctgggctttatttttaacgatacaatcatagagattgcacttactcttgctgtcagttatatagctttcttcactgcacaagactcactggaggtctctggtgttttgactgtcatgacactgggaatgttctatgcagcttttgcaaaaactgcttttaagggtgaaagtcagcaaagcttacaccatttctgggaaatggttgcttacattgcaaatacacttatttttatactgagtggggttgttattgcagatggtgttctacaaaataatggccactttgagaggcacggcagttcatggggcttccttcttctgctctatgtctttgtacaaatatctcgagttatagttgttggtgttttgtacccgatgttgcgtcactttgggtatgggttggacttgaaagaggccatgattcttgtttggtcagggctgcgaggggctgttgctctgtcactatcattatctgttaagcgtaccagcgattcagttcaaccttaccttaaaccagaagttggaacaatgtttgtgttcttcactggtggcattgtgtttctgacattgatttttaatggctcaaccacacaatttttgctacatatactcggcatggacaaattgttgcccacaaagcttcgtatattgaaatatacaaggtacgaaatgctaaagaaagcattagaggcttttggtgaactaagggatgacgaggaacttggacctgctgactgggttactgtaaagaaatatatcacatgtttgaatgacctagactatgagccagagcatccccatgatgttggtgacgaagatgactgcatgcatatcatgaacttaacagatatccgagtgcggcttttgaatggtgtgcaagccgcgtactggggaatgcttgaagaaggacgaataactcaagttacagcaaatattctgatgagatcggttgatgaagctatggaccttgtttctggacaaacattatgtgattggaaaggtttaaagtccaatgtgcagttcccaaattactataggttccttcagaggagtaggttaccacgaaagcttgtcacatacttcacagtcgaaagattagagtctggatgttacatctgtgctgcatttcttcgtgctcacagaatcgcaaggcggcagctacatgattttcttggtgatagtgaggttgcaagaactgttattgatgaaagtaacgctgagggggaggaagctagaaaattcttggaagatgttcgagttacattcccgcaggtgctacgagtgctaaagacacgacaagtcacatattctgtgctgacacacttgagtgagtatattcaaaacctccagaagactgggctgctggaagagaaggaaatggtccatttagatgatgctctgcagacttgaagaagttgcagaggaatccaccaatagtgaaaatgccaagagtcagtgatcttctgaacactcatcctttagttggcgcgctgcctgctgctgtacgtgatactttgctaagcaatacgaaggaaaccctgcgagggcagggcacaacgctgtatagagaaggatccaggccaaccggtatctggcttgtttctattggtgtagtgaagtggacaagtcagagattaagcagaaggcattccttggatccaattttatcgcatgggagcactctgggtctgtatgaggtgctgattggaaagccatatatctgtgacatgaccacagattcgatggtacagtgtttcttcatcgaaactgaaaagatagaagagctgctccattcagatccttcgattgagattttcctgtggcaggaaagtgctctggtgcttgccaggcttttggtccctcatagattcgagaaaatgggaatgcatgagatgagggttctggttgctgaaaggtcgacgatgaacatatacatcaagggagaagacttggaagtggagcagaattgcattggcattttgctggaagggttcttgaagatcgagaacctgactctcatcacgcccccagcgttgcttctgccatggaatgctgacttgagcttattcggtctcgagtcctcagactactgccatactgcacgcaggtatcaggtggaagccagagcgcggatcatcttcttcgacgaggcagaggccgcccatcttcatgttcagacaagtgcgtcgctgccccaaggtgagccagcacggagcatgagcaaggagcacagcggcttgctcagctggcccgagagcttccggaggtctcgtggcagcctaggcttagcagctgagatgctgccgggcggcttgtcttccagggccctgcaactgagcatgtacgggggcagcgtggtgagcctctcctccggccagcagggtcaccggcggcagaggccacgtcatcgcgtgcaggcggccacgacgatgacaaaccagaagaagcacagctcttcctaccccaggatgccatccatatccaaggagcggcatctgctctccgtgcagtcggagggctccaacatgaagagagtggcagctctacctgaggttgctgccaccgctcctgctccggcaggggcagcacaggggcagcggagggctatgaacttgcaggaggaatacaactcgagcgaagactccgccggcgaagaagtcatcgtcagagttgactcgcccagcatgctctctttccgtgagtccaccgccgtgcctccgccccaggagcagtagctggatgcctggatgtggtcttctcttctcgtgtattgtattgtactgtatgtattgtatcagggaagctttggcgcagtggtgtggtgtggtgtggtgtggtaaacaaaataaataaaacacatttccgcgttccatattttctcttcatgatcaccgaataaataaaagaaacagagacaatgatgcgg

SEQ ID NO: 207304 - DNA, 4154 bp, Zea Mays
caactacctaaatactctgttcttcgtcgcttgctcttccggctcacggcggtggtctccggccaaggggtcgtcacatacaaggaccagcgagatgggcggcgaggctgagcctgacaacgcggtgctcttcgttggggtgtcgctggtgctgggcatcgcctcccggcacctcctccgcggcacccgcgtgccctacaccgtcgcccttctcgtcctcggcgtcgcgcttggatccctcgagtacggaacacaacatggtctaggcaagcttggagctggaattcgtatctgggctaacataaaccctgatcttctgctggctgtttttctacctgccctcctctttgaaagctccttctccatggaagtacaccaaataaagagatgtatggcacagatggtgttacttgctggacctggtgtgctaatatcaacagttttacttggcgttgccgtaaagctcacttttccttacaactggagctggaaaacatcattgttgcttggcggactgcttagtgcaactgatccagttgctgtggttgcactgctaaaagaactcggagcaagtaaaaagcttagcacaatcattgaaggaccgctattgttgcctatcagctattctatcgaatggtgcttggaagaacctttgatgctggctcaataataaagttcttgtctgaagtttcacttggagctgttgctctgggccttgcatttggaatcatgtcaatactgtggctgggctttatttttaacgatacaatcatagagattgcacttactcttgctgtcagttatatagctttcttcactgcacaagactcactggaggtctctggtgttttgactgtcatgacactgggaatgttctatgcagcttttgcaaaaactgcttttaagggtgaaagtcagcaaagcttacaccatttctggtatgtatcttatagaaacaagtcagcctcccaataaaggtcatgctgtcgtgctatgccactatcactggcgaaaaggtctctcacttagttggttaggtggtctgagtagtactcattccagtgggagcaaatttcagaccagggttaaaaaattctcgcgtctgtcacacgccaaagcacaggtttaaggtccagacccagtcatggtttctcacattggctgcagtacgccagtaccactgtgtaaaggtgagacaggatttcaagggctttctcgacctatttgcacctggggactatcttacccccataggccaatttttctgtatgctgctatcaatgtgtttgcatgactggggaaactaaacaaggttgagaggttgagtcagccagggtggtggcgttggaattgctggtaaactacttattgcactatgggaactaatttgagggtctgccatagctaatcactagccatgttaatttgggatctgtagccaacaaaaagattcattatgaaaacttataaaaccctaaaaacataaatacacaagcattaattaatagcattttttggcatggaattgttctggtactctatccctgtgatccctatcctaattttgttgatgaataattttccagtgttggttaccaaaagtaccatgaaatcttcagttgacactgaattaagggaaatggttgcttacattgcaaatacacttatttttatactgagtggggttgttattgcagatggtgttctacaaaataatggccactttgagaggcacggcagttcatggggcttccttcttctgctctatgtctttgtacaaatatctcgagttatagttgttggtgttttgtacccgatgttgcgtcactttgggtatgggttggacttgaaagaggccatgattcttgtttggtcagggctgcgaggggctgttgctctgtcactatcattatctgttaagcgtaccagcgattcagttcaaccttaccttaaaccagaagttggaacaatgtttgtgttcttcactggtggcattgtgtttctgacattgatttttaatggctcaaccacacaatttttgctacatatactcggcatggacaaattgttgcccacaaagcttcgtatattgaaatatacaaggtacgaaatgctaaagaaagcattagaggcttttggtgaactaagggatgacgaggaacttggacctgctgactgggttactgtaaagaaatatatcacatgtttgaatgacctagactatgagccagagcatccccatgatgttggtgacgaagatgactgcatgcatatcatgaacttaacagatatccgagtgcggcttttgaatggtgtgcaagccgcgtactggggaatgcttgaagaaggacgaataactcaagttacagcaaatattctgatgagatcggttgatgaagctatggaccttgtttctggacaaacattatgtgattggaaaggtttaaagtccaatgtgcagttcccaaattactataggttccttcagaggagtaggttaccacgaaagcttgtcacatacttcacagtcgaaagattagagtctggatgttacatctgtgctgcatttcttcgtgctcacagaatcgcaaggcggcagctacatgattttcttggtgatagtgaggttgcaagaactgttattgatgaaagtaacgctgagggggaggaagctagaaaattcttggaagatgttcgagttacattcccgcaggtgctacgagtgctaaagacacgacaagtcacatattctgtgctgacacacttgagtgagtatattcaaaacctccagaagactgggctgctggaagagaaggaaatggtccatttagatgatgctctgcagacagacttgaagaagttgcagaggaatccaccaatagtgaaaatgccaagagtcagtgatcttctgaacactcatcctttagttggcgcgctgcctgctgctgtacgtgatactttgctaagcaatacgaaggaaaccctgcgagggcagggcacaacgctgtatagagaaggatccaggccaaccggtatctggcttgtttctattggtgtagtgaagtggacaagtcagagattaagcagaaggcattccttggatccaattttatcgcatgggagcactctgggtctgtatgaggtgctgattggaaagccatatatctgtgacatgaccacagattcgatggtacagtgtttcttcatcgaaactgaaaagatagaagagctgctccattcagatccttcgattgagattttcctgtggcaggaaagtgctctggtgcttgccaggcttttggtccctcatagattcgagaaaatgggaatgcatgagatgagggttctggttgctgaaaggtcgacgatgaacatatacatcaagggagaagacttggaagtggagcagaattgcattggcattttgctggaagggttcttgaagatcgagaacctgactctcatcacgcccccagcgttgcttctgccatggaatgctgacttgagcttattcggtctcgagtcctcagactactgccatactgcacgcaggtatcaggtggaagccagagcgcggatcatcttcttcgacgaggcagaggccgcccatcttcatgttcagacaagtgcgtcgctgccccaagggccctgcaactgagcatgtacgggggcagcgtggtgagcctctcctccggccagcagggtcaccggcggcagaggccacgtcatcgcgtgcagtcggagggctccaacatgaagagagtggcagctctacctgaggttgctgccaccgctcctgctccggcaggggcagcacaggggcagcggagggctatgaacttgcaggaggaatacaactcgagcgaagactccgccggcgaagaagtcatcgtcagagttgactcgcccagcatgctctctttccgtgagtccaccgccgtgcctccgccccaggagcagtagctggatgcctggatgtggtcttctcttctcgtgtattgtattgtactgtatgtattgtatcagggaagctttggcgcagtggtgtggtgtggtgtggtgtggtaaacaaaataaataaaacacatttccgcgttccatattttctcttcatgatcaccgaataaataaaagaaacagagacaatgatgcgg

SEQ ID NO: 207305 - DNA, 3696 bp, Zea Mays
caactacctaaatactctgttcttcgtcgcttgctcttccggctcacggcggtggtctccggccaaggggtcgtcacatacaaggaccagcgagatgggcggcgaggctgagcctgacaacgcggtgctcttcgttggggtgtcgctggtgctgggcatcgcctcccggcacctcctccgcggcacccgcgtgccctacaccgtcgcccttctcgtcctcggcgtcgcgcttggatccctcgagtacggaacacaacatggtctaggcaagcttggagctggaattcgtatctgggctaacataaaccctgatcttctgctggctgtttttctacctgccctcctctttgaaagctccttctccatggaagtacaccaaataaagagatgtatggcacagatggtgttacttgctggacctggtgtgctaatatcaacagttttacttggcgttgccgtaaagctcacttttccttacaactggagctggaaaacatcattgttgcttggcggactgcttagtgcaactgatccagttgctgtggttgcactgctaaaagaactcggagcaagtaaaaagcttagcacaatcattgaaggtgaatccttaatgaatgatgggaccgctattgttgcctatcagctattctatcgaatggtgcttggaagaacctttgatgctggctcaataataaagttcttgtctgaagtttcacttggagctgttgctctgggccttgcatttggaatcatgtcaatactgtggctgggctttatttttaacgatacaatcatagagattgcacttactcttgctgtcagttatatagctttcttcactgcacaagactcactggaggtctctggtgttttgactgtcatgacactgggaatgttctatgcagcttttgcaaaaactgcttttaagggtgaaagtcagcaaagcttacaccatttctgggaaatggttgcttacattgcaaatacacttatttttatactgagtggggttgttattgcagatggtgttctacaaaataatggccactttgagaggcacggcagttcatggggcttccttcttctgctctatgtctttgtacaaatatctcgagttatagttgttggtgttttgtacccgatgttgcgtcactttgggtatgggttggacttgaaagaggccatgattcttgtttggtcagggctgcgaggggctgttgctctgtcactatcattatctgttaagcgtaccagcgattcagttcaaccttaccttaaaccagaagttggaacaatgtttgtgttcttcactggtggcattgtgtttctgacattgatttttaatggctcaaccacacaatttttgctacatatactcggcatggacaaattgttgcccacaaagcttcgtatattgaaatatacaaggtacgaaatgctaaagaaagcattagaggcttttggtgaactaagggatgacgaggaacttggacctgctgactgggttactgtaaagaaatatatcacatgtttgaatgacctagactatgagccagagcatccccatgatgttggtgacgaagatgactgcatgcatatcatgaacttaacagatatccgagtgcggcttttgaatggtgtgcaagccgcgtactggggaatgcttgaagaaggacgaataactcaagttacagcaaatattctgatgagatcggttgatgaagctatggaccttgtttctggacaaacattatgtgattggaaaggtttaaagtccaatgtgcagttcccaaattactataggttccttcagaggagtaggttaccacgaaagcttgtcacatacttcacagtcgaaagattagagtctggatgttacatctgtgctgcatttcttcgtgctcacagaatcgcaaggcggcagctacatgattttcttggtgatagtgaggttgcaagaactgttattgatgaaagtaacgctgagggggaggaagctagaaaattcttggaagatgttcgagttacattcccgcaggtgctacgagtgctaaagacacgacaagtcacatattctgtgctgacacacttgagtgagtatattcaaaacctccagaagactgggctgctggaagagaaggaaatggtccatttagatgatgctctgcagacagacttgaagaagttgcagaggaatccaccaatagtgaaaatgccaagagtcagtgatcttctgaacactcatcctttagttggcgcgctgcctgctgctgtacgtgatactttgctaagcaatacgaaggaaaccctgcgagggcagggcacaacgctgtatagagaaggatccaggccaaccggtatctggcttgtttctattggtgtagtgaagtggacaagtcagagattaagcagaaggcattccttggatccaattttatcgcatgggagcactctgggtctgtatgaggtgctgattggaaagccatatatctgtgacatgaccacagattcgatggtacagtgtttcttcatcgaaactgaaaagatagaagagctgctccattcagatccttcgattgagattttcctgtggcaggaaagtgctctggtgcttgccaggcttttggtccctcatagattcgagaaaatgggaatgcatgagatgagggttctggttgctgaaaggtcgacgatgaacatatacatcaagggagaagacttggaagtggagcagaattgcattggcattttgctggaagggttcttgaagatcgagaacctgactctcatcacgcccccagcgttgcttctgccatggaatgctgacttgagcttattcggtctcgagtcctcagactactgccatactgcacgcaggtatcaggtggaagccagagcgcggatcatcttcttcgacgaggcagaggccgcccatcttcatgttcagacaagtgcgtcgctgccccaaggtgagccagcacggagcatgagcaaggagcacagcggcttgctcagctggcccgagagcttccggaggtctcgtggcagcctaggcttagcagctgagatgctgccgggcggcttgtcttccagggccctgcaactgagcatgtacgggggcagcgtggtgagcctctcctccggccagcagggtcaccggcggcagaggccacgtcatcgcgtgcaggcggccacgacgatgacaaaccagaagaagcacagctcttcctaccccaggatgccatccatatccaaggagcggcatctgctctccgtgcagtcggagggctccaacatgaagagagtggcagctctacctgaggttgctgccaccgctcctgctccggcaggggcagcacaggggcagcggagggctatgaacttgcaggaggaatacaactcgagcgaagactccgccggcgaagaagtcatcgtcagagttgactcgcccagcatgctctctttccgtgagtccaccgccgtgcctccgccccaggagcagtagctggatgcctggatgtggtcttctcttctcgtgtattgtattgtactgtatgtattgtatcagggaagctttggcgcagtggtgtggtgtggtgtggtgtggtaaacaaaataaataaaacacatttccgcgttccatattttctcttcatgatcaccgaataaataaaagaaacagagacaatgatgcgg

SEQ ID NO: 207306 - DNA, 979 bp, Zea Mays
gtggatctgaacatgaaaggtatcacttctcgaggcacggtgcatgcaaatataacacaagtttgtatcgaactgacaaaacgaactcgaagcttctgttgtgtacatttttcagattggaaaatggatggcctccatctctctctatatgcatttaaaactatctttttaggctcggagtcaacaacaggaagtgctctcattctatgcttcattttcagaacatgaagtggttttggaagctgtgcataaaaggaggtgcaggacttgtagccaatggaatgtaactggaagggaacaatgctgcttgtctcaaggcgcttgtccgtgacgccgtcggcgcccgactccgggggcgatgggaagagttgcgtttcattacacgggacaccaggacgggagggggaagaggaacaatctcatgatctcaccttttttcctcatctgacataattctctctcggcaggtgcaactgctgcatcagccacatcatttgattaatccatttttatgatcagattcccactggtggcggctctcctctctctgagaaaaccgaccctcttggtaccatttctgctgctccatggggatctgctttgattatgccaatttcctacacatatagccatgatgggctcactgatgcttcaaagattgcgatcttgaatgcaaactacatggcaaaacgtctagagaaacactacccagttctgttccgtggagtcaaccgaactattttccgttgaaaataccgtcaccacagtctgctatcttcagttttagtttcactttagtttacctttagtttcagttgcaggttatcttcagtttcagttttagtttctcttcaatttcattttacgtgtgtactcagtttcagtttaccggtgtactcagtttcagtttcagtttacctgtgtactctttgacgttgtttttccatttgtcttgtttcctctatgaatactagtgcgc

SEQ ID NO: 207307 - DNA, 4657 bp, Zea Mays
gataccgtctccgacctcctcccttttgcgctagcttcagagcatcatcaccactccacaccaccgccccagctcgcttccctccccgctacacggtcgctcaccagtcaccacccaccactgcttccatgctcctcgcctcgtttccagctcgcgaaacttagctccagatcctctcccccccccccccccatccaccgcgccgcattaacctcagatccacccggcgagctcatttcagatccatccatgcgcttcccgttccttttcgccctccagctggtcgccttggcggcggcagcgtcggcggccgaggtcgcggtgacgcgctcttcgaggatggtgcaccgtctgtcagacgaggcccggctggaggtgggcccgcgtgtggggtggtggccgcagcgaggaagcggggagtactaccgcgcgctagtgaggagcgatatccagcggcagaagcggcggctcgcggtcctctcgctctcaaagggcggcagcaccttctccccgggcaacgacttaggctggctatattacgcttgggtggatgttgggacgcctgctacctcctttttggttgcattggatactggtagtgaccttttctgggttccctgtgactgtatccagtgtgctcccttgtctggctaccgtggaaatctggtatgcacccccttagttcagtaactttgatgttaatatctgaagatgtcgtattgtcaagcggctgtcagcttgagttgggacctacgagaatcttttttttcccaaagacatatttgcttggttcatgccaaattactgatgcagatgatgacctgaatcttgacatttttattacctaagacacaaatcttggttgaagaaactaatacattgcatgcggtttgctctaattccattgactattggatatcgtaggaaaaaaaatgcaaactgatttctaaacttggaaagtggaaagtaacatgactgatctgtaaacttcccaccatgtctctgggtcattttcagtttaaatttcactataatcactgttcttggctgcgttcaagttgtggtgcaaagtatgtacaccattatgtgaccataaaatatcacacggacaagaacaatccatctatgttttgatggaaattaatttctccactgttcagctgcaattgtaagttgcacaggcacaccgcacacctacatttcattgtcatggcttgcaagtttgatactggccaggtttttatttaggagtacaagtggtggtgtcatgtgtgaactttggttctcttctgttttgttcattttaagtttcttctatttcttcctaacaagtgcagaataagaggaggctaccatgattttaagcagtttagtgcttatttccagtgattgattggcaggtgctccatcataaatggagcatctattatgcaggatagagatcttagaatatacaggcctgctgaatcgacaacaagtcggcatcttccttgcagccatgagctatgccaatcggttccaggctgcacaaacccaaagcagccttgcccatacaacattgactacttttcagaaaatactaccagctctggtttgctaattgaggatacactacacttgaactacagggaggaccatgtacccgtgaatgcttcagttattattggctgtggtcaaaagcaaagtggtgattatctggatggtattgcaccggatggactccttggccttggaatggcagatatttcagttcctagtttccttgctagagctggactagttcagaattccttctcgatgtgctttaaggaagatagttctgggagaattttctttggagaccaaggagtgccctctcaacagtctacaccgtttgttcctctgtatggcaaacttcaaacttatgctgttaatgtcgacaaatcttgtattggacataaatgtcttgagggtactagcttcaaggctttagtcgatagtggaacatcatttacttctcttcctttcgacgtttacaaggctttcacaatggagtttgacaaacaaatgaatgctacaagggtgccttatgaagacactacctggaaatattgctacagtgctagtcctcttgagatgcctgatgtgccaaccataaccctgacatttgctgcggacaagagcttgcaagctgttaatcctatcttgccatttaatgacaaacagggggcacttgccgggttctgcttagctgtgctgccatcaacagaacccattggaattattgcccagaatttcctggttggataccatgttgttttcgacagagaaagcatgaagctgggctggtaccgctccgaatgtcgctacgttgaggacagcacgacagtgccgttgggcccatcgcagcacgacagtccagaggacccgttgccgtcgaacgagcagcagacttccccggccgtgacgcctgcgacggcaggcacggctccgctctcctgtgcgacgacgaatctgcagatgctccttgctagctcttacccattgctgttgctgacgatgtcgagtgtgttcttcgtctcgtgaacaaccgatatactactaatcgatagccttgtatattgtatgtgctttatttatggtgtttttttctttatgtgttgctctagaggtttatagatcagctgtattttgcctccgttgttggtccctgggatagcctagcaatagcaatcccccgactcgaaatgcagaagtttcagaaatggtgcggaaacgagcatatgccctcgcagtctgctactctgcttgcacatcatctatcgtctttgacacgcatgggctgatgggcgtggccaaatccacttagcaaaagctgcagcgaagcaggcgatttttacccgtcccccggaacgccggtgcgtgctccgctactcagattaacctactgcaacgcacaacagcagcaccattccactgcgctgcacagcacaaccgtcacacgagacgagacctcgcaccagccacgactactcgcctcccctttttccccctcgtcgtgctctcttgtcaacccccaatgcagcacgcacaccctctcctctctcccgtcccctcacgcagtcacagtccatctcgccatcgcattgcctagttcaaaaggcctccgaaatcgaacagtccctgccgggtgccggcctcgtacaagcaaaagacagacagttcccgcatcaaccggctagctagctagcccttcaggacctcgctgcattccccatgggaggcgccatgaggcagctgcttagctttctgggagcgatcaatggccgccccaccccagggagaagacgaacgacgacgctgcggcggcgcctggtgcgggacggtggagctgagggtcaggatgaactgcgagcgcgaggtcaagaatgctttctccggcatgcatgagaggttggtcatccgtcactctggtcccctggcctggcctggcccctacgcgttcgcgtcaagttttcgttgctcgccagcattgcgcccacgaccatcgcatggtggcatcactcttctcgtctgtgccctgatgatgagcctctctgcagtctgcacccactgagtcagtcagtaatagtataatgagggggtgtttggttctatggactaaagtttagtccgggtcacatcaagcgtttgactttcaaataggagtatgaaatatagacccaaccaactgtactagattcgtctcactttttaatcttcggctgagaaattagttttataatccgactacatttaataccccgaacggaggttcaaacattcgatgtgataggggctaaattttagcaggggcaaatcaaacaccccctgactaatgaccatcgtgtcctttcagaacaagcttttttttactgctgcagtagtgcagcacagcagcagcatatgccggcggcatccaacaatagcgaaagttccacttgaccacttcgaatcgaactatcgaagtgatttcctgaagaggagcccaagtttaccgtggcgattaataactctgatgaagctgcccgcctgcctgcaggagcagtggcgaatctagccgaaaatatgatcggagtcatcaagagcagctttgctatatcatacaaatttttatgaactttaacagtattttgctaaaatatttataaaatttatcggggtcggctgaccccgataaccccctagattcgcccctgtgcaggagtgcagcatgtggaggtgaaccggctgcagcagaaggtgacggtgacggtgacggtgactggcgaggtggacccggtcgtggtgctgcggcctgcggagggcccagcccacggggaagaaggcggcggagccgtggactggcccccataacactgccggctgctacgccccggcggccgtggccctctaccgcgtcgggccggcccagctgcaggcccacgacggcaggtgggcagacccgtacctggtctcggtgaggagcgtggaggcggacataggcgccgagcatatcagcaggttgttcagcgacggcaaccgcaacgcctgctcccagtgggtgagctccgtaaaaattgttgagaactacgttaccgcggatcaccagatccgctcccttttttcccgtcagcagtagagacgcgagaagttatag

SEQ ID NO: 207308 - DNA, 483 bp, Zea Mays
cagagaggcggcttgcggcagcttgcgttcccttcgttgccgcctaccccacgcaacgcaacgcaacggatcgccaaatcaacttgagcttgagcatcccaccaatccactccccaacagcaatggacgccgcccagcgccgcgtcggtacccacctccagcgcccgccgccgcccgccgggggctacggcctcaccgtcaaccccaccgcggccgacgcagggctacagtgtcctcctccctgagaaattgcaaaccggcaggtggaacgtgtaccgatccgcgcgttcaccgttaaggctgataagtagattccctgacaccccagacattggaacgctgcatgacaatttcacgtaagacaccggggccaccaccccacttccatctggcctttttatcttgctttctttcctatctagcttctgtgaaaggttctgttattaccaacaacaatgtgatcggtttactgtttccctttat

SEQ ID NO: 207309 - DNA, 485 bp, Zea Mays
gaggcggcttgcggcagcttgcgttcccttcgttgccgcctaccccacgcaacgcaacgcaacggatcgccaaatcaacttgagcttgagcatcccaccaatccactccccaacagcaatggacgccgcccagcgccgcgtcggtacccacctccagcgcccgccgccgcccgccgggggctacggcctcaccgtcaaccccaccgcggccgagtacgtccacgggctacagtgtcctcctccctgagaaattgcaaaccggcaggtggaacgtgtaccgatccgcgcgttcaccgttaaggctgataagtagattccctgacaccccagacattggaacgctgcatgacaatttcacgtaagacaccggggccaccaccccacttccatctggcctttttatcttgctttctttcctatctagcttctgtgaaaggttctgttattaccaacaacaatgtgatcggtttactgtttccctttat

SEQ ID NO: 207310 - DNA, 1857 bp, Zea Mays
catttttccatcagcctgaaacagcctaatagtcttactttgatcccttgggaaaaaatgttcttattattttgagtttttgacctatagtcaggtccagaacatacccctgacatcacactactaatctgggacaaaaatatgtagttctccaaaagaaaattgtttctaatcctgccctgaaaatgtttgctgaaatactatttggtaaggttgctgcatagctaaaaggttctccaaatgaaaattattcctaatcctgccctgaacaacaagaaggaattctatggtttccaaaaatgagaatatgttttttattcgtacatgaagcttcttatatgaccccttccctcgtatagggagtttttctttttgtattcatacgtgaactagtatttgtttttgtagcagcaccataaggaggatattatttactaatgtagaaatgtttatgttttagcagttgccttgtaatatttgtcttaaattttcgtactttccagctttagtggctcgccaactaaatctagcatggttccctgcttcatataactaaatctagcattattgtcttcttctatttgttgtacaagaaaagatagaatggaactcaaattttggtggcctaacaagtgtggagacttgaattcatatatatttagcacaaatagttctgaccaagttttttaattagtattagtttggatttagagtacacttatgtatgagttattcgacaatgcttatttattagatattgaatggtacttatctatactatattaattataatgttattaaatatatgtttatgtatatttctctttcaaattattataatatggtatctgattataaattaaagaatttactgccatgtaaatcatttcgtttaaaagtacacaaactcggtcctatagcttactgagaactttcatgacctttaattgttgatcagagagggtagcttgatagtaccatagtctttaaacctgtttttagtgtttatatatatatatatatatatatatatatgtgtgtgtgtgtgtgtgtgtgtatctacataacatgaataggacataataaatagctatatttagcgtgaagtatatatgagaatacagacttgggccggcgacatggttgaagctcgtagttttgaattgttggcataatgatttgccaatggattcattgagcgagatggcacagcaaggtgagtttctgattggactcctcaatgaactagcatgttgggctttggcacctggagcagagtcattcttcaggtcccttctgttaggaaggatttggatgcgctccttgtttgagtgctccaaatctgaaaaccaagcagtgtttcttctatctacaggaatgtcctcaggaggcttggagccttcatgctggtcaatcttcccaagaagaaaggtgtattgagacttcaaatgcttctagtttgtcttcagctgagtctgcaaccgaaacagtagccagctgaacatgctgacatgttaatgcgggtggtcaaggctcaggattcagagcagaagatacacataaatactggtgaatgatgccatcgacgatgatgaaatgatcaaacgatggatgatgccatcgatgaaagatggaatggaactcaaatttgggtggtcgcacaagtgtggagacttgaatttatatatacttagttagtctcaatgttagcacaaacagttgatgagcaagttttcccattgtattttagtttgaatttagagtacatttatgtaagagttatttgacaatgcttatttatgagatattgaatgatatttatctatattatattaattataatgttattaaatatat

SEQ ID NO: 207311 - DNA, 1924 bp, Zea Mays
ttagtccaaggttcaatacaaactttctcagaaaactatctcaaacactactaatcgttgttggtctgcagggtttcaaattaggacttagccatttttccatcagcctgaaacagcctaatagtcttactttgatcccttgggaaaaaatgttcttattattttgagtttttgacctatagtcaggtccagaacatacccctgacatcacactactaatctgggacaaaaatatgtagttctccaaaagaaaattgtttctaatcctgccctgaaaatgtttgctgaaatactatttggtaaggttgctgcatagctaaaaggttctccaaatgaaaattattcctaatcctgccctgaacaacaagaaggaattctatggtttccaaaaatgagaatatgttttttattcgtacatgaagcttcttatatgaccccttccctcgtatagggagtttttctttttgtattcatacgtgaactagtatttgtttttgtagcagcaccataaggaggatattatttactaatgtagaaatgtttatgttttagcagttgccttgtaatatttgtcttaaattttcgtactttccagctttagtggctcgccaactaaatctagcatggttccctgcttcatataactaaatctagcattattgtcttcttctatttgttgtacaagaaaagatagaatggaactcaaattttggtggcctaacaagtgtggagacttgaattcatatatatttagcacaaatagttctgaccaagttttttaattagtattagtttggatttagagtacacttatgtatgagttattcgacaatgcttatttattagatattgaatggtacttatctatactatattaattataatgttattaaatatatgtttatgtatatttctctttcaaattattataatatggtatctgattataaattaaagaatttactgccatgtaaatcatttcgtttaaaagtacacaaactcggtcctatagcttactgagaactttcatgacctttaattgttgatcagagagggtagcttgatagtaccatagtctttaaacctgtttttagtgtttatatatatatatatatatatatatatatgtgtgtgtgtgtgtgtgtgtgtatctacataacatgaataggacataataaatagctatatttagcgtgaagtatatatgagaatacagacttgggccggcgacatggttgaagctcgtagttttgaattgttggcataatgatttgccaatggattcattgagcgagatggcacagcaaggtgagtttctgattggactcctcaatgaactagcatgttgggctttggcacctggagcagagtcattcttcaggtcccttctgttaggaaggatttggatgcgctccttgtttgagtgctccaaatctgaaaaccaagcaggaatgtcctcaggaggcttggagccttcatgctggtcaatcttcccaagaagaaaggtgtattgagacttcaaatgcttctagtttgtcttcactgcaaccgaaacagtagccagctgaacatgctgacatgttaatgcgggtggtcaaggctcaggattcagagcagaagatacacataaatactggtgaatgatgccatcgacgatgatgaaatgatcaaacgatggatgatgccatcgatgaaagatggaatggaactcaaatttgggtggtcgcacaagtgtggagacttgaatttatatatacttagttagtctcaatgttagcacaaacagttgatgagcaagttttcccattgtattttagtttgaatttagagtacatttatgtaagagttatttgacaatgcttatttatgagatattgaatgatatttatctatattatattaattataatgttattaaatatat

SEQ ID NO: 207312 - DNA, 831 bp, Zea Mays
atctccctcctccactcgggtcttcacgatgccgccgccgccacacgacatcgcacatccgctcttctccctcccctcgctctcggcggtcgacgtgcgctcccctggtgccatcgcttgtgcccggctcccgccatcgctggctccccgatggacctcgcggctagtgtggggccatggatccccgacggatcgagggtcgcgccgcctcatgagaaaaatcatctttttggctcgaacagaaaatacctgaagcttcaatttgacatcgtgtagcaatgaatgcgtgcaaggaatgctcttttacatgttgagaatgaagaaaaattagatgtcgtggaggcatcccaaaacatgaatgtcctcaggaggcttggagccttcatgctggtcaatcttcccaagaagaaaggtgtattgagacttcaaatgcttctagtttgtcttcactgcaaccgaaacagtagccagctgaacatgctgacatgttaatgcgggtggtcaaggctcaggattcagagcagaagatacacataaatactggtgaatgatgccatcgacgatgatgaaatgatcaaacgatggatgatgccatcgatgaaagatggaatggaactcaaatttgggtggtcgcacaagtgtggagacttgaatttatatatacttagttagtctcaatgttagcacaaacagttgatgagcaagttttcccattgtattttagtttgaatttagagtacatttatgtaagagttatttgacaatgcttatttatgagatattgaatgatatttatctatattatattaattataatgttattaaatatat

SEQ ID NO: 207313 - DNA, 2058 bp, Zea Mays
cccagatcaacctaccgcgacacagactgccctttcccctctcacccttgccgccaccgtcctctatctgccgttccaccggcggcgtcgcctcccacagtcccactgaagcctctcgcggacccttccagaacttgtcctcgaccgccccgtggtccggcctcttaccgctccgcttcctcctacaccggatttaggcttattgacgataatgtgctaggagaacgaatttgggtggcacgtgagtggtgatccgttgccctccctgacaaagacgttatgtctatgaagaggcattttgcgatattcaccaccgcaagcctcccatggatgacaggaacatccatcaaccctttgttccgggctgcttatctggcaaaggatggtgataaggatgtcacactggtgatcccttggctttgtctaagggaccaagagttggtttaccctaacaatattgtatttgactcgccttccgagcaagagagctatgttcgccactggatcgaggagaggattgactttaggccatccttcagcatcaaattctacccaggaaagttttctaaagaaatgagaagcatcctccctgttggggatattacagaatgcattccagatgaagttgctgacgttgctgtattggaagagcccgagcatctaaattggtaccaccatgggcgaagatggaaaaataagttccgtcgagttataggaattgtccatacaaattatctagcatatgtaaggagagaaaagaatggtcaagttattgcttgtttcctaaagtatgctaacacttgggtaactcgaatctattgccacaagattatcagattgtcaggtgccacccaaaatctgcccagaatggggagaaagccttcacaaagggggcatactacatcgggaagatggtatggagtaagggatacagggagcttcttgatctgctgtccaaatatcagagcaagttggttggtcttgaagtggatttatatggcagcggagaagattctgatgaggtctgtgaatctgccaaacgtttaagtttgtctgtcaatgttcatcctggtcgtgatcatgcagatcccttgttccacgagtataaagtattcatcaatcccagcaccacagatgtggtctgtacgaccaccgctgaagccctggcaatgggaaagatagttatatgtgccaatcacccgtcaaatgagttcttcaagcagttccccaactgccgtgtctatgacaatgaagacgagtttgtacaactaaccctgaatgctctatcagagcagcctgctccattgacagacacgcagaggtacgagttgtcatgggacgctgcgactgaaagattcatcgaggcctctgatataaatcctcatgtgccggagtccagggcccatcaaaactctagggctttgttgcctgcttttctaagaactcgtaaactgaaacagaacttagaggatgcgtcagtttacctgcaccaagccctgtcaggtctggaagtcactcgctgtgcgtttggtgctgttcctaagacgctgcagcctgacgaacacctctgtaaagaccttggtttggctcctccggcaaagaagagaaggctgaaaattaagaagacgtaacgttggtgctgttccaaagatgacgtaacgtttaagatgagcaatgcttcgcctcatgtacagcacaatgtggtagacatttttactatttttcttctcaaaagagacattatcatacagtccggactccggtgggatttctaatggaggtttaatgcttcttttgactatttattactgggacgtgtgaactggggattagcacattgtaaattggtgtgctagcagctagcttagagagctaaggattctttgaatagtgctgtaattgtgtgagccgattaatggatcgtaatgaactgtgatgtctggtgtactcgagctcatcgtttaggccctcttttgaatgtgagaatttctgtttgctgtttatttcctttgaaaatcaactgattcttataaaatttctaggaaatttgtgttctaa

SEQ ID NO: 207314 - DNA, 3525 bp, Zea Mays
tccttaaaaatattactcctctaaccgaacggggctgaaaaaaaaaaattctaacattccgccactcgtccgtgcgcgactgcgtgccactcggcccaatcccctccgtccggccgtcccctgcctccctcccggccgcttccaaatccacccgccatccgttccgccgtcgccgcgatggacgccgcggaggcctcggaggtgcaggcgcggctggccgcggccgtgcacgcgctcaaccacgacgcgcgtcccgaggcgcgcctcgccgctaaccaatggctcctcgcgctgcagcggtccccgcaggcgtgggcagtcgccacctccctcctggccaccccagacccgctcccgcccgccgatctcctcttcttcgccgcgcagatgctccgccggaagatccagtctccgggccccgcgctcctcgggctcggcctggcgtcgcagctcctcgatgcgctgctcctggccgcgcggcggttctgcgccgccccggcaccgcgccagctgctcacgcagatctgcctggcgctcgccgcgttggcgctccgcgccgagggcggcgtcgacggcctcttcgcgcgtatgccgcacctgccgccccccgccgtgctggagctgctcaccgtgctccccgaggaggctgcgcaggaccagggcggcgacacgggggttgacgccgccgcgcggtgccggtttacgcgcgagctgctcgcgcacgcgccatcggtgcttgagttcctccaccggcaatccgagaaggcacccgccgatgacgacggggttcccctcgacgagcgcaaccgcagaatcctccggtgcctactgagctgggtccgcgtgaggtgcttctcagagacgccggcagcctcgcttgccaggcacccacttctcacttttgcgttcaactcgctgcaggtgtccttctcgtttgaggtggccatagaggttatgactgagcttgtcagccagcaccaagaattacctgaggcctttctgagtaagacaccttatataagggaggctcttcttctaccagctttagccaacagaaatgagaaaattattgctggtcttgcctgtttgatgtgtgaagttggccaggcggcacctgctttggttgcagaagggggtagccaagcacttgctctcaccgatggacttttgaggtgtagtttggcacatttcattcttggtattgatgtgaagtcagccaaaagaaatgtggtacaagagttgtttgtgcctgtgttttcttcgctgctggatgctcttttatttcgtgctcagatggacactgatgagcatggttctgatggagcaccttgtatacctgagagactaacacagttcaggatgaatttggaggagctcctcgttgatatttgtttgcttctgggtgcccctgcatatataaacaggctcttttctggtggatgggacttttcaagccaaacaattccttggaaggaggtagaagttagaatgtatgcactcagcatggttgctgacacgattttacaagatgaaggctcctttgatttttcaatcataatgcattttgtgaacattttgtccagtagaacacctgttgaactgaatggaaatttgtttttggtgtataaatcgttcggtgatgtcgttggctcgtactcaaagtggttatcgtcttctcaatgtaacattaagcccttactcctattttgcgcgtcaggaatttcaaaatccgtatcatcaaatgcttgctccttagcattgcgcaaactttgtgaggatgctccttcattcatccatgaaccacagaaccttgaaattcttttctggattggtgagggcatgaataaagggaacctgcagctagaggatgaggaagagataattagtgcaatcacacatgctttaagttctataagtgaaaaagagttgaagaaaagttcactggccaggttactttgttccagttactctgcagtggaaaagattattgacattgatagagatcaattgctaaggcaaaatccagctgcttatacgcaatcattggatcttgctgtccgtggtctctacaggatgagtgctttgtttcatcatttggcaacatcagtcacatctggtctggtcgatgatgatataattatagttcttcttggaatattctggccacttcttgaaagtcttttccgatcatctcatatggagaatgtgcatttatctgcagctatatgccgttctctttcttctgctatacattcttgcggacaccactttcatattttattacctaaagttatggagtgcttatctgcaaatttcttgctatttcaaaggcacgactgcttcttgaggacagctgccaatgttattgaagagtttggccacaaagaagaatatggggctttatgtgttaggacttttgaaattcttagctctgcatcttcaatatcagctctgaattcttcttatacctgtgatcaagaacctgacctagttgaagcatatacctactttacatctatgtttattcgctgctgtccaaaggaagccattgtggcatctagctccctgattgagttatcatttcaaaaggcagctatatgctctacagcaatgcaccgaggagctgcacttgcagcaatgtcatatatgtcgtgttttcttgagactgcccttgctgctgtgctagaatctcctgagtgcatccctaacgggtcacctggtgtggccctaatccaaatcttggcacgctgtggtgaaggtctattatctaatgtgctttatgctttacttggtgtatcagccttgtcaagggtccataaatctgccacaatattgcaacaactggcggcattgtgcagtttcagtgagggaacgacatggaaggctatccttagttggaattctctttgtgggtggctacaatcgacggtgaaatctttgccttctgagtatctaaagcaaggggaggctgaaataatagttccatcgtggctcaaggtgcttcaggatgcaggctcagactatcttcacagcaggactggtgataatataagaagccatcaaggttacatgcaagggaagggtggtagaactcttaaacgtataatcagagatttcgcagaaagccaccggaatgttccaatccccagtcctacatgatatggatgtgtcacgagtcttgcactctttactgatttgaggatgtccagtccctccagtagcttggagtctgactctagagagggggtccttgtggaactgatgtccgtcccgtctctgctggcatgctacatgttggttccatctatagttcagcaagaggaagaggctatttgattgttccggacatctggttcggacttggagagtcttctctgtatagcaaggaagtcgcaccattgttctgctgactaattgggggttgaatgcaaagtctgaagccgcatgtcatggttcgagatccaattttgttttgatagacatactgtgaaattcattgtgccgtggtggtctgtgataccaacc

SEQ ID NO: 207315 - DNA, 2902 bp, Zea Mays
atggtagcagcagtgagggtcgacgccaggggctggtacaccggtcctggtatggttgtccctggcgtcgtcagccatgcaactggtgatgaagatggcgcaacacaactggaattacctgaggcctttctgagtaagacaccttatataagggaggctcttcttctaccagctttagccaacagaaatgagaaaattattgctggtcttgcctgtttgatgtgtgaagttggccaggcgaagggggtagccaagcacttgctctcaccgatggacttttgagatgtgtagcttttaccagtgaagattgggaaattgcagagtcaaccctgcaattttggtgtagtttggcacatttcattcttggtattgatgtgaagtcagccaaaagaaatgtggtacaagagttgtttgtgcctgtgttttcttcgctgctggatgctcttttatttcgtgctcagatggacactgatgagcatggttctgatggagcaccttgtatacctgagagactaacacagttcaggatgaatttggaggagctcctcgttgatatttgtttgcttctgggtgcccctgcatatataaacaggctcttttctggtggatgggacttttcaagccaaacaattccttggaaggaggtagaagttagaatgtatgcactcagcatggttgctgacacgattttacaagatgaaggctcctttgatttttcaatcataatgcattttgtgaacattttgtccagtagaacacctgttgaactgaatggaaatttgtttttggtgtataaatcgttcggtgatgtcgttggctcgtactcaaagtggttatcgtcttctcaatgtaacattaagcccttactcctattttgcgcgtcaggaatttcaaaatccgtatcatcaaatgcttgctccttagcattgcgcaaactttgtgaggatgctccttcattcatccatgaaccacagaaccttgaaattcttttctggattggtgagggcatgaataaagggaacctgcagctagaggatgaggaagagataattagtgcaatcacacatgctttaagttctataagtgaaaaagagttgaagaaaagttcactggccaggttactttgttccagttactctgcagtggaaaagattattgacattgatagagatcaattgctaaggcaaaatccagctgcttatacgcaatcattggatcttgctgtccgtggtctctacaggatgagtgctttgtttcatcatttggcaacatcagtcacatctggtctggtcgatgatgatataattatagttcttcttggaatattctggccacttcttgaaagtcttttccgatcatctcatatggagaatgtgcatttatctgcagctatatgccgttctctttcttctgctatacattcttgcggacaccactttcatattttattacctaaagttatggagtgcttatctgcaaatttcttgctatttcaaaggcacgactgcttcttgaggacagctgccaatgttattgaagagtttggccacaaagaagaatatggggctttatgtgttaggacttttgaaattcttagctctgcatcttcaatatcagctctgaattcttcttatacctgtgatcaagaacctgacctagttgaagcatatacctactttacatctatgtttattcgctgctgtccaaaggaagccattgtggcatctagctccctgattgagttatcatttcaaaaggcagctatatgctctacagcaatgcaccgaggagctgcacttgcagcaatgtcatatatgtcgtgttttcttgagactgcccttgctgctgtgctagaatctcctgagtgcatccctaacgggtcacctggtgtggccctaatccaaatcttggcacgctgtggtgaaggtctattatctaatgtgctttatgctttacttggtgtatcagccttgtcaagggtccataaatctgccacaatattgcaacaactggcggcattgtgcagtttcagtgagggaacgacatggaaggctatccttagttggaattctctttgtgggtggctacaatcgacggtgaaatctttgccttctgagtatctaaagcaaggggaggctgaaataatagttccatcgtggctcaaggtgcttcaggatgcaggctcagactatcttcacagcaggactggtgataatataagaagccatcaaggttacatgcaagggaagggtggtagaactcttaaacgtataatcagagatttcgcagaaagccaccggaatgttccaatccccagtcctacatgatatggatgtgtcacgagtcttgcactctttactgatttgaggatgtccagtccctccagtagcttggagtctgactctagagagggggtccttgtggaactgatgtccgtcccgtctctgctggcatgctacatgttggttccatctatagttcagcaagaggaagaggctatttgattgttccggacatctggttcggacttggagagtcttctctgtatagcaaggaagtcgcaccattgttctgctgactaattgggggttgaatgcaaagtctgaagccgcatgtcatggttcgagatccaattttgttttgatagacatactgtgaaattcattgtgccggtaagctatatgaagacaaaatggggggatggaatgcaacctgtacataccattctttgctggttggggcaggcgatgtacgaacattcatatgcagcagtgttactgctcgaatctggagttaaacatgggcagtaatgctaggcatttatcaaacttctatcatgtcagtcgaaactttgaacaagtgtacataatcaaatatattatcagatatcataattttatgg

SEQ ID NO: 207316 - DNA, 2864 bp, Zea Mays
atggtagcagcagtgagggtcgacgccaggggctggtacaccggtcctggtatggttgtccctggcgtcgtcagccatgcaactggtgatgaagatggcgcaacacaactggaattacctgaggcctttctgagtaagacaccttatataagggaggctcttcttctaccagctttagccaacagaaatgagaaaattattgctggtcttgcctgtttgatgtgtgaagttggccaggcggcacctgctttggttgcagaagggggtagccaagcacttgctctcaccgatggacttttgaggtgtagtttggcacatttcattcttggtattgatgtgaagtcagccaaaagaaatgtggtacaagagttgtttgtgcctgtgttttcttcgctgctggatgctcttttatttcgtgctcagatggacactgatgagcatggttctgatggagcaccttgtatacctgagagactaacacagttcaggatgaatttggaggagctcctcgttgatatttgtttgcttctgggtgcccctgcatatataaacaggctcttttctggtggatgggacttttcaagccaaacaattccttggaaggaggtagaagttagaatgtatgcactcagcatggttgctgacacgattttacaagatgaaggctcctttgatttttcaatcataatgcattttgtgaacattttgtccagtagaacacctgttgaactgaatggaaatttgtttttggtgtataaatcgttcggtgatgtcgttggctcgtactcaaagtggttatcgtcttctcaatgtaacattaagcccttactcctattttgcgcgtcaggaatttcaaaatccgtatcatcaaatgcttgctccttagcattgcgcaaactttgtgaggatgctccttcattcatccatgaaccacagaaccttgaaattcttttctggattggtgagggcatgaataaagggaacctgcagctagaggatgaggaagagataattagtgcaatcacacatgctttaagttctataagtgaaaaagagttgaagaaaagttcactggccaggttactttgttccagttactctgcagtggaaaagattattgacattgatagagatcaattgctaaggcaaaatccagctgcttatacgcaatcattggatcttgctgtccgtggtctctacaggatgagtgctttgtttcatcatttggcaacatcagtcacatctggtctggtcgatgatgatataattatagttcttcttggaatattctggccacttcttgaaagtcttttccgatcatctcatatggagaatgtgcatttatctgcagctatatgccgttctctttcttctgctatacattcttgcggacaccactttcatattttattacctaaagttatggagtgcttatctgcaaatttcttgctatttcaaaggcacgactgcttcttgaggacagctgccaatgttattgaagagtttggccacaaagaagaatatggggctttatgtgttaggacttttgaaattcttagctctgcatcttcaatatcagctctgaattcttcttatacctgtgatcaagaacctgacctagttgaagcatatacctactttacatctatgtttattcgctgctgtccaaaggaagccattgtggcatctagctccctgattgagttatcatttcaaaaggcagctatatgctctacagcaatgcaccgaggagctgcacttgcagcaatgtcatatatgtcgtgttttcttgagactgcccttgctgctgtgctagaatctcctgagtgcatccctaacgggtcacctggtgtggccctaatccaaatcttggcacgctgtggtgaaggtctattatctaatgtgctttatgctttacttggtgtatcagccttgtcaagggtccataaatctgccacaatattgcaacaactggcggcattgtgcagtttcagtgagggaacgacatggaaggctatccttagttggaattctctttgtgggtggctacaatcgacggtgaaatctttgccttctgagtatctaaagcaaggggaggctgaaataatagttccatcgtggctcaaggtgcttcaggatgcaggctcagactatcttcacagcaggactggtgataatataagaagccatcaaggttacatgcaagggaagggtggtagaactcttaaacgtataatcagagatttcgcagaaagccaccggaatgttccaatccccagtcctacatgatatggatgtgtcacgagtcttgcactctttactgatttgaggatgtccagtccctccagtagcttggagtctgactctagagagggggtccttgtggaactgatgtccgtcccgtctctgctggcatgctacatgttggttccatctatagttcagcaagaggaagaggctatttgattgttccggacatctggttcggacttggagagtcttctctgtatagcaaggaagtcgcaccattgttctgctgactaattgggggttgaatgcaaagtctgaagccgcatgtcatggttcgagatccaattttgttttgatagacatactgtgaaattcattgtgccggtaagctatatgaagacaaaatggggggatggaatgcaacctgtacataccattctttgctggttggggcaggcgatgtacgaacattcatatgcagcagtgttactgctcgaatctggagttaaacatgggcagtaatgctaggcatttatcaaacttctatcatgtcagtcgaaactttgaacaagtgtacataatcaaatatattatcagatatcataattttatgg

SEQ ID NO: 207317 - DNA, 2921 bp, Zea Mays
atggtagcagcagtgagggtcgacgccaggggctggtacaccggtcctggtatggttgtccctggcgtcgtcagccatgcaactggtgatgaagatggcgcaacacaactggaattacctgaggcctttctgagtaagacaccttatataagggaggctcttcttctaccagctttagccaacagaaatgagaaaattattgctggtcttgcctgtttgatgtgtgaagttggccaggcggcacctgctttggttgcagaagggggtagccaagcacttgctctcaccgatggacttttgagatgtgtagcttttaccagtgaagattgggaaattgcagagtcaaccctgcaattttggtgtagtttggcacatttcattcttggtattgatgtgaagtcagccaaaagaaatgtggtacaagagttgtttgtgcctgtgttttcttcgctgctggatgctcttttatttcgtgctcagatggacactgatgagcatggttctgatggagcaccttgtatacctgagagactaacacagttcaggatgaatttggaggagctcctcgttgatatttgtttgcttctgggtgcccctgcatatataaacaggctcttttctggtggatgggacttttcaagccaaacaattccttggaaggaggtagaagttagaatgtatgcactcagcatggttgctgacacgattttacaagatgaaggctcctttgatttttcaatcataatgcattttgtgaacattttgtccagtagaacacctgttgaactgaatggaaatttgtttttggtgtataaatcgttcggtgatgtcgttggctcgtactcaaagtggttatcgtcttctcaatgtaacattaagcccttactcctattttgcgcgtcaggaatttcaaaatccgtatcatcaaatgcttgctccttagcattgcgcaaactttgtgaggatgctccttcattcatccatgaaccacagaaccttgaaattcttttctggattggtgagggcatgaataaagggaacctgcagctagaggatgaggaagagataattagtgcaatcacacatgctttaagttctataagtgaaaaagagttgaagaaaagttcactggccaggttactttgttccagttactctgcagtggaaaagattattgacattgatagagatcaattgctaaggcaaaatccagctgcttatacgcaatcattggatcttgctgtccgtggtctctacaggatgagtgctttgtttcatcatttggcaacatcagtcacatctggtctggtcgatgatgatataattatagttcttcttggaatattctggccacttcttgaaagtcttttccgatcatctcatatggagaatgtgcatttatctgcagctatatgccgttctctttcttctgctatacattcttgcggacaccactttcatattttattacctaaagttatggagtgcttatctgcaaatttcttgctatttcaaaggcacgactgcttcttgaggacagctgccaatgttattgaagagtttggccacaaagaagaatatggggctttatgtgttaggacttttgaaattcttagctctgcatcttcaatatcagctctgaattcttcttatacctgtgatcaagaacctgacctagttgaagcatatacctactttacatctatgtttattcgctgctgtccaaaggaagccattgtggcatctagctccctgattgagttatcatttcaaaaggcagctatatgctctacagcaatgcaccgaggagctgcacttgcagcaatgtcatatatgtcgtgttttcttgagactgcccttgctgctgtgctagaatctcctgagtgcatccctaacgggtcacctggtgtggccctaatccaaatcttggcacgctgtggtgaaggtctattatctaatgtgctttatgctttacttggtgtatcagccttgtcaagggtccataaatctgccacaatattgcaacaactggcggcattgtgcagtttcagtgagggaacgacatggaaggctatccttagttggaattctctttgtgggtggctacaatcgacggtgaaatctttgccttctgagtatctaaagcaaggggaggctgaaataatagttccatcgtggctcaaggtgcttcaggatgcaggctcagactatcttcacagcaggactggtgataatataagaagccatcaaggttacatgcaagggaagggtggtagaactcttaaacgtataatcagagatttcgcagaaagccaccggaatgttccaatccccagtcctacatgatatggatgtgtcacgagtcttgcactctttactgatttgaggatgtccagtccctccagtagcttggagtctgactctagagagggggtccttgtggaactgatgtccgtcccgtctctgctggcatgctacatgttggttccatctatagttcagcaagaggaagaggctatttgattgttccggacatctggttcggacttggagagtcttctctgtatagcaaggaagtcgcaccattgttctgctgactaattgggggttgaatgcaaagtctgaagccgcatgtcatggttcgagatccaattttgttttgatagacatactgtgaaattcattgtgccggtaagctatatgaagacaaaatggggggatggaatgcaacctgtacataccattctttgctggttggggcaggcgatgtacgaacattcatatgcagcagtgttactgctcgaatctggagttaaacatgggcagtaatgctaggcatttatcaaacttctatcatgtcagtcgaaactttgaacaagtgtacataatcaaatatattatcagatatcataattttatgg

SEQ ID NO: 207318 - DNA, 6233 bp, Zea Mays
cttctcgagtcaatcaccacgctagtcgtcgcctttctcccaccgctcggcaattccccgccagtgccctctcgaatcaatcaccacgctcccctgcgacgacgtcctctttgagcacatcctctgccacctctcctccccatccaatacctcacgcatcgtcaccctcgacgacctcaagaccggcaccctaccctgctgctgcgttcctgccatcggcgactcgctcccgcttctccacgacatctccgtcgacaagggcgagcgcgccacccttctcgctggagccagccaccaacgtcgccatcccatttctgcaattttttgggtggctaggagggggtgttgcttcttagtatcttgtcaggtccgtcctggttttccagttcatatcctcgtctctctctggccgtctcctcacctcacggatcaacaggcggacatagcagccgtcctcgttctgcctcaggttgattccttgttacatctcccatctgcatgcagttccgcaatgtcataggatgcctacatcaacaccaagcaagcaagcagctagctagcgtggttagttatatcttcaaatcagtctacagggatggatctagtgacaggtccgctagccattctcccgtccaagctgcaggagctactccaaatccaagatgagtataggctccagaaggaagtgaggggcagagtggagatgatctgccgggagctgcaaagtatgcacgctgccctccgtaaggtggctgatgtgccgcgggatcagatcgacctccagaccaaggtgtggagacgcgatgtcagagaggcatcctatgacattgaggatgccatcgacacctttctcatgcgcatcagagaccgcgcgccaagtgacccaaacaggtttcgacttgccatgaagaagatgaccaagctgtcaagaaaggttaaggctatccatgaaattggtgctgccatcggagacatcgtgaggaaaatccaggagttggtggaccggcgtgtcaggtacaaacttgatgttgctgcagacaggtcaatcagcatggttagtgttgatcctcgccttgcagctttgtacaaagaagcgacacaactcattggcatcgaccaatcaatgtctgaaataatatccatgctgctctcggatgagtcgggccagcaacacattaagaagatttctattgtcggagctggaggactaggcaagaccacccttgctaaagaaacatatgaaaggcttagaagtgaatacgagtttgcaacttttgtttcagttggccaaaatcctgacttggtgagagttttcaagaacatcctcgttaagcttgacatataccagcaagtggacactatcaacagaacagatacgcgagcgctcatcgatgaaatcagacagcgccttagctatgtgaggtatctcattgttatcgatgatgtatgggatctggagtcttggcatacactagaattggcatttgttgaaaataacaatgggagtggaataatcataactactcgtaattttgctgttgccacaatagctggtcgtgtttacaagttaaggccactttcgtaccatcactccaaagaattattctacagatcgttatttggtgaaggagtatgccttgatgatcaaataatcaataaggcatcagataaatttctaaagaaatgtgatggtataccgttagctctcatcacaatggctagtttgttcatgggaaaaccaacacaaatgtggtctgagctagccaataatgcttttggacataaaggtcgtaacagtcatttagaagaaacgactatgaggatattatcacttagctactctgatttgccattgaatttgaggacttgctttgtatatttgagtagatatccagatgattatgttattaataaaagttctttgatatggaaatggatagctgaaggttttatccaagaggagcaaggaaaacagttatttgagctcggggaagaattcttcaacgagctcgtaagtagaagcattatacaagtggtccaatcaaaatttgataacacagtgcaaggctttcgtattcatagtatggttcttggtcttattcgcctgttgtcatccgaagaaaactttgtttctgtattggacgaagaagggcaaatatctatatcaggcaaacttcgtcggttagccatccataacagaaaagaagagcacaaccttggagacaatatggacctcctcccatggttgaggtcgtttactgcaattgaatgtcctatatacatgatacctccggttttcatcttcaaattgttacgtgttctggatttagagagttgtgggtctatggaaggttatgatctcaagcagcttggaaatttacataatctcaggtttatcggtctatgtaatacatatgtccggacgctcccacaggaattagggcatctaaagtttctgcagacgcttgaattgaaaggaagtggcgttgaagaactaccttcgagtatgggtgagcttgcagggttaatgtgcctcaacgctgactggacaacaagagtgcccaagtggattgggatgcttacttccctgcaacagttggtgatgtacccttgtggtggctactcggcaaggtggtttgtcaaggggctgggacacctgagggaactaaggatgctccgtttgttgataaaagcagatgacgagaagcagcttgcacaattgctggagtctgttttaaaactgcccaagatcgaggctttacatcttgattactatggcggcgtacagttaaacaggcttgttaagttggaacctagtgattttgcctgcagtggacgtcttcgttccttagaattgcagttgttggaattctcaaggctgcctgtgtggcttaatgcttactatcttccacagatccgtgacttgtcgctgttgatgtttgatgtggataaacaggatctgaaaaaccttggggacttcaaggagctccgtcatctccatctgctaattgttaacactgaacgcagagatgctattacttgtgccagtggtggattccggaatttgagattcttcagtatcactaaaccattcaagtttcaacagggagatctgcctaggcttgaaatccttgattttcatttcaatgtgccactccaaagtggtgccaatagtggcctggattttgacttcggtttggaaaatatcccttcgcttcagcaagtcattgttcaaatcaactgtctagatgcctttcctcttccagaggaggtggagacagccctaaggcacgcaatcggcgtccatcccaaccgtcccatcgttgacatcagtttgcctcgacgaaaattagacaaggcagacaacgacggggccgaagggcgtagtaagttggctcattattcaaaatcattatcatcggcacatgataagccaatggatgagctaataaagaggttatatgtggtggacaatgaggcctacgataaaaagatgaagattgtgcctattgttagatctgaagggctggggaaaactactcttgcccaaaaagtatttgacaagcttagtccacattttgactgtgcagcatttgttctggtaggccaaaatccggacatgaggaaagttttcactgacattctcataggtctagacaaccaaaagtaccaagatttccctatgactatattggatataattgagctgattgggttagtccgtaaatcgctcataaacaaaagctgcgcctcggattaaaacagagctatctatcatccacattgcacagccttctctcaagcttcgtaacttaatgaatcgtcactattgaacaatgcaatcctcctccagcctgcataagataaataagcgacacacgttcaggttctttgttgtagttgacgatgtatgggatttgaaagcatgggacataataaagtctgcattgatcgaaaacactaatggcagtgcagttctaacaacgacaagtcgtcagatctgggaacatgagaactggaggccatctggggatgacaagtcggattctgacgcagagcagttagagcctcatttggacgtcacaacccccgcggatgtcctcccagcgtcttccccgagcaagagcaaggtggtggcccatgtggaactccgccacgacgacccagattcctctgcatttggaatcccgcaagtagcaggggatactcaacctgagctccgccttttccccgaggcggatgcggatcttaaagggttcttctacgaaaacctatttggatcggaagacaagtgccctgatgatctgaaagatatatgtaaagatctcatacaaatatctgctggtgtcctatcagatgcctatgagaccgtggaagagctcagaggtattacctacgacactggaaagctggcagcctgtgtatcagagaagaaaattcgagctctcttatcccaaactacctggccatctaaaggattgcttaagatattttagtatgtttccaaaaggttacgagatcagtgcagaacgcttagtttgggcgtggatagctcaaggtttcgtaaaggagactcagggacagaatgatttggagaaagtcggaaagaagtaccttattgaccttataagcagaaagatgatcgaagcagtggaggttcatgctgatggtatggccctctcatgccgtgcgtacgatttgttgcatggcttgatcgtttcattgtcaacagaagaaaaattcgttgaaattctaaatgactcgcagtcgcaggagagagcttcgaatccgaatacagaagttcaccggctgtccatccaaatccagagaaataatatgctacaccccctgccaaaagcttggatgaaacaagtgcagtcacttgttgtctcgtctgataccgtgccagacctctcagattttcagggtcttcatgccatggacttaggaggctgcgattcattgcaggttgatcatctcaagggtataagtaaaacaacatctttgatatatctggccataggaggaaaatatatcgctgacgtcccgaaagaagtttcttggctcaaaaagctgcggacattggatttaactgcaagtggtctgagtgaattgccacgatgtattttaacgctaactaatttggagcggctatttgttaatagccatatgaagattcctggtaagatctcaaaaatgtcaggtttacaagaactgggcgacatcaatattgttaagccagagttacttaaaaggctccgtaaattaagtaagttaagggttctcagaattgccatgtggtcttgggatgagggttctaagagctctgttaaactatggtgggagaccctgcactcattaatcgggtcctgcaaaaaaattgagagtctctgcatactgaccttctgctcccttgatttcatggatggttccggtgatgataataaatggccgcctcaaactctcaaaaacctcgagataagtcacagcgcatttctggataagctcccaagttggtttgactcactttccaccatctcctcgttgacaatcgaggtcaacaagttatcaaagaacatcactgacactctggcaaagctgtctgctctaagatccctttccctgacatccatagaaaagccagaaccagaagtacgctttgtcatcggctctgctggtagattcgagaatctagaaagcttaaagtttgtgtgtaatgaaatggtaaatttgcttgaaagaccggaatcgaatgctacccaacagttaacagggcttactatcgtgtttcatgcttcacgaacagaacgcagccgaaacaaagatttcaggtttggtttggacaaactgctgtccctacagcacgttcgtgttgaaataaactgttccaatgcgacgcagcggacggtgaaaaatgcagaagctgcaattggggaagaaatatcaaaaatacgcagggatgacgggagtcagccaatcctggaaatacgaagactccaggaagaaagtatgatagcagggaaggaccaaacccaggatgctaataagacaccgtcttcttcgtctactatggaaactacattgcgagcccaacctattggggaatcattaatgcctagtgttgagactgtttcttccaaggtcttcgtctctcagaacagctccaacgacacattttttaataatgtaggtatcctcacaagctccacgaaaataaagacattgaaagagag

SEQ ID NO: 207319 - DNA, 6652 bp, Zea Mays
ctcgagtcaatcaccacgctagtcgtcgcctttctcccaccgctcggcaattccccgccagtgccctctcgaatcaatcaccacgctcccctgcgacgacgtcctctttgagcacatcctctgccacctctcctccccatccaatacctcacgcatcgtcaccctcgacgacctcaagaccggcaccctaccctgctgctgcgttcctgccatcggcgactcgctcccgcttctccacgacatctccgtcgacaagggcgagcgcgccacccttctcgctggagccagccaccaacgtcgccatcccagttgagtacctaccctgtattgacgcgcagattgtcgcccccgtggcagggaaaagggtcgccgctgatctagactaatcaagtcaggcggacgtctcctgcctccccactgcactaatcaagtcatagcaggttagcagccccaaaaattcccagagacatcgatattctcttagttgaaggtgcagggggtataaagccgacgagaagaataccaaaaagggcagaagatctcaggtttcgcgaagcaatactgaaggccgatttctagcttctttttgcaatatgctttattgggattggatctggaatcattgttgttaataatctagcacaaatatgaattgttggagttgttgccgatagaaccactgaggcactgactctctatctacagtttctgcaattttttgggtggctaggagggggtgttgcttcttagtatcttgtcaggtccgtcctggttttccagttcatatcctcgtctctctctggccgtctcctcacctcacggatcaacaggcggacatagcagccgtcctcgttctgcctcaggtccttgtctttcaaacttgttgattccttgttacatctcccatctgcatgcagttccgcaatgtcataggatgcctacatcaacaccaagcaagcaagcagctagctagcgtggttagttatatcttcaaatcagtctacagggatggatctagtgacaggtccgctagccattctcccgtccaagctgcaggagctactccaaatccaagatgagtataggctccagaaggaagtgaggggcagagtggagatgatctgccgggagctgcaaagtatgcacgctgccctccgtaaggtggctgatgtgccgcgggatcagatcgacctccagaccaaggtgtggagacgcgatgtcagagaggcatcctatgacattgaggatgccatcgacacctttctcatgcgcatcagagaccgcgcgccaagtgacccaaacaggtttcgacttgccatgaagaagatgaccaagctgtcaagaaaggttaaggctatccatgaaattggtgctgccatcggagacatcgtgaggaaaatccaggagttggtggaccggcgtgtcaggtacaaacttgatgttgctgcagacaggtcaatcagcatggttagtgttgatcctcgccttgcagctttgtacaaagaagcgacacaactcattggcatcgaccaatcaatgtctgaaataatatccatgctgctctcggatgagtcgggccagcaacacattaagaagatttctattgtcggagctggaggactaggcaagaccacccttgctaaagaaacatatgaaaggcttagaagtgaatacgagtttgcaacttttgtttcagttggccaaaatcctgacttggtgagagttttcaagaacatcctcgttaagcttgacatataccagcaagtggacactatcaacagaacagatacgcgagcgctcatcgatgaaatcagacagcgccttagctatgtgaggtgcaggtatctcattgttatcgatgatgtatgggatctggagtcttggcatacactagaattggcatttgttgaaaataacaatgggagtggaataatcataactactcgtaattttgctgttgccacaatagctggtcgtgtttacaagttaaggccactttcgtaccatcactccaaagaattattctacagatcgttatttggtgaaggagtatgccttgatgatcaaataatcaataaggcatcagataaatttctaaagaaatgtgatggtataccgttagctctcatcacaatggctagtttgttcatgggaaaaccaacacaaatgtggtctgagctagccaataatgcttttggacataaaggtcgtaacagtcatttagaagaaacgactatgaggatattatcacttagctactctgatttgccattgaatttgaggacttgctttgtatatttgagtagatatccagatgattatgttattaataaaagttctttgatatggaaatggatagctgaaggttttatccaagaggagcaaggaaaacagttatttgagctcggggaagaattcttcaacgagctcgtaagtagaagcattatacaagtggtccaatcaaaatttgataacacagtgcaaggctttcgtattcatagtatggttcttggtcttattcgcctgttgtcatccgaagaaaactttgtttctgtattggacgaagaagggcaaatatctatatcaggcaaacttcgtcggttagccatccataacagaaaagaagagcacaaccttggagacaatatggacctcctcccatggttgaggtcgtttactgcaattgaatgtcctatatacatgatacctccggttttcatcttcaaattgttacgtgttctggatttagagagttgtgggtctatggaaggttatgatctcaagcagcttggaaatttacataatctcaggtttatcggtctatgtaatacatatgtccggacgctcccacaggaattagggcatctaaagtttctgcagacgcttgaattgaaaggaagtggcgttgaagaactaccttcgagtatgggtgagcttgcagggttaatgtgcctcaacgctgactggacaacaagagtgcccaagtggattgggatgcttacttccctgcaacagttggtgatgtacccttgtggtggctactcggcaaggtggtttgtcaaggggctgggacacctgagggaactaaggatgctccgtttgttgataaaagcagatgacgagaagcagcttgcacaattgctggagtctgttttaaaactgcccaagatcgaggctttacatcttgattactatggcggcgtacagttaaacaggcttgttaagttggaacctagtgattttgcctgcagtggacgtcttcgttccttagaattgcagttgttggaattctcaaggctgcctgtgtggcttaatgcttactatcttccacagatccgtgacttgtcgctgttgatgtttgatgtggataaacaggatctgaaaaaccttggggacttcaaggagctccgtcatctccatctgctaattgttaacactgaacgcagagatgctattacttgtgccagtggtggattccggaatttgagattcttcagtatcactaaaccattcaagtttcaacagggagatctgcctaggcttgaaatccttgattttcatttcaatgtgccactccaaagtggtgccaatagtggcctggattttgacttcggtttggaaaatatcccttcgcttcagcaagtcattgttcaaatcaactgtctagatgcctttcctcttccagaggaggtggagacagccctaaggcacgcaatcggcgtccatcccaaccgtcccatcgttgacatcagtttgcctcgacgaaaattagacaaggcagacaacgacggggccgaagggcgtagtaagttggctcattattcaaaatcattatcatcggcacatgataagccaatggatgagctaataaagaggttatatgtggtggacaatgaggcctacgataaaaagatgaagattgtgcctattgttagatctgaagggctggggaaaactactcttgcccaaaaagtatttgacaagcttagtccacattttgactgtgcagcatttgttctggtaggccaaaatccggacatgaggaaagttttcactgacattctcataggtctagacaaccaaaagtaccaagatttccctatgactatattggatataattgagctgattgggttagtccgtaaatcgctcataaacaaaagctgcgcctcggattaaaacagagctatctatcatccacattgcacagccttctctcaagcttcgtaacttaatgaatcgtcactattgaacaatgcaatcctcctccagcctgcataagataaataagcgacacacgttcaggttctttgttgtagttgacgatgtatgggatttgaaagcatgggacataataaagtctgcattgatcgaaaacactaatggcagtgcagttctaacaacgacaagtcgtcagatctgggaacatgagaactggaggccatctggggatgacaagtcggattctgacgcagagcagttagagcctcatttggacgtcacaacccccgcggatgtcctcccagcgtcttccccgagcaagagcaaggtggtggcccatgtggaactccgccacgacgacccagattcctctgcatttggaatcccgcaagtagcaggggatactcaacctgagctccgccttttccccgaggcggatgcggatcttaaagggttcttctacgaaaacctatttggatcggaagacaagtgccctgatgatctgaaagatatatgtaaagatctcatacaaatatctgctggtgtcctatcagatgcctatgagaccgtggaagagctcagaggtattacctacgacactggaaagctggcagcctgtgtatcagagaagaaaattcgagctctcttatcccaaactacctggccatctaaaggattgcttaagatattttagtatgtttccaaaaggttacgagatcagtgcagaacgcttagtttgggcgtggatagctcaaggtttcgtaaaggagactcagggacagaatgatttggagaaagtcggaaagaagtaccttattgaccttataagcagaaagatgatcgaagcagtggaggttcatgctgatggtatggccctctcatgccgtgcgtacgatttgttgcatggcttgatcgtttcattgtcaacagaagaaaaattcgttgaaattctaaatgactcgcagtcgcaggagagagcttcgaatccgaatacagaagttcaccggctgtccatccaaatccagagaaataatatgctacaccccctgccaaaagcttggatgaaacaagtgcagtcacttgttgtctcgtctgataccgtgccagacctctcagattttcagggtcttcatgccatggacttaggaggctgcgattcattgcaggttgatcatctcaagggtataagtaaaacaacatctttgatatatctggccataggaggaaaatatatcgctgacgtcccgaaagaagtttcttggctcaaaaagctgcggacattggatttaactgcaagtggtctgagtgaattgccacgatgtattttaacgctaactaatttggagcggctatttgttaatagccatatgaagattcctggtaagatctcaaaaatgtcaggtttacaagaactgggcgacatcaatattgttaagccagagttacttaaaaggctccgtaaattaagtaagttaagggttctcagaattgccatgtggtcttgggatgagggttctaagagctctgttaaactatggtgggagaccctgcactcattaatcgggtcctgcaaaaaaattgagagtctctgcatactgaccttctgctcccttgatttcatggatggttccggtgatgataataaatggccgcctcaaactctcaaaaacctcgagataagtcacagcgcatttctggataagctcccaagttggtttgactcactttccaccatctcctcgttgacaatcgaggtcaacaagttatcaaagaacatcactgacactctggcaaagctgtctgctctaagatccctttccctgacatccatagaaaagccagaaccagaagtacgctttgtcatcggctctgctggtagattcgagaatctagaaagcttaaagtttgtgtgtaatgaaatggtaaatttgcttgaaagaccggaatcgaatgctacccaacagttaacagggcttactatcgtgtttcatgcttcacgaacagaacgcagccgaaacaaagatttcaggtttggtttggacaaactgctgtccctacagcacgttcgtgttgaaataaactgttccaatgcgacgcagcggacggtgaaaaatgcagaagctgcaattggggaagaaatatcaaaaatacgcagggatgacgggagtcagccaatcctggaaatacgaagactccaggaagaaagtatgatagcagggaaggaccaaacccaggatgctaataagacaccgtcttcttcgtctactatggaaactacattgcgagcccaacctattggggaatcattaatgcctagtgttgagactgtttcttccaaggtcttcgtctctcagaacagctccaacgacacattttttaataatgtaggtatcctcacaagctccacgaaaataaagacattgaaagagag

SEQ ID NO: 207320 - DNA, 6362 bp, Zea Mays
cgagtcaatcaccacgctagtcgtcgcctttctcccaccgctcggcaattccccgccagtgccctctcgaatcaatcaccacgctcccctgcgacgacgtcctctttgagcacatcctctgccacctctcctccccatccaatacctcacgcatcgtcaccctcgacgacctcaagaccggcaccctaccctgctgctgcgttcctgccatcggcgactcgctcccgcttctccacgacatctccgtcgacaagggcgagcgcgccacccttctcgctggagccagccaccaacgtcgccatcccagttgagtacctaccctgtattgacgcgcagattgtcgcccccgtggcagggaaaagggtcgccgctgatctagactaatcaagtcaggcggacgtctcctgcctccccactgcactaatcaagtcatagcaggttagcagccccaaaaattcccagagacatcgatattctcttagttgaaggtgcagggggtataaagccgacgagaagaataccaaaaagggcagaagatctcaggtttcgcgaagcaatactgaaggccgatttctagcttctttttgcaatatgctttattgggattggatctggaatcattgttgttaataatctagcacaaatatgaattgttggagttgttgccgatagaaccactgaggcactgactctctatctacagtttctgcaattttttgggtggctaggagggggtgttgcttcttagtatcttgtcaggtccgtcctggttttccagttcatatcctcgtctctctctggccgtctcctcacctcacggatcaacaggcggacatagcagccgtcctcgttctgcctcaggttgattccttgttacatctcccatctgcatgcagttccgcaatgtcataggatgcctacatcaacaccaagcaagcaagcagctagctagcgtggttagttatatcttcaaatcagtctacagggatggatctagtgacaggtccgctagccattctcccgtccaagctgcaggagctactccaaatccaagatgagtataggctccagaaggaagtgaggggcagagtggagatgatctgccgggagctgcaaagtatgcacgctgccctccgtaaggtggctgatgtgccgcgggatcagatcgacctccagaccaaggtgtggagacgcgatgtcagagaggcatcctatgacattgaggatgccatcgacacctttctcatgcgcatcagagaccgcgcgccaagtgacccaaacaggtttcgacttgccatgaagaagatgaccaagctgtcaagaaaggttaaggctatccatgaaattggtgctgccatcggagacatcgtgaggaaaatccaggagttggtggaccggcgtgtcaggtacaaacttgatgttgctgcagacaggtcaatcagcatggttagtgttgatcctcgccttgcagctttgtacaaagaagcgacacaactcattggcatcgaccaatcaatgtctgaaataatatccatgctgctctcggatgagtcgggccagcaacacattaagaagatttctattgtcggagctggaggactaggcaagaccacccttgctaaagaaacatatgaaaggcttagaagtgaatacgagtttgcaacttttgtttcagttggccaaaatcctgacttggtgagagttttcaagaacatcctcgttaagcttgacatataccagcaagtggacactatcaacagaacagatacgcgagcgctcatcgatgaaatcagacagcgccttagctatgtgaggtgcaggtatctcattgttatcgatgatgtatgggatctggagtcttggcatacactagaattggcatttgttgaaaataacaatgggagtggaataatcataactactcgtaattttgctgttgccacaatagctggtcgtgtttacaagttaaggccactttcgtaccatcactccaaagaattattctacagatcgttatttggtgaaggagtatgccttgatgatcaaataatcaataaggcatcagataaatttctaaagaaatgtgatggtataccgttagctctcatcacaatggctagtttgttcatgggaaaaccaacacaaatgtggtctgagctagccaataatgcttttggacataaaggtcgtaacagtcatttagaagaaacgactatgaggatattatcacttagctactctgatttgccattgaatttgaggacttgctttgtatatttgagtagatatccagatgattatgttattaataaaagttctttgatatggaaatggatagctgaaggttttatccaagaggagcaaggaaaacagttatttgagctcggggaagaattcttcaacgagctcgtaagtagaagcattatacaagtggtccaatcaaaatttgataacacagtgcaaggctttcgtattcatagtatggttcttggtcttattcgcctgttgtcatccgaagaaaactttgtttctgtattggacgaagaagggcaaatatctatatcaggcaaacttcgtcggttagccatccataacagaaaagaagagcacaaccttggagacaatatggacctcctcccatggttgaggtcgtttactgcaattgaatgtcctatatacatgatacctccggttttcatcttcaaattgttacgtgttctggatttagagagttgtgggtctatggaaggttatgatctcaagcagcttggaaatttacataatctcaggtttatcggtctatgtaatacatatgtccggacgctcccacaggaattagggcatctaaagtttctgcagacgcttgaattgaaaggaagtggcgttgaagaactaccttcgagtatgggtgagcttgcagggttaatgtgcctcaacgctgactggacaacaagagtgcccaagtggattgggatgcttacttccctgcaacagttggtgatgtacccttgtggtggctactcggcaaggtggtttgtcaaggggctgggacacctgagggaactaaggatgctccgtttgttgataaaagcagatgacgagaagcagcttgcacaattgctggagtctgttttaaaactgcccaagatcgaggctttacatcttgattactatggcggcgtacagttaaacaggcttgttaagttggaacctagtgattttgcctgcagtggacgtcttcgttccttagaattgcagttgttggaattctcaaggctgcctgtgtggcttaatgcttactatcttccacagatccgtgacttgtcgctgttgatgtttgatgtggataaacaggatctgaaaaaccttggggacttcaaggagctccgtcatctccatctgctaattgttaacactgaacgcagagatgctattacttgtgccagtggtggattccggaatttgagattcttcagtatcactaaaccattcaagtttcaacagggagatctgcctaggcttgaaatccttgattttcatttcaatgtgccactccaaagtggtgccaatagtggcctggattttgacttcggtttggaaaatatcccttcgcttcagcaagtcattgttcaaatcaactgtctagatgcctttcctcttccagaggaggtggagacagccctaaggcacgcaatcggcgtccatcccaaccgtcccatcgttgacatcagtttgcctcgacgaaaattagacaaggcagacaacgacggggccgaagggcgtagtaagttggctcattattcaaaatcattatcatcggcacatgataagccaatggatgagctaataaagaggttatatgtggtggacaatgaggcctacgataaaaagatgaagattgtgcctattgttagatctgaagggctggggaaaactactcttgcccaaaaagtatttgacaagcttagtccacattttgactgtgcagcatttgttctggtaggccaaaatccggacatgaggaaagttttcactgacattctcataggtctagacaaccaaaagtaccaagatttccctatgactatattggatataattgagctgattgggttagtccgtaaatcgctcataaacaaaaggttctttgttgtagttgacgatgtatgggatttgaaagcatgggacataataaagtctgcattgatcgaaaacactaatggcagtgcagttctaacaacgacaagtcgtcagatctgggaacatgagaactggaggccatctggggatgacaagtcggattctgacgcagagcagttagagcctcatttggacgtcacaacccccgcggatgtcctcccagcgtcttccccgagcaagagcaaggtggtggcccatgtggaactccgccacgacgacccagattcctctgcatttggaatcccgcaagtagcaggggatactcaacctgagctccgccttttccccgaggcggatgcggatcttaaagggttcttctacgaaaacctatttggatcggaagacaagtgccctgatgatctgaaagatatatgtaaagatctcatacaaatatctgctggtgtcctatcagatgcctatgagaccgtggaagagctcagaggtattacctacgacactggaaagctggcagcctgtgtatcagagaagaaaattcgagctctcttatcccaaactacctggccatctaaaggattgcttaagatattttagtatgtttccaaaaggttacgagatcagtgcagaacgcttagtttgggcgtggatagctcaaggtttcgtaaaggagactcagggacagaatgatttggagaaagtcggaaagaagtaccttattgaccttataagcagaaagatgatcgaagcagtggaggttcatgctgatggtatggccctctcatgccgtgcgtacgatttgttgcatggcttgatcgtttcattgtcaacagaagaaaaattcgttgaaattctaaatgactcgcagtcgcaggagagagcttcgaatccgaatacagaagttcaccggctgtccatccaaatccagagaaataatatgctacaccccctgccaaaagcttggatgaaacaagtgcagtcacttgttgtctcgtctgataccgtgccagacctctcagattttcagggtcttcatgccatggacttaggaggctgcgattcattgcaggttgatcatctcaagggtataagtaaaacaacatctttgatatatctggccataggaggaaaatatatcgctgacgtcccgaaagaagtttcttggctcaaaaagctgcggacattggatttaactgcaagtggtctgagtgaattgccacgatgtattttaacgctaactaatttggagcggctatttgttaatagccatatgaagattcctggtaagatctcaaaaatgtcaggtttacaagaactgggcgacatcaatattgttaagccagagttacttaaaaggctccgtaaattaagtaagttaagggttctcagaattgccatgtggtcttgggatgagggttctaagagctctgttaaactatggtgggagaccctgcactcattaatcgggtcctgcaaaaaaattgagagtctctgcatactgaccttctgctcccttgatttcatggatggttccggtgatgataataaatggccgcctcaaactctcaaaaacctcgagataagtcacagcgcatttctggataagctcccaagttggtttgactcactttccaccatctcctcgttgacaatcgaggtcaacaagttatcaaagaacatcactgacactctggcaaagctgtctgctctaagatccctttccctgacatccatagaaaagccagaaccagaagtacgctttgtcatcggctctgctggtagattcgagaatctagaaagcttaaagtttgtgtgtaatgaaatggtaaatttgcttgaaagaccggaatcgaatgctacccaacagttaacagggcttactatcgtgtttcatgcttcacgaacagaacgcagccgaaacaaagatttcaggtttggtttggacaaactgctgtccctacagcacgttcgtgttgaaataaactgttccaatgcgacgcagcggacggtgaaaaatgcagaagctgcaattggggaagaaatatcaaaaatacgcagggatgacgggagtcagccaatcctggaaatacgaagactccaggaagaaagtatgatagcagggaaggaccaaacccaggatgctaataagacaccgtcttcttcggtatcctcacaagctccacgaaaataaagacattgaaagagag

SEQ ID NO: 207321 - DNA, 6376 bp, Zea Mays
cgagtcaatcaccacgctagtcgtcgcctttctcccaccgctcggcaattccccgccagtgccctctcgaatcaatcaccacgctcccctgcgacgacgtcctctttgagcacatcctctgccacctctcctccccatccaatacctcacgcatcgtcaccctcgacgacctcaagaccggcaccctaccctgctgctgcgttcctgccatcggcgactcgctcccgcttctccacgacatctccgtcgacaagggcgagcgcgccacccttctcgctggagccagccaccaacgtcgccatcccagttagcagccccaaaaattcccagagacatcgatattctcttagttgaaggtgcagggggtataaagccgacgagaagaataccaaaaagggcagaagatctcaggtttcgcgaagcaatactgaaggccgatttctagcttctttttgcaatatgctttattgggattggatctggaatcattgttgttaataatctagcacaaatatgaattgttggagttgttgccgatagaaccactgaggcactgactctctatctacagtttctgcaattttttgggtggctaggagggggtgttgcttcttagtatcttgtcaggtccgtcctggttttccagttcatatcctcgtctctctctggccgtctcctcacctcacggatcaacaggcggacatagcagccgtcctcgttctgcctcaggtccttgtctttcaaacttgttgattccttgttacatctcccatctgcatgcagttccgcaatgtcataggatgcctacatcaacaccaagcaagcaagcagctagctagcgtggttagttatatcttcaaatcagtctacagggatggatctagtgacaggtccgctagccattctcccgtccaagctgcaggagctactccaaatccaagatgagtataggctccagaaggaagtgaggggcagagtggagatgatctgccgggagctgcaaagtatgcacgctgccctccgtaaggtggctgatgtgccgcgggatcagatcgacctccagaccaaggtgtggagacgcgatgtcagagaggcatcctatgacattgaggatgccatcgacacctttctcatgcgcatcagagaccgcgcgccaagtgacccaaacaggtttcgacttgccatgaagaagatgaccaagctgtcaagaaaggttaaggctatccatgaaattggtgctgccatcggagacatcgtgaggaaaatccaggagttggtggaccggcgtgtcaggtacaaacttgatgttgctgcagacaggtcaatcagcatggttagtgttgatcctcgccttgcagctttgtacaaagaagcgacacaactcattggcatcgaccaatcaatgtctgaaataatatccatgctgctctcggatgagtcgggccagcaacacattaagaagatttctattgtcggagctggaggactaggcaagaccacccttgctaaagaaacatatgaaaggcttagaagtgaatacgagtttgcaacttttgtttcagttggccaaaatcctgacttggtgagagttttcaagaacatcctcgttaagcttgacatataccagcaagtggacactatcaacagaacagatacgcgagcgctcatcgatgaaatcagacagcgccttagctatgtgaggtgcaggtatctcattgttatcgatgatgtatgggatctggagtcttggcatacactagaattggcatttgttgaaaataacaatgggagtggaataatcataactactcgtaattttgctgttgccacaatagctggtcgtgtttacaagttaaggccactttcgtaccatcactccaaagaattattctacagatcgttatttggtgaaggagtatgccttgatgatcaaataatcaataaggcatcagataaatttctaaagaaatgtgatggtataccgttagctctcatcacaatggctagtttgttcatgggaaaaccaacacaaatgtggtctgagctagccaataatgcttttggacataaaggtcgtaacagtcatttagaagaaacgactatgaggatattatcacttagctactctgatttgccattgaatttgaggacttgctttgtatatttgagtagatatccagatgattatgttattaataaaagttctttgatatggaaatggatagctgaaggttttatccaagaggagcaaggaaaacagttatttgagctcggggaagaattcttcaacgagctcgtaagtagaagcattatacaagtggtccaatcaaaatttgataacacagtgcaaggctttcgtattcatagtatggttcttggtcttattcgcctgttgtcatccgaagaaaactttgtttctgtattggacgaagaagggcaaatatctatatcaggcaaacttcgtcggttagccatccataacagaaaagaagagcacaaccttggagacaatatggacctcctcccatggttgaggtcgtttactgcaattgaatgtcctatatacatgatacctccggttttcatcttcaaattgttacgtgttctggatttagagagttgtgggtctatggaaggttatgatctcaagcagcttggaaatttacataatctcaggtttatcggtctatgtaatacatatgtccggacgctcccacaggaattagggcatctaaagtttctgcagacgcttgaattgaaaggaagtggcgttgaagaactaccttcgagtatgggtgagcttgcagggttaatgtgcctcaacgctgactggacaacaagagtgcccaagtggattgggatgcttacttccctgcaacagttggtgatgtacccttgtggtggctactcggcaaggtggtttgtcaaggggctgggacacctgagggaactaaggatgctccgtttgttgataaaagcagatgacgagaagcagcttgcacaattgctggagtctgttttaaaactgcccaagatcgaggctttacatcttgattactatggcggcgtacagttaaacaggcttgttaagttggaacctagtgattttgcctgcagtggacgtcttcgttccttagaattgcagttgttggaattctcaaggctgcctgtgtggcttaatgcttactatcttccacagatccgtgacttgtcgctgttgatgtttgatgtggataaacaggatctgaaaaaccttggggacttcaaggagctccgtcatctccatctgctaattgttaacactgaacgcagagatgctattacttgtgccagtggtggattccggaatttgagattcttcagtatcactaaaccattcaagtttcaacagggagatctgcctaggcttgaaatccttgattttcatttcaatgtgccactccaaagtggtgccaatagtggcctggattttgacttcggtttggaaaatatcccttcgcttcagcaagtcattgttcaaatcaactgtctagatgcctttcctcttccagaggaggtggagacagccctaaggcacgcaatcggcgtccatcccaaccgtcccatcgttgacatcagtttgcctcgacgaaaattagacaaggcagacaacgacggggccgaagggcgtagtaagttggctcattattcaaaatcattatcatcggcacatgataagccaatggatgagctaataaagaggttatatgtggtggacaatgaggcctacgataaaaagatgaagattgtgcctattgttagatctgaagggctggggaaaactactcttgcccaaaaagtatttgacaagcttagtccacattttgactgtgcagcatttgttctggtaggccaaaatccggacatgaggaaagttttcactgacattctcataggtctagacaaccaaaagtaccaagatttccctatgactatattggatataattgagctgattgggttagtccgtaaatcgctcataaacaaaaggttctttgttgtagttgacgatgtatgggatttgaaagcatgggacataataaagtctgcattgatcgaaaacactaatggcagtgcagttctaacaacgacaagtcgtcagatctgggaacatgagaactggaggccatctggggatgacaagtcggattctgacgcagagcagttagagcctcatttggacgtcacaacccccgcggatgtcctcccagcgtcttccccgagcaagagcaaggtggtggcccatgtggaactccgccacgacgacccagattcctctgcatttggaatcccgcaagtagcaggggatactcaacctgagctccgccttttccccgaggcggatgcggatcttaaagggttcttctacgaaaacctatttggatcggaagacaagtgccctgatgatctgaaagatatatgtaaagatctcatacaaatatctgctggtgtcctatcagatgcctatgagaccgtggaagagctcagaggtattacctacgacactggaaagctggcagcctgtgtatcagagaagaaaattcgagctctcttatcccaaactacctggccatctaaaggattgcttaagatattttagtatgtttccaaaaggttacgagatcagtgcagaacgcttagtttgggcgtggatagctcaaggtttcgtaaaggagactcagggacagaatgatttggagaaagtcggaaagaagtaccttattgaccttataagcagaaagatgatcgaagcagtggaggttcatgctgatggtatggccctctcatgccgtgcgtacgatttgttgcatggcttgatcgtttcattgtcaacagaagaaaaattcgttgaaattctaaatgactcgcagtcgcaggagagagcttcgaatccgaatacagaagttcaccggctgtccatccaaatccagagaaataatatgctacaccccctgccaaaagcttggatgaaacaagtgcagtcacttgttgtctcgtctgataccgtgccagacctctcagattttcagggtcttcatgccatggacttaggaggctgcgattcattgcaggttgatcatctcaagggtataagtaaaacaacatctttgatatatctggccataggaggaaaatatatcgctgacgtcccgaaagaagtttcttggctcaaaaagctgcggacattggatttaactgcaagtggtctgagtgaattgccacgatgtattttaacgctaactaatttggagcggctatttgttaatagccatatgaagattcctggtaagatctcaaaaatgtcaggtttacaagaactgggcgacatcaatattgttaagccagagttacttaaaaggctccgtaaattaagtaagttaagggttctcagaattgccatgtggtcttgggatgagggttctaagagctctgttaaactatggtgggagaccctgcactcattaatcgggtcctgcaaaaaaattgagagtctctgcatactgaccttctgctcccttgatttcatggatggttccggtgatgataataaatggccgcctcaaactctcaaaaacctcgagataagtcacagcgcatttctggataagctcccaagttggtttgactcactttccaccatctcctcgttgacaatcgaggtcaacaagttatcaaagaacatcactgacactctggcaaagctgtctgctctaagatccctttccctgacatccatagaaaagccagaaccagaagtacgctttgtcatcggctctgctggtagattcgagaatctagaaagcttaaagtttgtgtgtaatgaaatggtaaatttgcttgaaagaccggaatcgaatgctacccaacagttaacagggcttactatcgtgtttcatgcttcacgaacagaacgcagccgaaacaaagatttcaggtttggtttggacaaactgctgtccctacagcacgttcgtgttgaaataaactgttccaatgcgacgcagcggacggtgaaaaatgcagaagctgcaattggggaagaaatatcaaaaatacgcagggatgacgggagtcagccaatcctggaaatacgaagactccaggaagaaagtatgatagcagggaaggaccaaacccaggatgctaataagacaccgtcttcttcgtctactatggaaactacattgcgagcccaacctattggggaatcattaatgcctagtgttgagactgtttcttccaaggtcttcgtctctcagaacagctccaacgacacattttttaataatgtaggtatcctcacaagctccacgaaaataaagacattgaaagagag

SEQ ID NO: 207322 - DNA, 6625 bp, Zea Mays
cgagtcaatcaccacgctagtcgtcgcctttctcccaccgctcggcaattccccgccagtgccctctcgaatcaatcaccacgctcccctgcgacgacgtcctctttgagcacatcctctgccacctctcctccccatccaatacctcacgcatcgtcaccctcgacgacctcaagaccggcaccctaccctgctgctgcgttcctgccatcggcgactcgctcccgcttctccacgacatctccgtcgacaagggcgagcgcgccacccttctcgctggagccagccaccaacgtcgccatcccagttgagtacctaccctgtattgacgcgcagattgtcgcccccgtggcagggaaaagggtcgccgctgatctagactaatcaagtcaggcggacgtctcctgcctccccactgcactaatcaagtcatagcaggttagcagccccaaaaattcccagagacatcgatattctcttagttgaaggtgcagggggtataaagccgacgagaagaataccaaaaagggcagaagatctcaggtttcgcgaagcaatactgaaggccgatttctagcttctttttgcaatatgctttattgggattggatctggaatcattgttgttaataatctagcacaaatatgaattgttggagttgttgccgatagaaccactgaggcactgactctctatctacagtttctgcaattttttgggtggctaggagggggtgttgcttcttagtatcttgtcaggtccgtcctggttttccagttcatatcctcgtctctctctggccgtctcctcacctcacggatcaacaggcggacatagcagccgtcctcgttctgcctcaggttgattccttgttacatctcccatctgcatgcagttccgcaatgtcataggatgcctacatcaacaccaagcaagcaagcagctagctagcgtggttagttatatcttcaaatcagtctacagggatggatctagtgacaggtccgctagccattctcccgtccaagctgcaggagctactccaaatccaagatgagtataggctccagaaggaagtgaggggcagagtggagatgatctgccgggagctgcaaagtatgcacgctgccctccgtaaggtggctgatgtgccgcgggatcagatcgacctccagaccaaggtgtggagacgcgatgtcagagaggcatcctatgacattgaggatgccatcgacacctttctcatgcgcatcagagaccgcgcgccaagtgacccaaacaggtttcgacttgccatgaagaagatgaccaagctgtcaagaaaggttaaggctatccatgaaattggtgctgccatcggagacatcgtgaggaaaatccaggagttggtggaccggcgtgtcaggtacaaacttgatgttgctgcagacaggtcaatcagcatggttagtgttgatcctcgccttgcagctttgtacaaagaagcgacacaactcattggcatcgaccaatcaatgtctgaaataatatccatgctgctctcggatgagtcgggccagcaacacattaagaagatttctattgtcggagctggaggactaggcaagaccacccttgctaaagaaacatatgaaaggcttagaagtgaatacgagtttgcaacttttgtttcagttggccaaaatcctgacttggtgagagttttcaagaacatcctcgttaagcttgacatataccagcaagtggacactatcaacagaacagatacgcgagcgctcatcgatgaaatcagacagcgccttagctatgtgaggtatctcattgttatcgatgatgtatgggatctggagtcttggcatacactagaattggcatttgttgaaaataacaatgggagtggaataatcataactactcgtaattttgctgttgccacaatagctggtcgtgtttacaagttaaggccactttcgtaccatcactccaaagaattattctacagatcgttatttggtgaaggagtatgccttgatgatcaaataatcaataaggcatcagataaatttctaaagaaatgtgatggtataccgttagctctcatcacaatggctagtttgttcatgggaaaaccaacacaaatgtggtctgagctagccaataatgcttttggacataaaggtcgtaacagtcatttagaagaaacgactatgaggatattatcacttagctactctgatttgccattgaatttgaggacttgctttgtatatttgagtagatatccagatgattatgttattaataaaagttctttgatatggaaatggatagctgaaggttttatccaagaggagcaaggaaaacagttatttgagctcggggaagaattcttcaacgagctcgtaagtagaagcattatacaagtggtccaatcaaaatttgataacacagtgcaaggctttcgtattcatagtatggttcttggtcttattcgcctgttgtcatccgaagaaaactttgtttctgtattggacgaagaagggcaaatatctatatcaggcaaacttcgtcggttagccatccataacagaaaagaagagcacaaccttggagacaatatggacctcctcccatggttgaggtcgtttactgcaattgaatgtcctatatacatgatacctccggttttcatcttcaaattgttacgtgttctggatttagagagttgtgggtctatggaaggttatgatctcaagcagcttggaaatttacataatctcaggtttatcggtctatgtaatacatatgtccggacgctcccacaggaattagggcatctaaagtttctgcagacgcttgaattgaaaggaagtggcgttgaagaactaccttcgagtatgggtgagcttgcagggttaatgtgcctcaacgctgactggacaacaagagtgcccaagtggattgggatgcttacttccctgcaacagttggtgatgtacccttgtggtggctactcggcaaggtggtttgtcaaggggctgggacacctgagggaactaaggatgctccgtttgttgataaaagcagatgacgagaagcagcttgcacaattgctggagtctgttttaaaactgcccaagatcgaggctttacatcttgattactatggcggcgtacagttaaacaggcttgttaagttggaacctagtgattttgcctgcagtggacgtcttcgttccttagaattgcagttgttggaattctcaaggctgcctgtgtggcttaatgcttactatcttccacagatccgtgacttgtcgctgttgatgtttgatgtggataaacaggatctgaaaaaccttggggacttcaaggagctccgtcatctccatctgctaattgttaacactgaacgcagagatgctattacttgtgccagtggtggattccggaatttgagattcttcagtatcactaaaccattcaagtttcaacagggagatctgcctaggcttgaaatccttgattttcatttcaatgtgccactccaaagtggtgccaatagtggcctggattttgacttcggtttggaaaatatcccttcgcttcagcaagtcattgttcaaatcaactgtctagatgcctttcctcttccagaggaggtggagacagccctaaggcacgcaatcggcgtccatcccaaccgtcccatcgttgacatcagtttgcctcgacgaaaattagacaaggcagacaacgacggggccgaagggcgtagtaagttggctcattattcaaaatcattatcatcggcacatgataagccaatggatgagctaataaagaggttatatgtggtggacaatgaggcctacgataaaaagatgaagattgtgcctattgttagatctgaagggctggggaaaactactcttgcccaaaaagtatttgacaagcttagtccacattttgactgtgcagcatttgttctggtaggccaaaatccggacatgaggaaagttttcactgacattctcataggtctagacaaccaaaagtaccaagatttccctatgactatattggatataattgagctgattgggttagtccgtaaatcgctcataaacaaaagctgcgcctcggattaaaacagagctatctatcatccacattgcacagccttctctcaagcttcgtaacttaatgaatcgtcactattgaacaatgcaatcctcctccagcctgcataagataaataagcgacacacgttcaggttctttgttgtagttgacgatgtatgggatttgaaagcatgggacataataaagtctgcattgatcgaaaacactaatggcagtgcagttctaacaacgacaagtcgtcagatctgggaacatgagaactggaggccatctggggatgacaagtcggattctgacgcagagcagttagagcctcatttggacgtcacaacccccgcggatgtcctcccagcgtcttccccgagcaagagcaaggtggtggcccatgtggaactccgccacgacgacccagattcctctgcatttggaatcccgcaagtagcaggggatactcaacctgagctccgccttttccccgaggcggatgcggatcttaaagggttcttctacgaaaacctatttggatcggaagacaagtgccctgatgatctgaaagatatatgtaaagatctcatacaaatatctgctggtgtcctatcagatgcctatgagaccgtggaagagctcagaggtattacctacgacactggaaagctggcagcctgtgtatcagagaagaaaattcgagctctcttatcccaaactacctggccatctaaaggattgcttaagatattttagtatgtttccaaaaggttacgagatcagtgcagaacgcttagtttgggcgtggatagctcaaggtttcgtaaaggagactcagggacagaatgatttggagaaagtcggaaagaagtaccttattgaccttataagcagaaagatgatcgaagcagtggaggttcatgctgatggtatggccctctcatgccgtgcgtacgatttgttgcatggcttgatcgtttcattgtcaacagaagaaaaattcgttgaaattctaaatgactcgcagtcgcaggagagagcttcgaatccgaatacagaagttcaccggctgtccatccaaatccagagaaataatatgctacaccccctgccaaaagcttggatgaaacaagtgcagtcacttgttgtctcgtctgataccgtgccagacctctcagattttcagggtcttcatgccatggacttaggaggctgcgattcattgcaggttgatcatctcaagggtataagtaaaacaacatctttgatatatctggccataggaggaaaatatatcgctgacgtcccgaaagaagtttcttggctcaaaaagctgcggacattggatttaactgcaagtggtctgagtgaattgccacgatgtattttaacgctaactaatttggagcggctatttgttaatagccatatgaagattcctggtaagatctcaaaaatgtcaggtttacaagaactgggcgacatcaatattgttaagccagagttacttaaaaggctccgtaaattaagtaagttaagggttctcagaattgccatgtggtcttgggatgagggttctaagagctctgttaaactatggtgggagaccctgcactcattaatcgggtcctgcaaaaaaattgagagtctctgcatactgaccttctgctcccttgatttcatggatggttccggtgatgataataaatggccgcctcaaactctcaaaaacctcgagataagtcacagcgcatttctggataagctcccaagttggtttgactcactttccaccatctcctcgttgacaatcgaggtcaacaagttatcaaagaacatcactgacactctggcaaagctgtctgctctaagatccctttccctgacatccatagaaaagccagaaccagaagtacgctttgtcatcggctctgctggtagattcgagaatctagaaagcttaaagtttgtgtgtaatgaaatggtaaatttgcttgaaagaccggaatcgaatgctacccaacagttaacagggcttactatcgtgtttcatgcttcacgaacagaacgcagccgaaacaaagatttcaggtttggtttggacaaactgctgtccctacagcacgttcgtgttgaaataaactgttccaatgcgacgcagcggacggtgaaaaatgcagaagctgcaattggggaagaaatatcaaaaatacgcagggatgacgggagtcagccaatcctggaaatacgaagactccaggaagaaagtatgatagcagggaaggaccaaacccaggatgctaataagacaccgtcttcttcgtctactatggaaactacattgcgagcccaacctattggggaatcattaatgcctagtgttgagactgtttcttccaaggtcttcgtctctcagaacagctccaacgacacattttttaataatgtaggtatcctcacaagctccacgaaaataaagacattgaaagagag

SEQ ID NO: 207323 - DNA, 6395 bp, Zea Mays
gtcaatcaccacgctagtcgtcgcctttctcccaccgctcggcaattccccgccagtgccctctcgaatcaatcaccacgctcccctgcgacgacgtcctctttgagcacatcctctgccacctctcctccccatccaatacctcacgcatcgtcaccctcgacgacctcaagaccggcaccctaccctgctgctgcgttcctgccatcggcgactcgctcccgcttctccacgacatctccgtcgacaagggcgagcgcgccacccttctcgctggagccagccaccaacgtcgccatcccagttagcagccccaaaaattcccagagacatcgatattctcttagttgaaggtgcagggggtataaagccgacgagaagaataccaaaaagggcagaagatctcaggtttcgcgaagcaatactgaaggccgatttctagcttctttttgcaatatgctttattgggattggatctggaatcattgttgttaataatctagcacaaatatgaattgttggagttgttgccgatagaaccactgaggcactgactctctatctacagtttctgcaattttttgggtggctaggagggggtgttgcttcttagtatcttgtcagcgacccggcaggaaaagaaaaataaatgaaatgaaatgcaggtccgtcctggttttccagttcatatcctcgtctctctctggccgtctcctcacctcacggatcaacaggcggacatagcagccgtcctcgttctgcctcaggttgattccttgttacatctcccatctgcatgcagttccgcaatgtcataggatgcctacatcaacaccaagcaagcaagcagctagctagcgtggttagttatatcttcaaatcagtctacagggatggatctagtgacaggtccgctagccattctcccgtccaagctgcaggagctactccaaatccaagatgagtataggctccagaaggaagtgaggggcagagtggagatgatctgccgggagctgcaaagtatgcacgctgccctccgtaaggtggctgatgtgccgcgggatcagatcgacctccagaccaaggtgtggagacgcgatgtcagagaggcatcctatgacattgaggatgccatcgacacctttctcatgcgcatcagagaccgcgcgccaagtgacccaaacaggtttcgacttgccatgaagaagatgaccaagctgtcaagaaaggttaaggctatccatgaaattggtgctgccatcggagacatcgtgaggaaaatccaggagttggtggaccggcgtgtcaggtacaaacttgatgttgctgcagacaggtcaatcagcatggttagtgttgatcctcgccttgcagctttgtacaaagaagcgacacaactcattggcatcgaccaatcaatgtctgaaataatatccatgctgctctcggatgagtcgggccagcaacacattaagaagatttctattgtcggagctggaggactaggcaagaccacccttgctaaagaaacatatgaaaggcttagaagtgaatacgagtttgcaacttttgtttcagttggccaaaatcctgacttggtgagagttttcaagaacatcctcgttaagcttgacatataccagcaagtggacactatcaacagaacagatacgcgagcgctcatcgatgaaatcagacagcgccttagctatgtgaggtgcaggtatctcattgttatcgatgatgtatgggatctggagtcttggcatacactagaattggcatttgttgaaaataacaatgggagtggaataatcataactactcgtaattttgctgttgccacaatagctggtcgtgtttacaagttaaggccactttcgtaccatcactccaaagaattattctacagatcgttatttggtgaaggagtatgccttgatgatcaaataatcaataaggcatcagataaatttctaaagaaatgtgatggtataccgttagctctcatcacaatggctagtttgttcatgggaaaaccaacacaaatgtggtctgagctagccaataatgcttttggacataaaggtcgtaacagtcatttagaagaaacgactatgaggatattatcacttagctactctgatttgccattgaatttgaggacttgctttgtatatttgagtagatatccagatgattatgttattaataaaagttctttgatatggaaatggatagctgaaggttttatccaagaggagcaaggaaaacagttatttgagctcggggaagaattcttcaacgagctcgtaagtagaagcattatacaagtggtccaatcaaaatttgataacacagtgcaaggctttcgtattcatagtatggttcttggtcttattcgcctgttgtcatccgaagaaaactttgtttctgtattggacgaagaagggcaaatatctatatcaggcaaacttcgtcggttagccatccataacagaaaagaagagcacaaccttggagacaatatggacctcctcccatggttgaggtcgtttactgcaattgaatgtcctatatacatgatacctccggttttcatcttcaaattgttacgtgttctggatttagagagttgtgggtctatggaaggttatgatctcaagcagcttggaaatttacataatctcaggtttatcggtctatgtaatacatatgtccggacgctcccacaggaattagggcatctaaagtttctgcagacgcttgaattgaaaggaagtggcgttgaagaactaccttcgagtatgggtgagcttgcagggttaatgtgcctcaacgctgactggacaacaagagtgcccaagtggattgggatgcttacttccctgcaacagttggtgatgtacccttgtggtggctactcggcaaggtggtttgtcaaggggctgggacacctgagggaactaaggatgctccgtttgttgataaaagcagatgacgagaagcagcttgcacaattgctggagtctgttttaaaactgcccaagatcgaggctttacatcttgattactatggcggcgtacagttaaacaggcttgttaagttggaacctagtgattttgcctgcagtggacgtcttcgttccttagaattgcagttgttggaattctcaaggctgcctgtgtggcttaatgcttactatcttccacagatccgtgacttgtcgctgttgatgtttgatgtggataaacaggatctgaaaaaccttggggacttcaaggagctccgtcatctccatctgctaattgttaacactgaacgcagagatgctattacttgtgccagtggtggattccggaatttgagattcttcagtatcactaaaccattcaagtttcaacagggagatctgcctaggcttgaaatccttgattttcatttcaatgtgccactccaaagtggtgccaatagtggcctggattttgacttcggtttggaaaatatcccttcgcttcagcaagtcattgttcaaatcaactgtctagatgcctttcctcttccagaggaggtggagacagccctaaggcacgcaatcggcgtccatcccaaccgtcccatcgttgacatcagtttgcctcgacgaaaattagacaaggcagacaacgacggggccgaagggcgtagtaagttggctcattattcaaaatcattatcatcggcacatgataagccaatggatgagctaataaagaggttatatgtggtggacaatgaggcctacgataaaaagatgaagattgtgcctattgttagatctgaagggctggggaaaactactcttgcccaaaaagtatttgacaagcttagtccacattttgactgtgcagcatttgttctggtaggccaaaatccggacatgaggaaagttttcactgacattctcataggtctagacaaccaaaagtaccaagatttccctatgactatattggatataattgagctgattgggttagtccgtaaatcgctcataaacaaaaggttctttgttgtagttgacgatgtatgggatttgaaagcatgggacataataaagtctgcattgatcgaaaacactaatggcagtgcagttctaacaacgacaagtcgtcagatctgggaacatgagaactggaggccatctggggatgacaagtcggattctgacgcagagcagttagagcctcatttggacgtcacaacccccgcggatgtcctcccagcgtcttccccgagcaagagcaaggtggtggcccatgtggaactccgccacgacgacccagattcctctgcatttggaatcccgcaagtagcaggggatactcaacctgagctccgccttttccccgaggcggatgcggatcttaaagggttcttctacgaaaacctatttggatcggaagacaagtgccctgatgatctgaaagatatatgtaaagatctcatacaaatatctgctggtgtcctatcagatgcctatgagaccgtggaagagctcagaggtattacctacgacactggaaagctggcagcctgtgtatcagagaagaaaattcgagctctcttatcccaaactacctggccatctaaaggattgcttaagatattttagtatgtttccaaaaggttacgagatcagtgcagaacgcttagtttgggcgtggatagctcaaggtttcgtaaaggagactcagggacagaatgatttggagaaagtcggaaagaagtaccttattgaccttataagcagaaagatgatcgaagcagtggaggttcatgctgatggtatggccctctcatgccgtgcgtacgatttgttgcatggcttgatcgtttcattgtcaacagaagaaaaattcgttgaaattctaaatgactcgcagtcgcaggagagagcttcgaatccgaatacagaagttcaccggctgtccatccaaatccagagaaataatatgctacaccccctgccaaaagcttggatgaaacaagtgcagtcacttgttgtctcgtctgataccgtgccagacctctcagattttcagggtcttcatgccatggacttaggaggctgcgattcattgcaggttgatcatctcaagggtataagtaaaacaacatctttgatatatctggccataggaggaaaatatatcgctgacgtcccgaaagaagtttcttggctcaaaaagctgcggacattggatttaactgcaagtggtctgagtgaattgccacgatgtattttaacgctaactaatttggagcggctatttgttaatagccatatgaagattcctggtaagatctcaaaaatgtcaggtttacaagaactgggcgacatcaatattgttaagccagagttacttaaaaggctccgtaaattaagtaagttaagggttctcagaattgccatgtggtcttgggatgagggttctaagagctctgttaaactatggtgggagaccctgcactcattaatcgggtcctgcaaaaaaattgagagtctctgcatactgaccttctgctcccttgatttcatggatggttccggtgatgataataaatggccgcctcaaactctcaaaaacctcgagataagtcacagcgcatttctggataagctcccaagttggtttgactcactttccaccatctcctcgttgacaatcgaggtcaacaagttatcaaagaacatcactgacactctggcaaagctgtctgctctaagatccctttccctgacatccatagaaaagccagaaccagaagtacgctttgtcatcggctctgctggtagattcgagaatctagaaagcttaaagtttgtgtgtaatgaaatggtaaatttgcttgaaagaccggaatcgaatgctacccaacagttaacagggcttactatcgtgtttcatgcttcacgaacagaacgcagccgaaacaaagatttcaggtttggtttggacaaactgctgtccctacagcacgttcgtgttgaaataaactgttccaatgcgacgcagcggacggtgaaaaatgcagaagctgcaattggggaagaaatatcaaaaatacgcagggatgacgggagtcagccaatcctggaaatacgaagactccaggaagaaagtatgatagcagggaaggaccaaacccaggatgctaataagacaccgtcttcttcgtctactatggaaactacattgcgagcccaacctattggggaatcattaatgcctagtgttgagactgtttcttccaaggtcttcgtctctcagaacagctccaacgacacattttttaataatgtaggtatcctcacaagctccacgaaaataaagacattgaaagagag

SEQ ID NO: 207324 - DNA, 6066 bp, Zea Mays
caatcaccacgctagtcgtcgcctttctcccaccgctcggcaattccccgccagtgccctctcgaatcaatcaccacgctcccctgcgacgacgtcctctttgagcacatcctctgccacctctcctccccatccaatacctcacgcatcgtcaccctcgacgacctcaagaccggcaccctaccctgctgctgcgttcctgccatcggcgactcgctcccgcttctccacgacatctccgtcgacaagggcgagcgcgccacccttctcgctggagccagccaccaacgtcgccatcccacgacccggcaggaaaagaaaaataaatgaaatgaaatgcaggtccgtcctggttttccagttcatatcctcgtctctctctggccgtctcctcacctcacggatcaacaggcggacatagcagccgtcctcgttctgcctcaggttgattccttgttacatctcccatctgcatgcagttccgcaatgtcataggatgcctacatcaacaccaagcaagcaagcagctagctagcgtggttagttatatcttcaaatcagtctacagggatggatctagtgacaggtccgctagccattctcccgtccaagctgcaggagctactccaaatccaagatgagtataggctccagaaggaagtgaggggcagagtggagatgatctgccgggagctgcaaagtatgcacgctgccctccgtaaggtggctgatgtgccgcgggatcagatcgacctccagaccaaggtgtggagacgcgatgtcagagaggcatcctatgacattgaggatgccatcgacacctttctcatgcgcatcagagaccgcgcgccaagtgacccaaacaggtttcgacttgccatgaagaagatgaccaagctgtcaagaaaggttaaggctatccatgaaattggtgctgccatcggagacatcgtgaggaaaatccaggagttggtggaccggcgtgtcaggtacaaacttgatgttgctgcagacaggtcaatcagcatggttagtgttgatcctcgccttgcagctttgtacaaagaagcgacacaactcattggcatcgaccaatcaatgtctgaaataatatccatgctgctctcggatgagtcgggccagcaacacattaagaagatttctattgtcggagctggaggactaggcaagaccacccttgctaaagaaacatatgaaaggcttagaagtgaatacgagtttgcaacttttgtttcagttggccaaaatcctgacttggtgagagttttcaagaacatcctcgttaagcttgacatataccagcaagtggacactatcaacagaacagatacgcgagcgctcatcgatgaaatcagacagcgccttagctatgtgaggtatctcattgttatcgatgatgtatgggatctggagtcttggcatacactagaattggcatttgttgaaaataacaatgggagtggaataatcataactactcgtaattttgctgttgccacaatagctggtcgtgtttacaagttaaggccactttcgtaccatcactccaaagaattattctacagatcgttatttggtgaaggagtatgccttgatgatcaaataatcaataaggcatcagataaatttctaaagaaatgtgatggtataccgttagctctcatcacaatggctagtttgttcatgggaaaaccaacacaaatgtggtctgagctagccaataatgcttttggacataaaggtcgtaacagtcatttagaagaaacgactatgaggatattatcacttagctactctgatttgccattgaatttgaggacttgctttgtatatttgagtagatatccagatgattatgttattaataaaagttctttgatatggaaatggatagctgaaggttttatccaagaggagcaaggaaaacagttatttgagctcggggaagaattcttcaacgagctcgtaagtagaagcattatacaagtggtccaatcaaaatttgataacacagtgcaaggctttcgtattcatagtatggttcttggtcttattcgcctgttgtcatccgaagaaaactttgtttctgtattggacgaagaagggcaaatatctatatcaggcaaacttcgtcggttagccatccataacagaaaagaagagcacaaccttggagacaatatggacctcctcccatggttgaggtcgtttactgcaattgaatgtcctatatacatgatacctccggttttcatcttcaaattgttacgtgttctggatttagagagttgtgggtctatggaaggttatgatctcaagcagcttggaaatttacataatctcaggtttatcggtctatgtaatacatatgtccggacgctcccacaggaattagggcatctaaagtttctgcagacgcttgaattgaaaggaagtggcgttgaagaactaccttcgagtatgggtgagcttgcagggttaatgtgcctcaacgctgactggacaacaagagtgcccaagtggattgggatgcttacttccctgcaacagttggtgatgtacccttgtggtggctactcggcaaggtggtttgtcaaggggctgggacacctgagggaactaaggatgctccgtttgttgataaaagcagatgacgagaagcagcttgcacaattgctggagtctgttttaaaactgcccaagatcgaggctttacatcttgattactatggcggcgtacagttaaacaggcttgttaagttggaacctagtgattttgcctgcagtggacgtcttcgttccttagaattgcagttgttggaattctcaaggctgcctgtgtggcttaatgcttactatcttccacagatccgtgacttgtcgctgttgatgtttgatgtggataaacaggatctgaaaaaccttggggacttcaaggagctccgtcatctccatctgctaattgttaacactgaacgcagagatgctattacttgtgccagtggtggattccggaatttgagattcttcagtatcactaaaccattcaagtttcaacagggagatctgcctaggcttgaaatccttgattttcatttcaatgtgccactccaaagtggtgccaatagtggcctggattttgacttcggtttggaaaatatcccttcgcttcagcaagtcattgttcaaatcaactgtctagatgcctttcctcttccagaggaggtggagacagccctaaggcacgcaatcggcgtccatcccaaccgtcccatcgttgacatcagtttgcctcgacgaaaattagacaaggcagacaacgacggggccgaagggcgtagtaagttggctcattattcaaaatcattatcatcggcacatgataagccaatggatgagctaataaagaggttatatgtggtggacaatgaggcctacgataaaaagatgaagattgtgcctattgttagatctgaagggctggggaaaactactcttgcccaaaaagtatttgacaagcttagtccacattttgactgtgcagcatttgttctggtaggccaaaatccggacatgaggaaagttttcactgacattctcataggtctagacaaccaaaagtaccaagatttccctatgactatattggatataattgagctgattgggttagtccgtaaatcgctcataaacaaaaggttctttgttgtagttgacgatgtatgggatttgaaagcatgggacataataaagtctgcattgatcgaaaacactaatggcagtgcagttctaacaacgacaagtcgtcagatctgggaacatgagaactggaggccatctggggatgacaagtcggattctgacgcagagcagttagagcctcatttggacgtcacaacccccgcggatgtcctcccagcgtcttccccgagcaagagcaaggtggtggcccatgtggaactccgccacgacgacccagattcctctgcatttggaatcccgcaagtagcaggggatactcaacctgagctccgccttttccccgaggcggatgcggatcttaaagggttcttctacgaaaacctatttggatcggaagacaagtgccctgatgatctgaaagatatatgtaaagatctcatacaaatatctgctggtgtcctatcagatgcctatgagaccgtggaagagctcagaggtattacctacgacactggaaagctggcagcctgtgtatcagagaagaaaattcgagctctcttatcccaaactacctggccatctaaaggattgcttaagatattttagtatgtttccaaaaggttacgagatcagtgcagaacgcttagtttgggcgtggatagctcaaggtttcgtaaaggagactcagggacagaatgatttggagaaagtcggaaagaagtaccttattgaccttataagcagaaagatgatcgaagcagtggaggttcatgctgatggtatggccctctcatgccgtgcgtacgatttgttgcatggcttgatcgtttcattgtcaacagaagaaaaattcgttgaaattctaaatgactcgcagtcgcaggagagagcttcgaatccgaatacagaagttcaccggctgtccatccaaatccagagaaataatatgctacaccccctgccaaaagcttggatgaaacaagtgcagtcacttgttgtctcgtctgataccgtgccagacctctcagattttcagggtcttcatgccatggacttaggaggctgcgattcattgcaggttgatcatctcaagggtataagtaaaacaacatctttgatatatctggccataggaggaaaatatatcgctgacgtcccgaaagaagtttcttggctcaaaaagctgcggacattggatttaactgcaagtggtctgagtgaattgccacgatgtattttaacgctaactaatttggagcggctatttgttaatagccatatgaagattcctggtaagatctcaaaaatgtcaggtttacaagaactgggcgacatcaatattgttaagccagagttacttaaaaggctccgtaaattaagtaagttaagggttctcagaattgccatgtggtcttgggatgagggttctaagagctctgttaaactatggtgggagaccctgcactcattaatcgggtcctgcaaaaaaattgagagtctctgcatactgaccttctgctcccttgatttcatggatggttccggtgatgataataaatggccgcctcaaactctcaaaaacctcgagataagtcacagcgcatttctggataagctcccaagttggtttgactcactttccaccatctcctcgttgacaatcgaggtcaacaagttatcaaagaacatcactgacactctggcaaagctgtctgctctaagatccctttccctgacatccatagaaaagccagaaccagaagtacgctttgtcatcggctctgctggtagattcgagaatctagaaagcttaaagtttgtgtgtaatgaaatggtaaatttgcttgaaagaccggaatcgaatgctacccaacagttaacagggcttactatcgtgtttcatgcttcacgaacagaacgcagccgaaacaaagatttcaggtttggtttggacaaactgctgtccctacagcacgttcgtgttgaaataaactgttccaatgcgacgcagcggacggtgaaaaatgcagaagctgcaattggggaagaaatatcaaaaatacgcagggatgacgggagtcagccaatcctggaaatacgaagactccaggaagaaagtatgatagcagggaaggaccaaacccaggatgctaataagacaccgtcttcttcgtctactatggaaactacattgcgagcccaacctattggggaatcattaatgcctagtgttgagactgtttcttccaaggtcttcgtctctcagaacagctccaacgacacattttttaataatgtaggtatcctcacaagctccacgaaaataaagacattgaaagagag

SEQ ID NO: 207325 - DNA, 2257 bp, Zea Mays
ggacagacggacagcagccagccaccaggccagccccctcaatttccacgacgcttcatgaatggagggagacacaatgcttgtatgcatgcatgcagcttgtgcggcggcttgcatgcagcaaccatgcagagcttgtgcgcgcttgtgcggcttgcatgcagcagccatgcagttgacgatgtatgggatttgaaagcatgggacataataaagtctgcattgatcgaaaacactaatggcagtgcagttctaacaacgacaagtcgtcagatctgggaacatgagaactggaggccatctggggatgacaagtcggattctgacgcagagcagttagagcctcatttggacgtcacaacccccgcggatgtcctcccagcgtcttccccgagcaagagcaaggtggtggcccatgtggaactccgccacgacgacccagattcctctgcatttggaatcccgcaagtagcaggggatactcaacctgagctccgccttttccccgaggcggatgcggatcttaaagggttcttctacgaaaacctatttggatcggaagacaagtgccctgatgatctgaaagatatatgtaaagatctcatacaaatatctgctggtgtcctatcagatgcctatgagaccgtggaagagctcagaggttacgagatcagtgcagaacgcttagtttgggcgtggatagctcaaggtttcgtaaaggagactcagggacagaatgatttggagaaagtcggaaagaagtaccttattgaccttataagcagaaagatgatcgaagcagtggaggttcatgctgatggtatggccctctcatgccgtgcgtacgatttgttgcatggcttgatcgtttcattgtcaacagaagaaaaattcgttgaaattctaaatgactcgcagtcgcaggagagagcttcgaatccgaatacagaagttcaccggctgtccatccaaatccagagaaataatatgctacaccccctgccaaaagcttggatgaaacaagtgcagtcacttgttgtctcgtctgataccgtgccagacctctcagattttcagggtcttcatgccatggacttaggaggctgcgattcattgcaggttgatcatctcaagggtataagtaaaacaacatctttgatatatctggccataggaggaaaatatatcgctgacgtcccgaaagaagtttcttggctcaaaaagctgcggacattggatttaactgcaagtggtctgagtgaattgccacgatgtattttaacgctaactaatttggagcggctatttgttaatagccatatgaagattcctggtaagatctcaaaaatgtcaggtttacaagaactgggcgacatcaatattgttaagccagagttacttaaaaggctccgtaaattaagtaagttaagggttctcagaattgccatgtggtcttgggatgagggttctaagagctctgttaaactatggtgggagaccctgcactcattaatcgggtcctgcaaaaaaattgagagtctctgcatactgaccttctgctcccttgatttcatggatggttccggtgatgataataaatggccgcctcaaactctcaaaaacctcgagataagtcacagcgcatttctggataagctcccaagttggtttgactcactttccaccatctcctcgttgacaatcgaggtcaacaagttatcaaagaacatcactgacactctggcaaagctgtctgctctaagatccctttccctgacatccatagaaaagccagaaccagaagtacgctttgtcatcggctctgctggtagattcgagaatctagaaagcttaaagtttgtgtgtaatgaaatggtaaatttgcttgaaagaccggaatcgaatgctacccaacagttaacagggcttactatcgtgtttcatgcttcacgaacagaacgcagccgaaacaaagatttcaggtttggtttggacaaactgctgtccctacagcacgttcgtgttgaaataaactgttccaatgcgacgcagcggacggtgaaaaatgcagaagctgcaattggggaagaaatatcaaaaatacgcagggatgacgggagtcagccaatcctggaaatacgaagactccaggaagaaagtatgatagcagggaaggaccaaacccaggatgctaataagacaccgtcttcttcggtatcctcacaagctccacgaaaataaagacattgaaagagag

SEQ ID NO: 207326 - DNA, 2191 bp, Zea Mays
cctcccgccatttccttcccaaatctaccttataagcgcgcgtagccttggcagctcgacgcatcttcgccgccgctcaacgttccccccacgccccaacctatccacgcgaaaccttctttcccccgggagacgattcgtcagggagaggaaagaggcaagaggggccatggacgctgccaagttggtgacgccggtcgctgtgtctcacattctggcgcacccgtcggcgggctccgacggcgcagtgaccgatctcgtcgttcaggtcctcgacctgaagtccgtcggcacgggcagccggttcagtttcacagcaactgacgggaaggataagatcaaggcgatgcttcccaccaacttcgggtcggaggtccgctctggcaacctgaagaacctcggcctcatccgcatcatcgactacacttgcaacgtcgtcaaaggcaaagatgacaaagtcttggttgtcatcaaatgcgagcttgtgtgccaagcgcttgacgccgagatcaacggcgaggccaaaaaagaggagcctccaattgtgctgaagcctaaggacgaatgcgtgggcgtgactcccccactcgctatgaagcccaagcaggaggtgaagtctgcgtcccagatcgtgaatgagcagcgtggaaatactgctcctgtcaagcccctttccatgacaaagagggtccatcctttgatcactctgaacccctaccagggtaactgggtcattaaggtgcgggtcacgagcaaaggcaacctgagaacctacaggaatgctcgcggagaaggctgtgtcttcaatgtagagctcaccgatgaggatggcacccagatccaagccaccatgtttaatgacgctgcaaagaagttctatccgatttttgagctgggaaagagggggagacttgcattccgcaagtgcaatacaaccttgtcaagattgatcagctaggatcgtatgtcggtggcagggagcttgtagatattgttggtgtggttcagagcgtatctcccacactcagtgttaggagaaagattgacaacgagacaataccgaagcgtgacattgttgtggcggatgactctggcaaaactgttagcatctctctttggaatgatcttgctactacgaccggccaagagcttttgaacatggctgacagttcgcctgttgttgcgataaagagcctaaaagtgtctgacttccaaggcgtgtctctttctactgtaggcaaaagtactcttgcgattaatcctgatctacacgaggctcagaatctcaaatcatggtatgactctgaaggcaaagatacttcgctggcaccaattggtgcagaaatgggtgccgcacgggccggtggcttcaagtccacgtattctgatagagtttttctgtctcacattactagtgatcctgccatgggccaggaaaagcctgttttcttcagtttgtatgccaccataagccacatcaagcctgaccagaacatgtggtaccgtgcttgcaagacctgcaacaagaaggtgactgaaacttttggatctggatactggtgtgagggatgccaaaagaatgactcggaatgctcactgagatacatcatggtcatcaaggtctccgatcctactggcgaggcatggttctctgtgttcaacgagcatgcagagaagatcattggctgcagcgccgacgagcttgatcggatcaggaaagaggagggggacgacagttatgttctgaagctcaaggaagccacctgggttcctcacctgttccgcgtcagcgtcacacagcatgaatacaataacgagaaaaggcagagaatcactgtgaggagtgaagcgccggtcgagcacgcagctgaatccaagtacctgcttgaacagatagcgaagcttactgcttgatagtagaagatgcaaccttactgcaaatagcgaggattattaggactaattgatggtgtcaggtcattgcggccctaagctttagctatgtatcagcagtcagatgtattaaccattccctgctctaatagtcatctatcagcagtcagatgtatttaaccattccctgcttaatagctctctaccaggagtcggaagtttttaaccattccctgctctaagacaagataaattgctcgatctacatcgttgtgccacgtattcagtcttttccccg

SEQ ID NO: 207327 - DNA, 3134 bp, Zea Mays
agtgattaaaaacatggacttattatctatgtgtttgcactaacacctactccctcagtactaaattaaaatttgttttatattattaatagattcatacaatacttagtataaaatgagtttttcattcataataagtatggagatgtgtatgaaagtggatcaaatatgatggagttaggtccggagtgctataactgacatctacacttgagtacagtacaggtgatggcgggttgttttcctacaaatccaaggacctttctgcgaaatgtttttcgtggatcgctctccgagcagcaatcccgtgtaggttttaataagaagaagaaataccccgcgacccacgtcaattcgagttatttgagattgtaacaatctcgtcgcgtggcttcgccactttattactccgcagccgcgcatcgccattttggtattctgaagctcacagccgcgccacattgggacagttattctcccgcgctctgttaccttccattaggtaaggtaaaagtcaaaattgtccctgctgtttacacgaggccggtgaaaacctaactccccctcactcctctcttcttccacggggctctccttctacggcgccgccactactttgtgctcgctcctcctccgagagcacgattcctccaatggctactccggctagagggaaaaaattcaattgaacttgtgtcaaatttctgtccattcaaatttctgttttcagtcaactgttttcagtccatttggacagaagctggtaactgtagaaattggacagcttcattttctgcctgtaaacagcttgatttcgacagcttcattttctacctgaaaacagcttgatttggacaaatgaacctgtgtccaaatgaagctgaagcttggctgtggctgaatcaagaaaacaacatttcagtcgttgtccaaaagaatctgaagctgggttgtgtccaaaggaacaacttgatttggacagcttgattttcagttttcagtccattctataaatcagaatttcagtccattcaaccagagataacagaatttcgctaaacagaaaatcagcttcatttggacagagaaaacagctaactagagataacagggggtggcggcgcggccatctggctgctggcagggggtggcgcggccatctggctggagctgctggcagggggtggcgcggacggctgctgggagatggcagcgctcgcagctggaagcaggcggcgtcgcaggcatatggtggtagccggctgcgcgaccacctggtagcgaggcccctagtggcacacggcggcgcgagttctgttttctggtggcaggaagaacacccgagcgcaagaacaccctggggtagattagtccgaagaattgaaaaacagacgttaacagagcgcgggggaataactgtcccaatctggcgcggctgtgagctccagaataccaaaatggcgatgcgcggctgtggagtaataatgtggcgaagccgcgcgacgagattgaataactccgtcccttccggccttccctctatctttcgctcgctctcggcgacagctgggcgaccgtcgtcgccgccgcccttctctaggtgcccaggtcttcgccggtccctttgccgcctcttcgccgccgatgagcaccagccaggttgtttaggagacttaattactgtaatttgggttggtttgaaggaagaaaagaagttgaaccatggggaagagaaagtcagctgctaagccacctcctaagaagcggatggacaagcttgacactgtcttttcctgcccattctgcaaccacgggagtagtgttgagtgccaaatgtgagtatcattttccaagctttcctatttagcttttgatgctagatttagtatcacattcagaattttttacttgatttctctcttttatccagtgacatgaagaatctgattggcgaagcatcttgtagaatctgtcaggaaaacttcagcacaactgttaatggtatgccaaacctatgtataaaactgtaccggttgctcctaatttcacttctatgaactgtactaatttgcatcacaaagggtttggtctcaaacaactcatgaactcattttcttattattgggctgatggacaaggcaacatgaaatttttcatggtacctgtgaacagagcatagcctacaaactgcagaaccattcccatttcatcttgtagtcttgtcttgctaataatggactttgtgggctgtctgttccctgtgtaattcatttgaccatgatagttcttgatcatgtgatatcatagaatgtgtcaaaaactgcatcacatcaaattaaaactggatagaacactatacataggtaatagtataattaaatgttaagaagtatttctttatgtttattttaattactaattgtcttatgtgatctcttttcttgccgcactcactgaacctattgatatgtaagtcaatcctgtcaatccttgcaaattagtgaaaaatctgtgatgtttatcctcaactggaactgagctggaatccttttcttttcctcacagatatagtgaatggattgacgagtgtgagcgtgtcaacactgttgaaggcgacgatgatgcgtgagcttgccccatgcgatgaaactgttacctacaatcgtaatgtaatgtgctggtattctcgaatgccatagcccatagtcagccatggcttggaataacgtagtggctgactgatatgccagtaggcaccttatctagtacttacagaactaaaaaaagtttgtactatacatatatggacaaccttataagtggctatgtgtgtacctatcctaacgcttatcccagatggtgtatcagcgtttttctgtgagattgttttcaagcaaggggttgttcattcattgggtcttctcaggaaaaagagaattatgctgcagttaaccagatggccgctgttgcgtcgacaatatagggtaaaacaaatgcaaccactgcagcgaaagatattcatagatagaattgttttcagttcattcaacgctgaaagcagtttcggtctggaggctgagctttggatcattggatggcagctttgacacctggagtaccgctcattagttttt

SEQ ID NO: 207328 - DNA, 555 bp, Zea Mays
ctgaattgttttgagattggaattgtggttatggtttattttttttcccaaaactgttttgcttcttaacctaaaactattaggccatgttcgtttaggccgttccccgccgggaaccgcggccaaacctcgtggatccctccccatggaaataagcccggcccacagaaaaacaagcgttcggttacatcccacgtgggctgtatccagatcgttcctcgtcattctagcccgggaaacacgcccggtcgaccggggggtggaaaatatcctagcctggaccgcaagcgaacgcgaagggcacgcgacttctcgtcggcgtcgatctgctccgacgaccgcttctcatcgttgtagacttccaggggtcgagttatgtatgaagtagctccaatctttagaggaagaatgtcttctcaacgggttttataacgagaagaagagatagaagtaactgaagaggagacaccaccaccttcggagtctcaggccaggaatcatttctactttgacatctgtggatctgagtctgattcacctgtgaacgaaggcaag

SEQ ID NO: 207329 - DNA, 574 bp, Zea Mays
ctgaattgttttgagattggaattgtggttatggtttattttttttcccaaaactgttttgcttcttaacctaaaactattaggccatgttcgtttaggccgttccccgccgggaaccgcggccaaacctcgtggatccctccccatggaaataagcccggcccacagaaaaacaagcgttcggttacatcccacgtgggctgtatccagatcgttcctcgtcattctagcccgggaaacacgcccggtcgaccggggggtggaaaatatcctagcctggaccgcaagcgaacgcgaagggcacgcgacttctcgtcggcgtcgatctgctccgacgaccgcttctcatcgttgtagacttccaggggtcgagttatgtatgaagtagctccaatctttagaggaagaatgtcttctcaacgggttttatgtacttgttctatcaaagaaacgagaagaagagatagaagtaactgaagaggagacaccaccaccttcggagtctcaggccaggaatcatttctactttgacatctgtggatctgagtctgattcacctgtgaacgaaggcaag

SEQ ID NO: 207330 - DNA, 627 bp, Zea Mays
ataagtttcatttcgtttgctgatgttcaagccttttaatggggagattcttgttgggaggattactggatatgacgataagggattgcaggtttcacttgaattcttcagtgacatttgcatacctggacacttgatgcagtttggcacagtaaggggaccagatggtaggtggatgctgaagactgaattaggcgatgagctttatctagatctagatgacgagataaggttcttggtttctagcacaaaatacccgcctataccaattgatcaaaatgaggatgacccaccatttgctccaatgcagattgttggaagtattaaaggggatggccttggtcttcttgtttggtgggcagctgatgaagaggagggggaggaggcggcagaggaagagcaatagcatcgtgttgcttgagggctcacttcgtgtaatttacagaatcagcctggtagcatgtgtagtgtaggggtcaggttcctaggagaattatgtatgtatgcaatcccctgaaattttctaaatatctgtgagctatatataattttatagcgcagagatctctccctgtaagagcatctccaaaagctccccagaagtctcctctaaatctattttttggg

SEQ ID NO: 207331 - DNA, 1208 bp, Zea Mays
ccttgatgcttggtggcctcgaacaaagtacaggtccatttctagcctatcgagctcctcaggtagtaaaaccctacctacacctcgtgccgcctccgtcgccggctcgcctccccatcgacgcgcaggcagccctgcgtttgctccccgtcggtcgggaaaggggcgcgccggcgctgcctccagcaatcaactcgccgcatccaatcacggcgcctccctcctcgattggctcctcggtggttggttgttataggcaggcgggaaggatgttctcgctgagccagatcgagcacgacctcccgatgccgccgcacctgctgagccgcccccttcccgacgccatcaaggccgagctcgagaggctcttcttggacaaggtaatcacaaaacttgggctgtgcgtgtctgtctatgatatccgatccattgaaggcggttccatccatccaggggagggctgctcgacttataaagtttcatttcgtttgctgatgttcaagccttttaatggggagattcttgttgggaggattactggatatgacgataagggattgcaggtttcacttgaattcttcagtgacatttgcatacctggacacttgatgcagtttggcacagtaagtgtacagtgcagtgtttcaaaggcatccaggtgaacctagcttgccttgggaaacagtggcgccatgtcgcctaggcgctgcctaggtgtccaggcatacccagcactggggaccagatggtaggtggatgctgaagactgaattaggcgatgagctttatctagatctagatgacgagataaggttcttggtttctagcacaaaatacccgcctataccaattgatcaaaatgaggatgacccaccatttgctccaatgcagattgttggaagtattaaaggggatggccttggtcttcttgtttggtgggcagctgatgaagaggagggggaggaggcggcagaggaagagcaatagcatcgtgttgcttgagggctcacttcgtgtaatttacagaatcagcctggtagcatgtgtagtgtaggggtcaggttcctaggagaattatgtatgtatgcaatcccctgaaattttctaaatatctgtgagctatatataattttatagcgcagagatctctccctgtaagagcatctccaaaagctccccagaagtctcctctaaatctattttttggg

SEQ ID NO: 207332 - DNA, 1094 bp, Zea Mays
ccttgatgcttggtggcctcgaacaaagtacaggtccatttctagcctatcgagctcctcaggtagtaaaaccctacctacacctcgtgccgcctccgtcgccggctcgcctccccatcgacgcgcaggcagccctgcgtttgctccccgtcggtcgggaaaggggcgcgccggcgctgcctccagcaatcaactcgccgcatccaatcacggcgcctccctcctcgattggctcctcggtggttggttgttataggcaggcgggaaggatgttctcgctgagccagatcgagcacgacctcccgatgccgccgcacctgctgagccgcccccttcccgacgccatcaaggccgagctcgagaggctcttcttggacaaggtaatcacaaaacttgggctgtgcgtgtctgtctatgatatccgatccattgaaggcggttccatccatccaggggagggctgctcgacttataaagtttcatttcgtttgctgatgttcaagccttttaatggggagattcttgttgggaggattactggatatgacgataagggattgcaggtttcacttgaattcttcagtgacatttgcatacctggacacttgatgcagtttggcacagggaccagatggtaggtggatgctgaagactgaattaggcgatgagctttatctagatctagatgacgagataaggttcttggtttctagcacaaaatacccgcctataccaattgatcaaaatgaggatgacccaccatttgctccaatgcagattgttggaagtattaaaggggatggccttggtcttcttgtttggtgggcagctgatgaagaggagggggaggaggcggcagaggaagagcaatagcatcgtgttgcttgagggctcacttcgtgtaatttacagaatcagcctggtagcatgtgtagtgtaggggtcaggttcctaggagaattatgtatgtatgcaatcccctgaaattttctaaatatctgtgagctatatataattttatagcgcagagatctctccctgtaagagcatctccaaaagctccccagaagtctcctctaaatctattttttggg

SEQ ID NO: 207333 - DNA, 2902 bp, Zea Mays
gtccgaggacgacaaagagaggtcttccggcgaggaggtcacgtgcaggttaccgatgggtctggataatacttatggcgagctatctggcatgttctatggaggcctgtcttatgatggctacgcagaccacagcagcgcaagtgattatttcaggtttgccgatccacttcctgcagttgtgccccagatggcagcagaagcctgttcaaatccttcctccactgtgtcgagggccaacactgaagctgacaacccggaggattgggaattcatctcagatgagtccctcaactatattagccggatgctcatggaggaggatattgatgagaaagttagcatgtaccaggcggagtcagcggcactgcgtgctgctgcaaagccattctacgacattcttgggcacaagtttccaccgtctcctgaccggcaggtgatgccttggcccatggacagccccagtgagagcagcggtagcatttgcacacaatctgtggcaagtgctgtcactagcagcagtgttggtggcacagtggatagcaaccggtgctacgatgttggacacagtgagcagctggaagcttttcgaggcttgtgtggtcagtcttctcatccacttgttggtgcatcaagtgatgcttccaatgcagtgggtgagctagaagacattttgatcacgaatggtgggatccctgagtatttgtttgagagccttccaacttgggatttcaggagaggtattgaggaagcccagaagagtcttcctgttagcgataaactagtaattgatttagaaactggtggtattgcaagaccccaagaagcaaggaaagatgttcctatgaatgccaaaaaggacgatgtattgaaggccaagaaaaatagacagagtgaagaccttgacctgatggaaggccggaacattaaacagtctgcattttgttccgatgaacctggttggattgagatgttcgatgatctgcttcgccaaactgagaagaaggctacagttctgcgagagctgatgcgtagtgaagcatccaagaattctcaggtcactcagatgaaaggaccaagtggtccacggccacggggaaggaaaccaacaaagaatgatgtggtggaccttaggaccatcctcatccactgtgcacaggctgtggcagcagatgaccgcagaactgctaatgaattgttaaagcaaataaggcaccattccaagccaaacggcgatggaacccagaggttagcacattgttttgcagatggtctcgaggctcgcttggcaggcacagggagtcagctttaccgcaagcttatagcgaaacgtacaactgcctcagacatgcttaaagcctaccaccttttccttgcagcaagcccgtttaagagactttcacattttctttccaatcaaacaatcttgagtttgactaaaaatgcatcaaaggtgcatatcattgactttggcatttattttggattccaatggccatgcctaatcaggcgtctctccaagagggaaggtggtccacctgttctgcgcatcactggaatcgacgtacctcagccaggtttccgccctaccgagagaattgaagagactggacaaaggcttgcagagtatgctgagaagttcaaggtgccttttgagtatcagggaatagcgtcaaagtgggaaagcatccgagttgaggatctcaaagttggcaaggacgaagttgtgattgttaattgcctatacagattcagaaacctgattgatgaaacagttgctgtagacagtcctaggaatagagtgctcaacaccataaggcaagtaaacccagcgattttcatccatggaattgtgaatgggtcatacagcgttcccttcttcatcactcgtttccgtgaggcgctgttccatttctctgcactgtttgacatgctagagacaactgtcccacgggatgatgcacagcgtgcgctcatagagagggaaatgtttggccgagaggcactcaacgttattgcatgtgagggctcagacagagttgagagacccgagacatataaacagtggcaggtgaggaacctcagggctggatttgtccagtctccgttaaaccaagaaattgtgatgaaagccatggacaaagtaaaagacatttatcacaaggacttcgtcatagatgaagacaacggatggctcctacaaggctggaaaggaaggatactctatgcaatttctacatggaagcctaagaataactaggttcttggtctcacgcgtaatctctcctattccatcgatggtggcagctaattaatcagtcctgctatcttataacatttgggccttgacctgtgaacctgtctgatcaaggcaatggcttgaagccggacaatgatcaacatggaggtttgctagatttacatctgtccagccagtactctgataaactggaaaagagcagctgtagacgtctctaacttggtgttggtaccatcacctttatttaattcgtagttttcttctttccatttacttctatgaccggcctggcgtcctattaccaacaaccagatcaccgcttctagttcaaaatggctaggcaaactacctactatcttgagcttaatatttttgacttgtatccatccatgtcaaacatcagttcggttttcagcacctgcagatcagaaattccccaacgagtaagcctaaagcatcaaaatttgttatacgagaacggacgctgctgtttgtgtggaatgtagcatctcatggagtgctttatctttgaattcttcgtttatttatttcatctgttttgtagcaagtgacgctgctgtcacaaaaacgagtccttaaacttgagtggagcactagtttgagaatattactagaaagtgg

SEQ ID NO: 207334 - DNA, 3013 bp, Zea Mays
cgcttctttacccatgcactgtttggttgcttctttactgatgcggtggcgtggatcgtgctaatcaagggagcttctcaccatttctcttgtgatcagccttctctatcttacttccacgcatggttttaggtcttccggcgaggaggtcacgtgcaggttaccgatgggtctggataatacttatggcgagctatctggcatgttctatggaggcctgtcttatgatggctacgcagaccacagcagcgcaagtgattatttcaggtttgccgatccacttcctgcagttgtgccccagatggcagcagaagcctgttcaaatccttcctccactgtgtcgagggccaacactgaagctgacaacccggaggattgggaattcatctcagatgagtccctcaactatattagccggatgctcatggaggaggatattgatgagaaagttagcatgtaccaggcggagtcagcggcactgcgtgctgctgcaaagccattctacgacattcttgggcacaagtttccaccgtctcctgaccggcaggtgatgccttggcccatggacagccccagtgagagcagcggtagcatttgcacacaatctgtggcaagtgctgtcactagcagcagtgttggtggcacagtggatagcaaccggtgctacgatgttggacacagtgagcagctggaagcttttcgaggcttgtgtggtcagtcttctcatccacttgttggtgcatcaagtgatgcttccaatgcagtgggtgagctagaagacattttgatcacgaatggtgggatccctgagtatttgtttgagagccttccaacttgggatttcaggagaggtattgaggaagcccagaagagtcttcctgttagcgataaactagtaattgatttagaaactggtggtattgcaagaccccaagaagcaaggaaagatgttcctatgaatgccaaaaaggacgatgtattgaaggccaagaaaaatagacagagtgaagaccttgacctgatggaaggccggaacattaaacagtctgcattttgttccgatgaacctggttggattgagatgttcgatgatctgcttcgccaaactgagaagaaggctacagttctgcgagagctgatgcgtagtgaagcatccaagaattctcaggtcactcagatgaaaggaccaagtggtccacggccacggggaaggaaaccaacaaagaatgatgtggtggaccttaggaccatcctcatccactgtgcacaggctgtggcagcagatgaccgcagaactgctaatgaattgttaaagcaaataaggcaccattccaagccaaacggcgatggaacccagaggttagcacattgttttgcagatggtctcgaggctcgcttggcaggcacagggagtcagctttaccgcaagcttatagcgaaacgtacaactgcctcagacatgcttaaagcctaccaccttttccttgcagcaagcccgtttaagagactttcacattttctttccaatcaaacaatcttgagtttgactaaaaatgcatcaaaggtgcatatcattgactttggcatttattttggattccaatggccatgcctaatcaggcgtctctccaagagggaaggtggtccacctgttctgcgcatcactggaatcgacgtacctcagccaggtttccgccctaccgagagaattgaagagactggacaaaggcttgcagagtatgctgagaagttcaaggtgccttttgagtatcagggaatagcgtcaaagtgggaaagcatccgagttgaggatctcaaagttggcaaggacgaagttgtgattgttaattgcctatacagattcagaaacctgattgatgaaacagttgctgtagacagtcctaggaatagagtgctcaacaccataaggcaagtaaacccagcgattttcatccatggaattgtgaatgggtcatacagcgttcccttcttcatcactcgtttccgtgaggcgctgttccatttctctgcactgtttgacatgctagagacaactgtcccacgggatgatgcacagcgtgcgctcatagagagggaaatgtttggccgagaggcactcaacgttattgcatgtgagggctcagacagagttgagagacccgagacatataaacagtggcaggtgaggaacctcagggctggatttgtccagtctccgttaaaccaagaaattgtgatgaaagccatggacaaagtaaaagacatttatcacaaggacttcgtcatagatgaagacaacggatggctcctacaaggctggaaaggaaggatactctatgcaatttctacatggaagcctaagaataactaggttcttggtctcacgcgtaatctctcctattccatcgatggtggcagctaattaatcagtcctgctatcttataacatttgggccttgacctgtgaacctgtctgatcaaggcaatggcttgaagccggacaatgatcaacatggaggtttgctagatttacatctgtccagccagtactctgataaactggaaaagagcagctgtagacgtctctaacttggtgttggtaccatcacctttatttaattcgtagttttcttctttccatttacttctatgaccggcctggcgtcctattaccaacaaccagatcaccgcttctagttcaaaatggctaggcaaactacctactatcttgagcttaatatttttgacttgtatccatccatgtcaaacatcagttcggttttcagcacctgcagatcagaaattccccaacgagtaagcctaaagcatcaaaatttgttatacgagaacggacgctgctgtttgtgtggaatgtagcatctcatggagtgctttatctttgaattcttcgtttatttatttcatctgttttgtagcaagtgacgctgctgtcacaaaaacgagtccttaaacttgagtggagcactagtttgagaatattactagaaagtgg

SEQ ID NO: 207335 - DNA, 559 bp, Zea Mays
ctcaaacatttaaatttattttttaggaccgaagttattcagatccgaagcttccaagcttgttaaagatgttgaaatggacccaaaatcaactggacgaaaaggcggcttatcctcgaatcaacgatttcaccactgccgcgctggaagatccatcgatatgaatctgctgtgaaggaactgagggtatgcaccaagcctgcctggtgcctacacgtggttgccccggatctgtcaatagatcatcgtctgcagcgattgagttcaccccttgcactagtgtttaagatcaatgcaagcaattgatccgaaaacatcacctgtgttctacctgtacatgatgtagaagacatgtttgaaacctttttaagttagtgaaatgttggatttttttcatggacatatattcgtttcaaacctgtggtacttgcaacacgcaaattgtttcagtcatgctttgggccttgaattcacggtcctactgtcagtttgatgcaactgtgcaaagaagctcattttttttcaatgtcagaaccaattagcggctacagatttttag

SEQ ID NO: 207336 - DNA, 851 bp, Zea Mays
cccgaccggagaagacggccgacggctacgagctacgtagccgagattttggacacgaatccccaactatactttcatctccagcaacagaaactaatagagttgattcgcgtgggaaaaataaatgaagctttggagttcgctcaagaagaacttgcaccgagaggcgaagaaaatcaaacatttctcgaggaaatagaaaaaactgtagcactactggtttttgaagatgtaaaaaattgcccttatggggaactattggatgtttctcaacgtttgaagactgcaagtgaagttaatgctgctattcttacaagccaaagccatgagaaagatccgaagcttccaagcttgttaaagatgttgaaatggacccaaaatcaactggacgaaaaggcggcttatcctcgaatcaacgatttcaccactgccgcgctggaagatccatcgatatgaatctgctgtgaaggaactgagggtatgcaccaagcctgcctggtgcctacacgtggttgccccggatctgtcaatagatcatcgtctgcagcgattgagttcaccccttgcactagtgtttaagatcaatgcaagcaattgatccgaaaacatcacctgtgttctacctgtacatgatgtagaagacatgtttgaaacctttttaagttagtgaaatgttggatttttttcatggacatatattcgtttcaaacctgtggtacttgcaacacgcaaattgtttcagtcatgctttgggccttgaattcacggtcctactgtcagtttgatgcaactgtgcaaagaagctcattttttttcaatgtcagaaccaattagcggctacagatttttag

SEQ ID NO: 207337 - DNA, 979 bp, Zea Mays
ctagcctcttaagcctgcggttaggggggcataaccccgaccggagaagacggccgacggctacgagctacgtagccgagattttggacacgaatccccaactatactttcatctccagcaacagaaactaatagagttgattcgcgtgggaaaaataaatgaagctttggagttcgctcaagaagaacttgcaccgagaggcgaagaaaatcaaacatttctcgaggaaatagaaaaaactgtagcactactggtttttgaagatgtaaaaaattgcccttatggggaactattggatgtttctcaacgtttgaagactgcaagtgaagttaatgctgctattcttacaagccaaagccatgagaaagtattgtggaccggaatcctgtacagtggtgataagatatgacttcggcttgacacagtcagcgactgaccaacaggttcagatagttaaaaatatccgaagcttccaagcttgttaaagatgttgaaatggacccaaaatcaactggacgaaaaggcggcttatcctcgaatcaacgatttcaccactgccgcgctggaagatccatcgatatgaatctgctgtgaaggaactgagggtatgcaccaagcctgcctggtgcctacacgtggttgccccggatctgtcaatagatcatcgtctgcagcgattgagttcaccccttgcactagtgtttaagatcaatgcaagcaattgatccgaaaacatcacctgtgttctacctgtacatgatgtagaagacatgtttgaaacctttttaagttagtgaaatgttggatttttttcatggacatatattcgtttcaaacctgtggtacttgcaacacgcaaattgtttcagtcatgctttgggccttgaattcacggtcctactgtcagtttgatgcaactgtgcaaagaagctcattttttttcaatgtcagaaccaattagcggctacagatttttag

SEQ ID NO: 207338 - DNA, 2716 bp, Zea Mays
catttctatgacaaccatcttaataaaaaaaaaaccccaccgaagccgaaaaagaaaaatcctcgccgacgttcctcaccacggcgacggccaccgcgacctcggccccgacgttgcctacggcagccaccatgtcggcgagctccgttgtccccacgctgctgccagatgagcggcccgacatcctctcactgctcgacgccgccgcccgcccgctcgccgacgtcgtcgccgacttccttgctcggttcccccgcgagcgccgcctccgtgtctgcggcgccctctgcttcctcctcgaggacaagatgatgctccatcctactggccggttaattgcatttgcaattcttcatcagagttattcgccgcagacagcaaatccatatattcctatattgttaaatgcagcctgtgatgaaacgtcagagaaatcagaacgggcgtttgtccaactattattgacttcatctagtggaaatagtaataacgaggtcctgaatcagtctgcccttgattacataaatggatctgtttcagcatctcaggtctttttgcctcgggaacaacttgagaagcaatactgcagtactggtgtacattcctcgcctcagactagtagtttcacagctcctgcagttagaagtgctataccagatccagacgtccgtcaaagttgtgcaaattcatcagagtcttcgatatcaccacctggaagcaaacagaaatctgcgtctgatgatagagatactactatttctgttttactcgaagacataccaggggggaggttgggtccgcaatggattcggcccacacccccaagacttcctttatttgatggggagctacaatggctgaaccctgacaataaccacgagctattatgggattatagcatgtgtgctgacacgaatcgaggggctgctatccgagatttgattgcaagagccttaaaagcaagtcgtagtagaactggcaaaggatcctaaactggtttattattgtgggatgactccacagaagcttcctgatcttgttgaacacaacccactcattgctgttgaggttctttcaaagctaattcactctcctgacatttctggttactttgatgttcttgtgcacatggaaatgagcttgcattctatggaagttgtgaacagactcactactgccgttgaccttccaacagaatttgtccatgagtacatcacaaattgtatccaatcatgtcaaaacataaaggataaatacatgcaaaacagacttgtgagactagtttgtgtttttctgcagagtcttatccgaaacaagattataaacgttcaagaccttttcatcgaggtacaagcgttctgtattgaattttcacggataagggaagcagctgccagcgagcattctcctttcacaaatgctgagctgctctgcattggttccatggtcgctcagagttgcaccggtgcgaccgacgtggccgtggccgtggcgtctggtttcgatagacaattcaaacacttgaacaccaaataccgcaaactactcaacagctagcatcatgaattggtctcatgttcacagatcaggaaaaagaaaggattcctagacacatgatgagggctcctttgaattgcaagattttttccacttcctgggttgcgttttttctgtgaaaataaactgttctgtaaaaaatcttatatgatttttccgaaattcctacaaaccaacccacccagggcaacaagatcaccgcaaataacttgctcaaagtccgcgaaataaacaaaaattaaaggacgaggaaaaatagctaatcgccggctccgactcgatcgatgcacaagtgtatatatagccagctaaatcagcaaggcagtcctaataatcaccgccggctgaaggctgcgtcatgagtcacgacgaggccgccgcctcggcatcatagccgcggcagcgcgggctctcggcgaagtcgtcgatcgggaacgacgtggcgacggggccgatgtagaagctgagcgtctccccggcgcggtccacctcgccgacgccgagccacaggaacagcaccttcacgctgatcccccgcagcgccgtgagcgagccggcggcgacggacccggacacgcgcgcctcgtagcggaccagccacgtcctcgccagcaggaactcgcaggcccgcgggaagtacacctcgaaggcgccgtccgcgccgagctcgtaccctgtcacgcccgccggcaggatgccccgcgggaagccgtaccgctccagcatctcgtacgccgtcggcgacgtctcggtcgcgttgccgccgcctccggacgcctcggcggctgcttcttctgctacggccgtggccgccagcagcaggagcagcatgagggagtagtagctgctggccatggaggagcagagcagagcaaagtaggtggggggactggctcctccgattattccgagctggctgctagtgtttgcgcttcgcttacttgtcctttggaatctggaatggcttggtgagttgctattggatggatctatgtcgtgctgttcgggtagtgatgatttttttttcttctacgtactatttaatctgttcgtattttgacggggcgtatattccctaattaattagttgaggttgatgtaattgaccaatcatacaagaggttgtacttgtcacgttgtggcagttggctggccactc

SEQ ID NO: 207339 - DNA, 1947 bp, Zea Mays
aaaatttttgctttcactagtcacttttggggaagctcggttcattcccggagcctgtcattaagaaatacactaagcaaattttgcaaggattggagtatctgcatagcaatgcaataatacatagagatataaagggtgcaaacattcttgttgataataaagggtgcatcaaacttgctgattttggggcatctaagcaagttgcaaagttgttctgcagatatatggagtgtagggtgcacagtcattgaaatggccactggcaaaccaccatggagccagcagtatcaagaagttgctcttctatttcatgttggaactacaaaatcgcatccacctatacctgaacatctatcgccagaagccaaagattttctgctaaagtgcctgcagaaggaaccagagctgaggtctactgcaccagacttattaaagcatccttttgtcactggagaattggatgacctgcagccactcaatcatgctgcacgcaagaactcttttaatgagattccttcagatgatatgccaaatggcttgggtttgaataagtcttccaactggtccactatgaactccagtaaatcatccaaaatcaagcccttatgggagggtggctgtgatgatgatgacatgtgtgagtttgctgacaaggatgactatgcaggagttggatctagctataatcctatgtcagaaccatttgataactgggaaaacaagtttgacataagcccagagcaaaattctcatcaaccaatggaatttggtgaattggccaaacatgttgaaagcagcataactgggaatgattttacgttccctgttgggggaagttgtgaagatgatgatgtacttacagagtcaaaaataaaggcatttcttgaggagaaggctcttgacctgaaaaagctacaaacacctttgtatgaggagttctacaacactgtgcatggagggagttttcagggagctgatcaaacttccaagggaaaactcccaattagtccaaaatttccccctcgaggaaagtcgcctccatgcaagacacgtgtaggtgcatgtgatacttcgaatgacacagctcctgaaagctgcagcaagcaatttccaagaagcagtgtggtggatagcagccgaattttgagagaaattgcttctcctcaactgaatgagtttgcggataaaatccatcttgatgcccaagatagcccaagcatcagcttcaccgaaaggcagaggaagtggaaagaagagttggaccaggaacttgagagggagagagtgctgagattagctggctgtggtaaagcaccatccccaaacagaggttccaacgtgaaaaaggagtatcatgctgaccattgaacaaacagcagcgttcatcgtctctttatttcatcccacagaacacaactggatagtaactacacaatgccacagactggcagcaacatgagtacagcctgcagcgcctcaccattcgcggtattggccaagctatgactgcagatccatctcgtacaagtggcagatttacgttgaagtggactggtacataggggcactcgtcgcgaatatcaggatcattgtcgctgctaccccggaggacggcgtgctgacagtttcctgattttaaggccgcgtttgtcattctttttgatgcagtgctatacatgcgacttcggttatatttggtttctattgagaaaaaaatagtgttgtaaaaattttgtgtttgtaagcgagcttggcgtggggtttggttttgtatggagcttgtttgtgaaagcgtgtaataagatagctatgcaaattacaggtcattctgctggctgaatgaatctgagcttttcggaagctacaactgatcttctgctgttaatagttgcaatcaaattgtgaaccagcctttaggaagctcaaacctaaaactgatctcca

SEQ ID NO: 207340 - DNA, 4881 bp, Zea Mays
cagagtagtgaggactgaggagcgagcagagtccaccaccactaccaaacacgcagcgcagtggtgctctctagtcctctcttcttccactccgctcttcccccgtcgcacgcacgcgtggtcatcggattcggccgcgtgccggcgagatccgggccgtcgcagcacggtccggcagacgccgcaatccgcgatcctgtcgccgcgggagctgcattggcgccccacgcggccgttccggcgtttcttgggaggttgcggcggggggaggagctcgtgtccgggatccgccagatccgagaacgtcggcggtagtagcagtggcgggggtcgccatggaggcccacgcgccgctcgacttcgcgctcttccagctctcccctcggcgtcagcggtgcgagctggtggtgtgcggcaatgggcggacggagaagatcgcgtcagggtcggtgaagccgttcgtggcgcacctgcgggctgtggaggaacaggcgtcggctcagccaccgccgccggccatccggctgcagctggaccggcccgccccgtggtttagtaagggcacccttgagaggttcgtgcgcttcgtgagcacgccagaggtgctggagttgacgagcacctatgatttagagatgtcgcagctggaaggggctaggaagatatatgcgcagggaggtactggagacgctacctcaggtggaactggctcagcagcggcggtggcagcagatattacaaagaaagaacttcttagggcaatcgatgtgcgtctaagcacccttaaacaagatctggctgcagcttgttctcgagcatcctctgctgggttcaatccgaacagtgtatctgagcttcttcttttcgctaaccattttggtgccagtcggctgagcgaagcatgcacgaaattcatgtcactttgccagcggcgtcatgacatcagtcctcaaaccgcacagccagcagtttcatcacactggaaggtctttgatgatgggaatgttcgtggttcttccagttcagacatgtctatagatgagccacaagttgatctcggtgaatccaacaacaaatctacagtcggtggaagtggctctcaggtccacagactaagcaacagccaaggcttagaagtcgctgcagaacagcaacccaagccaaccatcccacaggccatagataaacaagaagcagaaacagacgcgtctcccgcacctgctgcaggagggctttcaaggcgtctgagtgtgaaggacaggataaacatgtttgagagccagaaaaaggagcagactccaagttctggtaacagcaactcagcaggtactggtagggtggttccagggagaggtgagcaccgcagggttccttctggggcctccatggagaagttagttagaaggtggagcagtgttagcgacatgagtattgatctcagcaacaatgagagcgttaacataaatgacaaaaaggacaatggaactcctgttgtgactccaacatctactgatttggaggccaactctaaagcaaaagctgatgtggactctaatggacagaaggatttagtcacatcacactcctggccttatcaaaaggataatgtaccaatggatccgactaccacagatttgtgcccaccctcaactttaagtaatacacttgctcctcatagtgatggtgcaggaaacgacatggttataaactctagcattgagagtgagtcatcctttgggaaagaagcgggggttattcaaggactcacaaggatgtcaaatcatgctacttcaaatgtttccactcgaaaccatctaaaatcttctgcaaagccagttgaggaaggcttgctgaaaaataaggatattttaaccagcacatcgttagaggagcatgttcgcatgatagataaggaaataacagctgttcctcatgaagtattagttgcaagtgaacagattccccagaatgatattagaggtctccatacaaaagatattcacactgaatctgaagtgactggaaggaaggatcagccttcacgatcatttggaaaggtatctggtggtgttaatcctaaaccaaaaacatcatccaattcccgagctaatgttaaaggctcatctggtagggctaatgtcaaaggctcatctggtagggatgagattacctttacagaaactgagttccgtgatgttagtttgcagcggaatcgtctaccacggaaggcagaggatgtagggagaaaggttacaggtggttctgattcagattcttctggtcgccagggaacaaatttgagcaggcaatcatccattaccatccaggaactaaacttccaggctagagtgatgggaccaggaaaagggaaccaagatcggcatggcgaattgcaaatgaaggctaatgagttggagaaattatttgctgaacacaagttaatatcatcccgacgaggcaaacctacagatgtgcaggttgatagcacacgtacggtgagtgaggtaaagccgataacagttcttcatgagacaattcatacaaaacaagttgtaaaggagagtataacaaccaatgattttgatgccagtgagcttctgaagatggtgagtaatcaaggatttaacattagcacaccacaaaaacttggcattctaagcttagaagagtcgagagggaagttttatgagcattatatgcagaagagggatgcaaaactgaaggaagactggaaactgcagaggggggagaaggaagcaatgttaaaggctatgcatgagagcctagaacggagcaaggctgagatgcgagctaaattctctcagtctggagatgtttctgactcaacttatgtttatcattgttctcagaagattcctccttcgcgatcagcaagaagaaataatgatcagggggttgactcattcttggttgaagaggaattgaatagtgactacctatctggtgacggttcttccaggagtgctgattctaggaagcattttccaaataaagttgcttccacccaaaaggcatctgttggtcctatccataagcgttcttcaaggactgcaagctccggttatggcaatcgcaggaatctaccagaaaatcctatcgcacagcctgtccccagtttctctgacttaagaaaagaaaatacaaagccttcacctggactcagtagagcggctgcaagagttcagcaaaagtcttttgcccgtagcaagagcattattgaagagtcaaagagtatattgaaagaagatcaatcgaggaggtcacaatctatgaggaagagccaaattccggatgagttgaaggacatttcatcagggaatgaggatatttacaattgggctccatcaagaatttccaagaatcaatcagagggagcttttgcttacagtgcccgtagaacgggtccaccaaagccatttcttaggaaaggcaatgggactcaccccgttataggtatagctggatttcaggctgcagcggctatgatggcgaatgccctccagaatggtgacagtggtgattttgaagatcaccaagatgattctcctgatgatgccaaagaagaagaagaatatgaaagtattgaagaaaattttagagaaagtgactttcctgctgattctgacagtgagaacccaagagttagtcatgaatttggaaattcagatgacccagggtcagaaaatggcgatgctaacttttcaagtgaagcacccgcaattggtggtactaagttcactgcttttacaggaaacgttcatgatccagctagtgatgttccagcaccctggagttctcgtcttccacagctgtccccttacatgaatgataatacagatggtgacacattcgctgattcaccgtgtggaagtccaccatggaattctcattcacttgatgaaataacagatgctgatgtatctcggatgcggaaaaagtggggcagtgcacagatgccttttgctggtgtcagtgcatctcaacagccacgcaaagatgtttccaaaggattgaagaaactgtggaaatttggtaggaagactagagggggtgatggtttagtaaatgattgggtatctgcttccactgcctcagaatacgatgaagacatggaagatgggcgggatctggtagtaggatcttctgatgatttcaaaaagtctcgaatgggttatcttgcttcatatgatgattttgttgaggatgaggtttttgctgaacaagaacaatcactacgcagctcaattccaaacccacctgcaaatttcagaccgagagaagatcaactgactggaagagcgccacgttctttcttctccctgtcaacattccgaagcaagggaggtgatgccaggctcaggtgatcctcagaaagtcagaagacaccagaggtggagtgtataaaatatcttccgaggttaggtatgagtatcaaattttcagggcggtacgcggctagcttgtgattataaatatatatctatatgttgtgtatctatggcaattcatataagctaccagttgagccccccattgttactgtttgattattctttttccgtaatattctttgacctcctgtgtagagttggacttagagatctttttgcagtctgttcttccaactggcccaaaactactgtatttttcgttgtttttgtgatatatatgtatctccctcttgtttcttcattcacatatatcacaaattcaagatatatggtaattttggcaattgtagcatggaaactgggcttattcaaggcacccgcaaagtcacttgttttagtgtgatgagtgtatctgtctttgatctatgtatatatattttttagaaaacttcatcgagttttttttgaa

SEQ ID NO: 207341 - DNA, 1868 bp, Zea Mays
tcgttgagaagaaacggaagaaggggaagaagcataaggacaagggtcagggcagcaattctgatagctcatgtgccaggaaccatagcattgagatggagcaagctgatgtgtcagccaagatggctgaagactcctgcttggagcatgcagaggctgttacgagcaaaagctctgcgaagaaacacaggaagaaaaagaggaaagataaagaggttgaaactattggccagaagcagatactcgatgctgatgaaaatgttgggtcagaagatacgaagaggaacagcagagaaagggaacatgataggaagtcaaagaagcacaaacgaaagcatcaggatgacgagactgcctcaaatggttcttctggtaatcaaattgttttaggggaagataagaggacggaaaaagagtatttagttaccttggatttggaagaggacaataaatctgatatgtcaaagattgggaagaagacagatagcaagaagaagaggagaaaagagagaaatgatggtgttgacctaagacaaaatacactagttggagagggcaagaatggtaagaataacaaagagaaaaaaatgtgtgaggatgagaatggtggcggtgaaagagagaaagaaaacatgggaaagcagaaggataagtgtagacgagtgagcttcactgatcatgtggaggtgtttaatataggtggtagtgatgatgtagagggtgatgggagtggtgaaactgaacttgtgcatggacgacggtttagccctgaggaagatgcaaagctaatggaagcgatattgaaatatgcagagttgaagcaattaggagagaaagggttacagatgattggggaaagtaataagcatccagagaccaggggttgttgggctgaaataggaaaagcattacctcatagacccaagaaagccaaatacgcgcgtggaaaggttttacttcaaaggagtgctgaacgtaaatggaccgctgaggagtatgagataattcgacggtttgttgaaaagaacggccgaaattggaaggtattagcaaaagaacttggaaagagtgaaatccatgtaaaagatacttggagacgaataaagttcaaaaatttgaaaagagggacttggagtcaggatgagtaccaaaacttgtttgatttggtaaatctggacatgcgtgtgaaagcccatcaaaacatcaatactggtcaccgtcatataagagataacatttcttgggaggctatcagtgaaaaattaaccactcgtagagccgaagaatgctgcacgaaatggcttcaaaatgtcgatgctgtttgtgctgaagatgtggactgggagaaccttctcgagcacaggtctggggagctttgccgtcatagatggaaccagatgattcgcctgatgggtgaccacagatataggcctttcattgagcaagtggaagtgcttgcaaggcggtactgcccagagatgcttgcgtacaggaaaccagtcgcaggtggatcctcggccgacgaacctgctggagcctctgacttgtaatatgggatctttagaaacgttagcagcatatggttctagagctgccaagggtgtcgtcagcactctgatctcaacaaactttggtattgttgagggcttatgtatcttctggatttgaaatcacggatgttttatcgcccaactaatcatgatttggggctcgattagagaacgactaggaatcaggccgtccagttagaactaatagtctgattaagtgttggatgactgttgaaaatgcaatgtgaacttagcagctgtgcacttgcacttttaccttggacttggaaattgccgttgccttcttggctttcaacc

SEQ ID NO: 207342 - DNA, 2402 bp, Zea Mays
cctgaattcagcccaaacccaagttccaccacacgtttctttaccctaaccttttcgctgctccagcgaggcatacagccgccgccgtttcttcattcttccttgcagcgccgacgctccatcttccgctccctcccttgctcgcgctcggcacgtaggcgacggtggcagcgctcagcctcgggctctcagcgacggcgtcagcggcttcccctctcgccagtcgcctcgtcctccgcacaccggccggtggccctgccaaagaggcaacggagagggtttccagaacagagtatacagagggcaaggctgttatgagcaacaaggaggagaaagaatgccaaatgaccaaagaagagaagaggcggaagaagagggagaaacataaggacatgggtcagagcggcgattatgagggtaaggctgttatgagcaacaaggaggagaaagactgccaagtaaccgaagaagagaagaaacggaagaaggggaagaagcataaggacaagggtcagggcagcaattctgatagctcatgtgccaggaaccatagcattgagatggagcaagctgatgtgtcagccaagatggctgaagactcctgcttggagcatgcagaggctgttacgagcaaaagctctgcgaagaaacacaggaagaaaaagaggaaagataaagaggttgaaactattggccagaagcagatactcgatgctgatgaaaatgttgggtcagaagatacgaagaggaacagcagagaaagggaacatgataggaagtcaaagaagcacaaacgaaagcatcaggatgacgagactgcctcaaatggttcttctggtaatcaaattgttttaggggaagataagaggacggaaaaagagtatttagttaccttggatttggaagaggacaataaatctgatatgtcaaagattgggaagaagacagatagcaagaagaagaggagaaaagagagaaatgatggtgttgacctaagacaaaatacactagttggagagggcaagaatggtaagaataacaaagagaaaaaaatgtgtgaggatgagaatggtggcggtgaaagagagaaagaaaacatgggaaagcagaaggataagtgtagacgagtgagcttcactgatcatgtggaggtgtttaatataggtggtagtgatgatgtagagggtgatgggagtggtgaaactgaacttgtgcatggacgacggtttagccctgaggaagatgcaaagctaatggaagcgatattgaaatatgcagagttgaagcaattaggagagaaagggttacagatgattggggaaagtaataagcatccagagaccaggggttgttgggctgaaatagcattacctcatagacccaagaaagccaaatacgcgcgtggaaaggttttacttcaaaggagtgctgaacgtaaatggaccgctgaggagtatgagataattcgacggtttgttgaaaagaacggccgaaattggaaggtattagcaaaagaacttggaaagagtgaaatccatgtaaaagatacttggagacgaataaagttcaaaaatttgaaaagagggacttggagtcaggatgagtaccaaaacttgtttgatttggtaaatctggacatgcgtgtgaaagcccatcaaaacatcaatactggtcaccgtcatataagagataacatttcttgggaggctatcagtgaaaaattaaccactcgtagagccgaagaatgctgcacgaaatggtacgggcaattggcatcgccgctggttaaacaaggaatctgggcagatacagatgactacatgttagtggaagcgcttcaaaatgtcgatgctgtttgtgctgaagatgtggactgggagaaccttctcgagcacaggtctggggagctttgccgtcatagatggaaccagatgattcgcctgatgggtgaccacagatataggcctttcattgagcaagtggaagtgcttgcaaggcggtactgcccagagatgcttgcgtacaggaaaccagtcgcaggtggatcctcggccgacgaacctgctggagcctctgacttgtaatatgggatctttagaaacgttagcagcatatggttctagagctgccaagggtgtcgtcagcactctgatctcaacaaactttggtattgttgagggcttatgtatcttctggatttgaaatcacggatgttttatcgcccaactaatcatgatttggggctcgattagagaacgactaggaatcaggccgtccagttagaactaatagtctgattaagtgttggatgactgttgaaaatgcaatgtgaacttagcagctgtgcacttgcacttttaccttggacttggaaattgccgttgccttcttggctttcaacc

SEQ ID NO: 207343 - DNA, 2315 bp, Zea Mays
attcagcccaaacccaagttccaccacacgtttctttaccctaaccttttcgctgctccagcgaggcatacagccgccgccgtttcttcattcttccttgcagcgccgacgctccatcttccgctccctcccttgctcgcgctcggcacgtaggcgacggtggcagcgctcagcctcgggctctcagcgacggcgtcagcggcttcccctctcgccagtcgcctcgtcctccgcacaccggccggtggccctgccaaagaggcaacggagagggtttccagaacagagtatacagagggcaaggctgttatgagcaacaaggaggagaaagaatgccaaatgaccaaagaagagaagaggcggaagaagagggagaaacataaggacatgggtcagagcggcgattatgagggtaaggctgttatgagcaacaaggaggagaaagactgccaagtaaccgaagaagagaagaaacggaagaaggggaagaagcataaggacaagggtcagggcagcaattctgatagctcatgtgccaggaaccatagcattgagatggagcaagctgatgtgtcagccaagatggctgaagactcctgcttggagcatgcagaggctgttacgagcaaaagctctgcgaagaaacacaggaagaaaaagaggaaagataaagaggttgaaactattggccagaagcagatactcgatgctgatgaaaatgttgggtcagaagatacgaagaggaacagcagagaaagggaacatgataggaagtcaaagaagcacaaacgaaagcatcaggatgacgagactgcctcaaatggttcttctggtaatcaaattgttttaggggaagataagaggacggaaaaagagtatttagttaccttggatttggaagaggacaataaatctgatatgtcaaagattgggaagaagacagatagcaagaagaagaggagaaaagagagaaatgatggtgttgacctaagacaaaatacactagttggagagggcaagaatggtaagaataacaaagagaaaaaaatgtgtgaggatgagaatggtggcggtgaaagagagaaagaaaacatgggaaagcagaaggataagtgtagacgagtgagcttcactgatcatgtggaggtgtttaatataggtggtagtgatgatgtagagggtgatgggagtggtgaaactgaacttgtgcatggacgacggtttagccctgaggaagatgcaaagctaatggaagcgatattgaaatatgcagagttgaagcaattaggagagaaagggttacagatgattggggaaagtaataagcatccagagaccaggggttgttgggctgaaatagcattacctcatagacccaagaaagccaaatacgcgcgtggaaaggttttacttcaaaggagtgctgaacgtaaatggaccgctgaggagtatgagataattcgacggtttgttgaaaagaacggccgaaattggaagggacttggagtcaggatgagtaccaaaacttgtttgatttggtaaatctggacatgcgtgtgaaagcccatcaaaacatcaatactggtcaccgtcatataagagataacatttcttgggaggctatcagtgaaaaattaaccactcgtagagccgaagaatgctgcacgaaatggtacgggcaattggcatcgccgctggttaaacaaggaatctgggcagatacagatgactacatgttagtggaagcgcttcaaaatgtcgatgctgtttgtgctgaagatgtggactgggagaaccttctcgagcacaggtctggggagctttgccgtcatagatggaaccagatgattcgcctgatgggtgaccacagatataggcctttcattgagcaagtggaagtgcttgcaaggcggtactgcccagagatgcttgcgtacaggaaaccagtcgcaggtggatcctcggccgacgaacctgctggagcctctgacttgtaatatgggatctttagaaacgttagcagcatatggttctagagctgccaagggtgtcgtcagcactctgatctcaacaaactttggtattgttgagggcttatgtatcttctggatttgaaatcacggatgttttatcgcccaactaatcatgatttggggctcgattagagaacgactaggaatcaggccgtccagttagaactaatagtctgattaagtgttggatgactgttgaaaatgcaatgtgaacttagcagctgtgcacttgcacttttaccttggacttggaaattgccgttgccttcttggctttcaacc

SEQ ID NO: 207344 - DNA, 2310 bp, Zea Mays
acccaagttccaccacacgtttctttaccctaaccttttcgctgctccagcgaggcatacagccgccgccgtttcttcattcttccttgcagcgccgacgctccatcttccgctccctcccttgctcgcgctcggcacgtaggcgacggtggcagcgctcagcctcgggctctcagcgacggcgtcagcggcttcccctctcgccagtcgcctcgtcctccgcacaccggccggtggccctgccaaagaggcaacggagagggtttccagaacagagtatacagagggcaaggctgttatgagcaacaaggaggagaaagaatgccaaatgaccaaagaagagaagaggcggaagaagagggagaaacataaggacatgggtcagagcggcgattatgagggtaaggctgttatgagcaacaaggaggagaaagactgccaagtaaccgaagaagagaagaaacggaagaaggggaagaagcataaggacaagggtcagggcagcaattctgatagctcatgtgccaggaaccatagcattgagatggagcaagctgatgtgtcagccaagatggctgaagactcctgcttggagcatgcagaggctgttacgagcaaaagctctgcgaagaaacacaggaagaaaaagaggaaagataaagaggttgaaactattggccagaagcagatactcgatgctgatgaaaatgttgggtcagaagatacgaagaggaacagcagagaaagggaacatgataggaagtcaaagaagcacaaacgaaagcatcaggatgacgagactgcctcaaatggttcttctggtaatcaaattgttttaggggaagataagaggacggaaaaagagtatttagttaccttggatttggaagaggacaataaatctgatatgtcaaagattgggaagaagacagatagcaagaagaagaggagaaaagagagaaatgatggtgttgacctaagacaaaatacactagttggagagggcaagaatggtaagaataacaaagagaaaaaaatgtgtgaggatgagaatggtggcggtgaaagagagaaagaaaacatgggaaagcagaaggataagtgtagacgagtgagcttcactgatcatgtggaggtgtttaatataggtggtagtgatgatgtagagggtgatgggagtggtgaaactgaacttgtgcatggacgacggtttagccctgaggaagatgcaaagctaatggaagcgatattgaaatatgcagagttgaagcaattaggagagaaagggttacagatgattggggaaagtaataagcatccagagaccaggggttgttgggctgaaataggaaaagcattacctcatagacccaagaaagccaaatacgcgcgtggaaaggttttacttcaaaggagtgctgaacgtaaatggaccgctgaggagtatgagataattcgacggtttgttgaaaagaacggccgaaattggaagggacttggagtcaggatgagtaccaaaacttgtttgatttggtaaatctggacatgcgtgtgaaagcccatcaaaacatcaatactggtcaccgtcatataagagataacatttcttgggaggctatcagtgaaaaattaaccactcgtagagccgaagaatgctgcacgaaatggtacgggcaattggcatcgccgctggttaaacaaggaatctgggcagatacagatgactacatgttagtggaagcgcttcaaaatgtcgatgctgtttgtgctgaagatgtggactgggagaaccttctcgagcacaggtctggggagctttgccgtcatagatggaaccagatgattcgcctgatgggtgaccacagatataggcctttcattgagcaagtggaagtgcttgcaaggcggtactgcccagagatgcttgcgtacaggaaaccagtcgcaggtggatcctcggccgacgaacctgctggagcctctgacttgtaatatgggatctttagaaacgttagcagcatatggttctagagctgccaagggtgtcgtcagcactctgatctcaacaaactttggtattgttgagggcttatgtatcttctggatttgaaatcacggatgttttatcgcccaactaatcatgatttggggctcgattagagaacgactaggaatcaggccgtccagttagaactaatagtctgattaagtgttggatgactgttgaaaatgcaatgtgaacttagcagctgtgcacttgcacttttaccttggacttggaaattgccgttgccttcttggctttcaacc

SEQ ID NO: 207345 - DNA, 2415 bp, Zea Mays
ccaagttccaccacacgtttctttaccctaaccttttcgctgctccagcgaggcatacagccgccgccgtttcttcattcttccttgcagcgccgacgctccatcttccgctccctcccttgctcgcgctcggcacgtaggcgacggtggcagcgctcagcctcgggctctcagcgacggcgtcagcggcttcccctctcgccagtcgcctcgtcctccgcacaccggccggtggccctgccaaagaggcaacggagagggtttccagaacagagtatacagagggcaaggctgttatgagcaacaaggaggagaaagaatgccaaatgaccaaagaagagaagaggcggaagaagagggagaaacataaggacatgggtcagagcggcgattatgagggtaaggctgttatgagcaacaaggaggagaaagactgccaagtaaccgaagaagagaagaaacggaagaaggggaagaagcataaggacaagggtcagggcagcaattctgatagctcatgtgccaggaaccatagcattgagatggagcaagctgatgtgtcagccaagatggctgaagactcctgcttggagcatgcagaggctgttacgagcaaaagctctgcgaagaaacacaggaagaaaaagaggaaagataaagaggttgaaactattggccagaagcagatactcgatgctgatgaaaatgttgggtcagaagatacgaagaggaacagcagagaaagggaacatgataggaagtcaaagaagcacaaacgaaagcatcaggatgacgagactgcctcaaatggttcttctggtaatcaaattgttttaggggaagataagaggacggaaaaagagtatttagttaccttggatttggaagaggacaataaatctgatatgtcaaagattgggaagaagacagatagcaagaagaagaggagaaaagagagaaatgatggtgttgacctaagacaaaatacactagttggagagggcaagaatggtaagaataacaaagagaaaaaaatgtgtgaggatgagaatggtggcggtgaaagagagaaagaaaacatgggaaagcagaaggataagtgtagacgagtgagcttcactgatcatgtggaggtgtttaatataggtggtagtgatgatgtagagggtgatgggagtggtgaaactgaacttgtgcatggacgacggtttagccctgaggaagatgcaaagctaatggaagcgatattgaaatatgcagagttgaagcaattaggagagaaagggttacagatgattggggaaagtaataagcatccagagaccaggggttgttgggctgaaatagatggcttattgagtatttgttgaaggaaaagcattacctcatagacccaagaaagccaaatacgcgcgtggaaaggttttacttcaaaggagtgctgaacgtaaatggaccgctgaggagtatgagataattcgacggtttgttgaaaagaacggccgaaattggaaggtattagcaaaagaacttggaaagagtgaaatccatgtaaaagatacttggagacgaataaagttcaaaaatttgaaaagagggacttggagtcaggatgagtaccaaaacttgtttgatttggtaaatctggacatgcgtgtgaaagcccatcaaaacatcaatactggtcaccgtcatataagagataacatttcttgggaggctatcagtgaaaaattaaccactcgtagagccgaagaatgctgcacgaaatggtacgggcaattggcatcgccgctggttaaacaaggaatctgggcagatacagatgactacatgttagtggaagcgcttcaaaatgtcgatgctgtttgtgctgaagatgtggactgggagaaccttctcgagcacaggtctggggagctttgccgtcatagatggaaccagatgattcgcctgatgggtgaccacagatataggcctttcattgagcaagtggaagtgcttgcaaggcggtactgcccagagatgcttgcgtacaggaaaccagtcgcaggtggatcctcggccgacgaacctgctggagcctctgacttgtaatatgggatctttagaaacgttagcagcatatggttctagagctgccaagggtgtcgtcagcactctgatctcaacaaactttggtattgttgagggcttatgtatcttctggatttgaaatcacggatgttttatcgcccaactaatcatgatttggggctcgattagagaacgactaggaatcaggccgtccagttagaactaatagtctgattaagtgttggatgactgttgaaaatgcaatgtgaacttagcagctgtgcacttgcacttttaccttggacttggaaattgccgttgccttcttggctttcaacc

SEQ ID NO: 207346 - DNA, 2387 bp, Zea Mays
ccaagttccaccacacgtttctttaccctaaccttttcgctgctccagcgaggcatacagccgccgccgtttcttcattcttccttgcagcgccgacgctccatcttccgctccctcccttgctcgcgctcggcacgtaggcgacggtggcagcgctcagcctcgggctctcagcgacggcgtcagcggcttcccctctcgccagtcgcctcgtcctccgcacaccggccggtggccctgccagcaaagaggcaacggagagggtttccagaacagagtatacagagggcaaggctgttatgagcaacaaggaggagaaagaatgccaaatgaccaaagaagagaagaggcggaagaagagggagaaacataaggacatgggtcagagcggcgattatgagggtaaggctgttatgagcaacaaggaggagaaagactgccaagtaaccgaagaagagaagaaacggaagaaggggaagaagcataaggacaagggtcagggcagcaattctgatagctcatgtgccaggaaccatagcattgagatggagcaagctgatgtgtcagccaagatggctgaagactcctgcttggagcatgcagaggctgttacgagcaaaagctctgcgaagaaacacaggaagaaaaagaggaaagataaagaggttgaaactattggccagaagcagatactcgatgctgatgaaaatgttgggtcagaagatacgaagaggaacagcagagaaagggaacatgataggaagtcaaagaagcacaaacgaaagcatcaggatgacgagactgcctcaaatggttcttctggtaatcaaattgttttaggggaagataagaggacggaaaaagagtatttagttaccttggatttggaagaggacaataaatctgatatgtcaaagattgggaagaagacagatagcaagaagaagaggagaaaagagagaaatgatggtgttgacctaagacaaaatacactagttggagagggcaagaatggtaagaataacaaagagaaaaaaatgtgtgaggatgagaatggtggcggtgaaagagagaaagaaaacatgggaaagcagaaggataagtgtagacgagtgagcttcactgatcatgtggaggtgtttaatataggtggtagtgatgatgtagagggtgatgggagtggtgaaactgaacttgtgcatggacgacggtttagccctgaggaagatgcaaagctaatggaagcgatattgaaatatgcagagttgaagcaattaggagagaaagggttacagatgattggggaaagtaataagcatccagagaccaggggttgttgggctgaaatagcattacctcatagacccaagaaagccaaatacgcgcgtggaaaggttttacttcaaaggagtgctgaacgtaaatggaccgctgaggagtatgagataattcgacggtttgttgaaaagaacggccgaaattggaaggtattagcaaaagaacttggaaagagtgaaatccatgtaaaagatacttggagacgaataaagttcaaaaatttgaaaagagggacttggagtcaggatgagtaccaaaacttgtttgatttggtaaatctggacatgcgtgtgaaagcccatcaaaacatcaatactggtcaccgtcatataagagataacatttcttgggaggctatcagtgaaaaattaaccactcgtagagccgaagaatgctgcacgaaatggtacgggcaattggcatcgccgctggttaaacaaggaatctgggcagatacagatgactacatgttagtggaagcgcttcaaaatgtcgatgctgtttgtgctgaagatgtggactgggagaaccttctcgagcacaggtctggggagctttgccgtcatagatggaaccagatgattcgcctgatgggtgaccacagatataggcctttcattgagcaagtggaagtgcttgcaaggcggtactgcccagagatgcttgcgtacaggaaaccagtcgcaggtggatcctcggccgacgaacctgctggagcctctgacttgtaatatgggatctttagaaacgttagcagcatatggttctagagctgccaagggtgtcgtcagcactctgatctcaacaaactttggtattgttgagggcttatgtatcttctggatttgaaatcacggatgttttatcgcccaactaatcatgatttggggctcgattagagaacgactaggaatcaggccgtccagttagaactaatagtctgattaagtgttggatgactgttgaaaatgcaatgtgaacttagcagctgtgcacttgcacttttaccttggacttggaaattgccgttgccttcttggctttcaacc

SEQ ID NO: 207347 - DNA, 2393 bp, Zea Mays
ccaagttccaccacacgtttctttaccctaaccttttcgctgctccagcgaggcatacagccgccgccgtttcttcattcttccttgcagcgccgacgctccatcttccgctccctcccttgctcgcgctcggcacgtaggcgacggtggcagcgctcagcctcgggctctcagcgacggcgtcagcggcttcccctctcgccagtcgcctcgtcctccgcacaccggccggtggccctgccagcaaagaggcaacggagagggtttccagaacagagtatacagagggcaaggctgttatgagcaacaaggaggagaaagaatgccaaatgaccaaagaagagaagaggcggaagaagagggagaaacataaggacatgggtcagagcggcgattatgagggtaaggctgttatgagcaacaaggaggagaaagactgccaagtaaccgaagaagagaagaaacggaagaaggggaagaagcataaggacaagggtcagggcagcaattctgatagctcatgtgccaggaaccatagcattgagatggagcaagctgatgtgtcagccaagatggctgaagactcctgcttggagcatgcagaggctgttacgagcaaaagctctgcgaagaaacacaggaagaaaaagaggaaagataaagaggttgaaactattggccagaagcagatactcgatgctgatgaaaatgttgggtcagaagatacgaagaggaacagcagagaaagggaacatgataggaagtcaaagaagcacaaacgaaagcatcaggatgacgagactgcctcaaatggttcttctggtaatcaaattgttttaggggaagataagaggacggaaaaagagtatttagttaccttggatttggaagaggacaataaatctgatatgtcaaagattgggaagaagacagatagcaagaagaagaggagaaaagagagaaatgatggtgttgacctaagacaaaatacactagttggagagggcaagaatggtaagaataacaaagagaaaaaaatgtgtgaggatgagaatggtggcggtgaaagagagaaagaaaacatgggaaagcagaaggataagtgtagacgagtgagcttcactgatcatgtggaggtgtttaatataggtggtagtgatgatgtagagggtgatgggagtggtgaaactgaacttgtgcatggacgacggtttagccctgaggaagatgcaaagctaatggaagcgatattgaaatatgcagagttgaagcaattaggagagaaagggttacagatgattggggaaagtaataagcatccagagaccaggggttgttgggctgaaataggaaaagcattacctcatagacccaagaaagccaaatacgcgcgtggaaaggttttacttcaaaggagtgctgaacgtaaatggaccgctgaggagtatgagataattcgacggtttgttgaaaagaacggccgaaattggaaggtattagcaaaagaacttggaaagagtgaaatccatgtaaaagatacttggagacgaataaagttcaaaaatttgaaaagagggacttggagtcaggatgagtaccaaaacttgtttgatttggtaaatctggacatgcgtgtgaaagcccatcaaaacatcaatactggtcaccgtcatataagagataacatttcttgggaggctatcagtgaaaaattaaccactcgtagagccgaagaatgctgcacgaaatggtacgggcaattggcatcgccgctggttaaacaaggaatctgggcagatacagatgactacatgttagtggaagcgcttcaaaatgtcgatgctgtttgtgctgaagatgtggactgggagaaccttctcgagcacaggtctggggagctttgccgtcatagatggaaccagatgattcgcctgatgggtgaccacagatataggcctttcattgagcaagtggaagtgcttgcaaggcggtactgcccagagatgcttgcgtacaggaaaccagtcgcaggtggatcctcggccgacgaacctgctggagcctctgacttgtaatatgggatctttagaaacgttagcagcatatggttctagagctgccaagggtgtcgtcagcactctgatctcaacaaactttggtattgttgagggcttatgtatcttctggatttgaaatcacggatgttttatcgcccaactaatcatgatttggggctcgattagagaacgactaggaatcaggccgtccagttagaactaatagtctgattaagtgttggatgactgttgaaaatgcaatgtgaacttagcagctgtgcacttgcacttttaccttggacttggaaattgccgttgccttcttggctttcaacc

SEQ ID NO: 207348 - DNA, 2301 bp, Zea Mays
ccacacgtttctttaccctaaccttttcgctgctccagcgaggcatacagccgccgccgtttcttcattcttccttgcagcgccgacgctccatcttccgctccctcccttgctcgcgctcggcacgtaggcgacggtggcagcgctcagcctcgggctctcagcgacggcgtcagcggcttcccctctcgccagtcgcctcgtcctccgcacaccggccggtggccctgccagcaaagaggcaacggagagggtttccagaacagagtatacagagggcaaggctgttatgagcaacaaggaggagaaagaatgccaaatgaccaaagaagagaagaggcggaagaagagggagaaacataaggacatgggtcagagcggcgattatgagggtaaggctgttatgagcaacaaggaggagaaagactgccaagtaaccgaagaagagaagaaacggaagaaggggaagaagcataaggacaagggtcagggcagcaattctgatagctcatgtgccaggaaccatagcattgagatggagcaagctgatgtgtcagccaagatggctgaagactcctgcttggagcatgcagaggctgttacgagcaaaagctctgcgaagaaacacaggaagaaaaagaggaaagataaagaggttgaaactattggccagaagcagatactcgatgctgatgaaaatgttgggtcagaagatacgaagaggaacagcagagaaagggaacatgataggaagtcaaagaagcacaaacgaaagcatcaggatgacgagactgcctcaaatggttcttctggtaatcaaattgttttaggggaagataagaggacggaaaaagagtatttagttaccttggatttggaagaggacaataaatctgatatgtcaaagattgggaagaagacagatagcaagaagaagaggagaaaagagagaaatgatggtgttgacctaagacaaaatacactagttggagagggcaagaatggtaagaataacaaagagaaaaaaatgtgtgaggatgagaatggtggcggtgaaagagagaaagaaaacatgggaaagcagaaggataagtgtagacgagtgagcttcactgatcatgtggaggtgtttaatataggtggtagtgatgatgtagagggtgatgggagtggtgaaactgaacttgtgcatggacgacggtttagccctgaggaagatgcaaagctaatggaagcgatattgaaatatgcagagttgaagcaattaggagagaaagggttacagatgattggggaaagtaataagcatccagagaccaggggttgttgggctgaaataggaaaagcattacctcatagacccaagaaagccaaatacgcgcgtggaaaggttttacttcaaaggagtgctgaacgtaaatggaccgctgaggagtatgagataattcgacggtttgttgaaaagaacggccgaaattggaagggacttggagtcaggatgagtaccaaaacttgtttgatttggtaaatctggacatgcgtgtgaaagcccatcaaaacatcaatactggtcaccgtcatataagagataacatttcttgggaggctatcagtgaaaaattaaccactcgtagagccgaagaatgctgcacgaaatggtacgggcaattggcatcgccgctggttaaacaaggaatctgggcagatacagatgactacatgttagtggaagcgcttcaaaatgtcgatgctgtttgtgctgaagatgtggactgggagaaccttctcgagcacaggtctggggagctttgccgtcatagatggaaccagatgattcgcctgatgggtgaccacagatataggcctttcattgagcaagtggaagtgcttgcaaggcggtactgcccagagatgcttgcgtacaggaaaccagtcgcaggtggatcctcggccgacgaacctgctggagcctctgacttgtaatatgggatctttagaaacgttagcagcatatggttctagagctgccaagggtgtcgtcagcactctgatctcaacaaactttggtattgttgagggcttatgtatcttctggatttgaaatcacggatgttttatcgcccaactaatcatgatttggggctcgattagagaacgactaggaatcaggccgtccagttagaactaatagtctgattaagtgttggatgactgttgaaaatgcaatgtgaacttagcagctgtgcacttgcacttttaccttggacttggaaattgccgttgccttcttggctttcaacc

SEQ ID NO: 207349 - DNA, 2367 bp, Zea Mays
cacacgtttctttaccctaaccttttcgctgctccagcgaggcatacagccgccgccgtttcttcattcttccttgcagcgccgacgctccatcttccgctccctcccttgctcgcgctcggcacgtaggcgacggtggcagcgctcagcctcgggctctcagcgacggcgtcagcggcttcccctctcgccagtcgcctcgtcctccgcacaccggccggtggccctgccaaagaggcaacggagagggtttccagaacagagtatacagagggcaaggctgttatgagcaacaaggaggagaaagaatgccaaatgaccaaagaagagaagaggcggaagaagagggagaaacataaggacatgggtcagagcggcgattatgagggtaaggctgttatgagcaacaaggaggagaaagactgccaagtaaccgaagaagagaagaaacggaagaaggggaagaagcataaggacaagggtcagggcagcaattctgatagctcatgtgccaggaaccatagcattgagatggagcaagctgatgtgtcagccaagatggctgaagactcctgcttggagcatgcagaggctgttacgagcaaaagctctgcgaagaaacacaggaagaaaaagaggaaagataaagaggttgaaactattggccagaagcagatactcgatgctgatgaaaatgttgggtcagaagatacgaagaggaacagcagagaaagggaacatgataggaagtcaaagaagcacaaacgaaagcatcaggatgacgagactgcctcaaatggttcttctggtaatcaaattgttttaggggaagataagaggacggaaaaagagtatttagttaccttggatttggaagaggacaataaatctgatatgtcaaagattgggaagaagacagatagcaagaagaagaggagaaaagagagaaatgatggtgttgacctaagacaaaatacactagttggagagggcaagaatggtaagaataacaaagagaaaaaaatgtgtgaggatgagaatggtggcggtgaaagagagaaagaaaacatgggaaagcagaaggataagtgtagacgagtgagcttcactgatcatgtggaggtgtttaatataggtggtagtgatgatgtagagggtgatgggagtggtgaaactgaacttgtgcatggacgacggtttagccctgaggaagatgcaaagctaatggaagcgatattgaaatatgcagagttgaagcaattaggagagaaagggttacagatgattggggaaagtaataagcatccagagaccaggggttgttgggctgaaataggaaaagcattacctcatagacccaagaaagccaaatacgcgcgtggaaaggttttacttcaaaggagtgctgaacgtaaatggaccgctgaggagtatgagataattcgacggtttgttgaaaagaacggccgaaattggaaggtattagcaaaagaacttggaaagagtgaaatccatgtaaaagatacttggagacgaataaagttcaaaaatttgaaaagagggacttggagtcaggatgagtaccaaaacttgtttgatttggtaaatctggacatgcgtgtgaaagcccatcaaaacatcaatactggtcaccgtcatataagagataacatttcttgggaggctatcagtgaaaaattaaccactcgtagagccgaagaatgctgcacgaaatggtacgggcaattggcatcgccgctggttaaacaaggaatctgggcagatacagatgactacatgcttcaaaatgtcgatgctgtttgtgctgaagatgtggactgggagaaccttctcgagcacaggtctggggagctttgccgtcatagatggaaccagatgattcgcctgatgggtgaccacagatataggcctttcattgagcaagtggaagtgcttgcaaggcggtactgcccagagatgcttgcgtacaggaaaccagtcgcaggtggatcctcggccgacgaacctgctggagcctctgacttgtaatatgggatctttagaaacgttagcagcatatggttctagagctgccaagggtgtcgtcagcactctgatctcaacaaactttggtattgttgagggcttatgtatcttctggatttgaaatcacggatgttttatcgcccaactaatcatgatttggggctcgattagagaacgactaggaatcaggccgtccagttagaactaatagtctgattaagtgttggatgactgttgaaaatgcaatgtgaacttagcagctgtgcacttgcacttttaccttggacttggaaattgccgttgccttcttggctttcaacc

SEQ ID NO: 207350 - DNA, 1903 bp, Zea Mays
acacgtttctttaccctaaccttttcgctgctccagcgaggcatacagccgccgccgtttcttcattcttccttgcagcgccgacgctccatcttccgctccctcccttgctcgcgctcggcacgtaggcgacggtggcagcgctcagcctcgggctctcagcgacggcgtcagcggcttcccctctcgccagtcgcctcgtcctccgcacaccggccggtggccctgccaaagaggcaacggagagggtttccagaacagagtatacagagggcaaggctgttatgagcaacaaggaggagaaagaatgccaaatgaccaaagaagagaagaggcggaagaagagggagaaacataaggacatgggtcagagcggcgattatgagggtaaggctgttatgagcaacaaggaggagaaagactgccaagtaaccgaagaagagaagaaacggaagaaggggaagaagcataaggacaagggtcagggcagcaattctgatagctcatgtgccaggaaccatagcattgagatggagcaagctgatgtgtcagccaagatggctgaagactcctgcttggagcatgcagaggctgttacgagcaaaagctctgcgaagaaacacaggaagaaaaagaggaaagataaagaggttgaaactattggccagaagcagatactcgatgctgatgaaaatgttgggtcagaagatacgaagaggaacagcagagaaagggaacatgataggaagtcaaagaagcacaaacgaaagcatcaggatgacgagactgcctcaaatggttcttctggtaatcaaattgttttaggggaagataagaggacggaaaaagagtatttagttaccttggatttggaagaggacaataaatctgatatgtcaaagattgggaagaagacagatagcaagaagaagaggagaaaagagagaaatgatggtgttgacctaagacaaaatacactagttggagagggcaagaatggtaagaataacaaagagaaaaaaatgtgtgaggatgagaatggtggcggtgaaagagagaaagaaaacatgggaaagcagaaggataagtgtagacgagtgagcttcactgatcatgtggaggtgtttaatataggtggtagtgatgatgtagagggtgatgggagtggtgaaactgaacttgtgcatggacgacggtttagccctgaggaagatgcaaagctaatggaagcgatattgaaatatgcagagttgaagcaattaggagagaaagggttacagatgattggggaaagtaataagcatccagagaccaggggttgttgggctgaaataggaaaagcattacctcatagacccaagaaagccaaatacgcgcgtggaaaggttttacttcaaaggagtgctgaacgtaaatggaccgctgaggagtatgagataattcgacggtttgttgaaaagaacggccgaaattggaaggtattagcaaaagaacttggaaagagtgaaatccatgtaaaagatacttggagacgaataaagttcaaaaatttgaaaagagggacttggagtcaggatgagtaccaaaacttgtttgatttggtaaatctggacatgcgtgtgaaagcccatcaaaacatcaatactggtcaccgtcatataagagataacatttcttgggaggctatcagtgaaaaattaaccactcgtagagccgaagaatgctgcacgaaatggtacgggcaattggcatcgccgctggttaaacaaggaatctgggcagatacagatgactacatgttagtggaagcgcttcaaaatgtcgatgctgtttgtgctgaagatgtggactgggagaaccttctcgagcacagtggtcacagtaaccgggtgtttcctctttg

SEQ ID NO: 207351 - DNA, 2264 bp, Zea Mays
acacgtttctttaccctaaccttttcgctgctccagcgaggcatacagccgccgccgtttcttcattcttccttgcagcgccgacgctccatcttccgctccctcccttgctcgcgctcggcacgtaggcgacggtggcagcgctcagcctcgggctctcagcgacggcgtcagcggcttcccctctcgccagtcgcctcgtcctccgcacaccggccggtggccctgccaaagaggcaacggagagggtttccagaacagagtatacagagggcaaggctgttatgagcaacaaggaggagaaagactgccaagtaaccgaagaagagaagaaacggaagaaggggaagaagcataaggacaagggtcagggcagcaattctgatagctcatgtgccaggaaccatagcattgagatggagcaagctgatgtgtcagccaagatggctgaagactcctgcttggagcatgcagaggctgttacgagcaaaagctctgcgaagaaacacaggaagaaaaagaggaaagataaagaggttgaaactattggccagaagcagatactcgatgctgatgaaaatgttgggtcagaagatacgaagaggaacagcagagaaagggaacatgataggaagtcaaagaagcacaaacgaaagcatcaggatgacgagactgcctcaaatggttcttctggtaatcaaattgttttaggggaagataagaggacggaaaaagagtatttagttaccttggatttggaagaggacaataaatctgatatgtcaaagattgggaagaagacagatagcaagaagaagaggagaaaagagagaaatgatggtgttgacctaagacaaaatacactagttggagagggcaagaatggtaagaataacaaagagaaaaaaatgtgtgaggatgagaatggtggcggtgaaagagagaaagaaaacatgggaaagcagaaggataagtgtagacgagtgagcttcactgatcatgtggaggtgtttaatataggtggtagtgatgatgtagagggtgatgggagtggtgaaactgaacttgtgcatggacgacggtttagccctgaggaagatgcaaagctaatggaagcgatattgaaatatgcagagttgaagcaattaggagagaaagggttacagatgattggggaaagtaataagcatccagagaccaggggttgttgggctgaaataggaaaagcattacctcatagacccaagaaagccaaatacgcgcgtggaaaggttttacttcaaaggagtgctgaacgtaaatggaccgctgaggagtatgagataattcgacggtttgttgaaaagaacggccgaaattggaaggtattagcaaaagaacttggaaagagtgaaatccatgtaaaagatacttggagacgaataaagttcaaaaatttgaaaagagggacttggagtcaggatgagtaccaaaacttgtttgatttggtaaatctggacatgcgtgtgaaagcccatcaaaacatcaatactggtcaccgtcatataagagataacatttcttgggaggctatcagtgaaaaattaaccactcgtagagccgaagaatgctgcacgaaatggtacgggcaattggcatcgccgctggttaaacaaggaatctgggcagatacagatgactacatgttagtggaagcgcttcaaaatgtcgatgctgtttgtgctgaagatgtggactgggagaaccttctcgagcacaggtctggggagctttgccgtcatagatggaaccagatgattcgcctgatgggtgaccacagatataggcctttcattgagcaagtggaagtgcttgcaaggcggtactgcccagagatgcttgcgtacaggaaaccagtcgcaggtggatcctcggccgacgaacctgctggagcctctgacttgtaatatgggatctttagaaacgttagcagcatatggttctagagctgccaagggtgtcgtcagcactctgatctcaacaaactttggtattgttgagggcttatgtatcttctggatttgaaatcacggatgttttatcgcccaactaatcatgatttggggctcgattagagaacgactaggaatcaggccgtccagttagaactaatagtctgattaagtgttggatgactgttgaaaatgcaatgtgaacttagcagctgtgcacttgcacttttaccttggacttggaaattgccgttgccttcttggctttcaacc

SEQ ID NO: 207352 - DNA, 2299 bp, Zea Mays
acacgtttctttaccctaaccttttcgctgctccagcgaggcatacagccgccgccgtttcttcattcttccttgcagcgccgacgctccatcttccgctccctcccttgctcgcgctcggcacgtaggcgacggtggcagcgctcagcctcgggctctcagcgacggcgtcagcggcttcccctctcgccagtcgcctcgtcctccgcacaccggccggtggccctgccaaagaggcaacggagagggtttccagaacagagtatacagagggcaaggctgttatgagcaacaaggaggagaaagaatgccaaatgaccaaagaagagaagaggcggaagaagagggagaaacataaggacatgggtcagagcggcgattatgagggtaaggctgttatgagcaacaaggaggagaaagactgccaagtaaccgaagaagagaagaaacggaagaaggggaagaagcataaggacaagggtcagggcagcaattctgatagctcatgtgccaggaaccatagcattgagatggagcaagctgatgtgtcagccaagatggctgaagactcctgcttggagcatgcagaggctgttacgagcaaaagctctgcgaagaaacacaggaagaaaaagaggaaagataaagaggttgaaactattggccagaagcagatactcgatgctgatgaaaatgttgggtcagaagatacgaagaggaacagcagagaaagggaacatgataggaagtcaaagaagcacaaacgaaagcatcaggatgacgagactgcctcaaatggttcttctggtaatcaaattgttttaggggaagataagaggacggaaaaagagtatttagttaccttggatttggaagaggacaataaatctgatatgtcaaagattgggaagaagacagatagcaagaagaagaggagaaaagagagaaatgatggtgttgacctaagacaaaatacactagttggagagggcaagaatggtaagaataacaaagagaaaaaaatgtgtgaggatgagaatggtggcggtgaaagagagaaagaaaacatgggaaagcagaaggataagtgtagacgagtgagcttcactgatcatgtggaggtgtttaatataggtggtagtgatgatgtagagggtgatgggagtggtgaaactgaacttgtgcatggacgacggtttagccctgaggaagatgcaaagctaatggaagcgatattgaaatatgcagagttgaagcaattaggagagaaagggttacagatgattggggaaagtaataagcatccagagaccaggggttgttgggctgaaataggaaaagcattacctcatagacccaagaaagccaaatacgcgcgtggaaaggttttacttcaaaggagtgctgaacgtaaatggaccgctgaggagtatgagataattcgacggtttgttgaaaagaacggccgaaattggaaggtaggacttggagtcaggatgagtaccaaaacttgtttgatttggtaaatctggacatgcgtgtgaaagcccatcaaaacatcaatactggtcaccgtcatataagagataacatttcttgggaggctatcagtgaaaaattaaccactcgtagagccgaagaatgctgcacgaaatggtacgggcaattggcatcgccgctggttaaacaaggaatctgggcagatacagatgactacatgttagtggaagcgcttcaaaatgtcgatgctgtttgtgctgaagatgtggactgggagaaccttctcgagcacaggtctggggagctttgccgtcatagatggaaccagatgattcgcctgatgggtgaccacagatataggcctttcattgagcaagtggaagtgcttgcaaggcggtactgcccagagatgcttgcgtacaggaaaccagtcgcaggtggatcctcggccgacgaacctgctggagcctctgacttgtaatatgggatctttagaaacgttagcagcatatggttctagagctgccaagggtgtcgtcagcactctgatctcaacaaactttggtattgttgagggcttatgtatcttctggatttgaaatcacggatgttttatcgcccaactaatcatgatttggggctcgattagagaacgactaggaatcaggccgtccagttagaactaatagtctgattaagtgttggatgactgttgaaaatgcaatgtgaacttagcagctgtgcacttgcacttttaccttggacttggaaattgccgttgccttcttggctttcaacc

SEQ ID NO: 207353 - DNA, 3543 bp, Zea Mays
caaggccaggtgggtcccccgaactcactcacggtcacggcaaccgccgccgcgacgccatcaacggcatcatcccatttccacttggatcccaacttcccaagccacctctgcttctcctccgtctcgtcgtcggccatgacacccgccggtggcgccaaccactccccggcgccgcgtagcctggtattcgccttctacctcaccggccatggcttcggccacgccacccgcgccatcgaggtggtgcggcacctgatcgcggacgggcacgaggtgcacgtggcgacggccgtgccggagttcgtcttcaccgccgaggtgcggtccccgcgcctccgcatccgcagggttatcctcgactgcggcgccgtccaggcagatgccctcaccgtcgaccctctcgccacgctggataagtaccgtgaggcggcagtgttaccccgcgagttcatcctcagggccgaggctgagtggcttagctccatcaaggcagaccttgtggtctcggatgttgttcctattgtgtgcaaggtggcttcagatctgggtgtccgctctgtatgcattgggaattttagttgggacttcatatatgctgaatacatcatggaggctggatatcatcaccgatctattgtgtggcagttgtgatctattaggtgaggaaggaactaggaattgaggagaatgctaaggtgctcgtttttaattttgggggtcagccagcaggatggaaactgaagcaagaatgtctccctgatggttggatttgtttggtctgtggtgcctctgattctcaagatgttccaccgaacttcattaagcttgcgaaagatgcttacacacctgatgttatggcagcatctgactgaaaaattggatatggaactgcaagtgaggctttggcctgcaagctaccattagtgtttgttcgcagagattacttcaacgaagagccatttttgcgaaatttgcttgagcactaccaaaacagcattgagatggtcagaagtgatttccttgctggacactggaaaccgtacctacttcgtgctctcacacttcaaccatgctacaatggcccaataaatggtggtgaggtggtttcccagattctccaggacactgctattggaaacaaatgtatttctgataaagctagtggtgcaagaagattgcaagatgccatggtctcaggatatgtacttcaaagggttcctgggagagatgcaggcattcctgactggtactctgtgtccgaaaccaaaactggtggcggtccgacctcacaaaatgttgctacaaaggaaagtgcagcattatgtattgaagacattgagatactccatggggaccttcaaggattaacagatacagtggactttttgaagagcttatctgaacttaatggaaatgatttgaagagccctaagaagcaagacctagagagaactgctgcatctgttctttttgactgggagacagaaatatatgtagcaagggcacctggacgtttggacgtcatgggtggcattgctgattattcagggagtcttgttttgcagatgcctcttcgggaagcttgccatgttgctgttcagagaaaccatcccagcaagcagaagctttggaaacatacaaaagcaagacagcttgttaacggaggcttggtacctgtgatacaaattgtatcatttggttctgatttgagtaaccgtgcaccaacttttgatatggacctgtcagattttatggatgatggtaaaccaatatcctatgagaaagccagggagcttttctgtcaggatccatcccaaaaatgggctgcctatgttgctggaacaattctagttttgatgactgaacttggtgcccagttcactgacagcattagcattctggtttcatctgccgtgccagaaggaaaaggtgtttcatcttctgcatcagtggaggttgctacaatgtctgctatcgccgcagcctatggtttaaacatcataccaagggatcttgctttgctttgtcagaaggttgagaatcatgtagttggagctccttgtggagtaatggatcaaatggcatctgcgtgtggagaagctaacaaactccttgcgatggtttgccagcctgccgaagtgaaggaattggttagcatacctactcatatacggttctggggtctagattcagggatacggcatagtgttggcgggggagattatggatctgtgagggtaggcacttacatgggacgaaagatgatcaagtgtacagcatcagatttagtttcagaatccttgacttcagggtcccctgctcagtctgattgttataaagaaaatggtgtgggcgtactgaaatctgaagctgcactggagtatttgtgcaacctaccacctcacagatatgaagctgtttatgcaaaagacattccagaggtgattagtggagaagcattttcagagaaatatggagatcacgatgacacagtgacagttattgatcctaaaagatcttacagtgtgaaggctcctactagacatcccatatatgagaacttccgtgtcgaggccttcaaaacgttattagaggcaggtaatacagacgagcagctgtcagcccttggagaacttatgtaccagtgccacaacagctacagcgcatgtggcctcggttctgatgggactgacagactagtcaacctggtacgagaagtgcaacacaggaggacatccgaaggcggaagccctagtctgtttggcgcaaagatcaccggcggaggctccggcggcacagtatgtgttgttgggaagaactgcgccaggagcagtgaagagattgcagagattcagcacagatacaaggctgagaccgggtatctgcccattcttttcgacgggtcgtctccaggagctgggaagtttggttacctgaagatccgacgtcgttgtccctagtggctgattgggaaacgaagaacttcagttcgagctttgtcacatatcactcaattgttaagaacctcactccaactctccaagccattgtagaacatagaggcgtattgccacttgcgatgattcgtcgttcacacacaaaatattatcatgtgctacaccaattctggaagctactagaggaaaatgtgaggaatataaagaaactcttgttgagcagatgtagtctagtggtctccgtgtgcttgctgcagtgtaaccaaactccaagtagatgtgctctgggctctggcatgtggtatgtgatgaagtcgaggatggtttcttgccgtttgatgaccagtgtagtcgttggttaacttgtcagtcgtaaactgatgttgtcagttaggagcggataaagtttgtgtgtgttgtcagtgtatctgtgtgtaagtttattggacagaccgaaagatacaccacgaacccagatgaagtaggtaatagtcgtatgtgaagtttttatcattagggttgcaaatgcattaaatcacttataaatatatgatgattataaacttcctctgcatttatttcc

SEQ ID NO: 207354 - DNA, 2461 bp, Zea Mays
gagcatgatataacaacacttggtttgttacttggtttggcagcatctcataggggaacaatggatcctgcaatatcaaagatgctctactttcatgttccttctcgacatccatcttctactccagagctggagttaccaactcttctacagtcagcagcagtaatgggaattggacttctatatgaaggctcagctcatgcactcaccatgaagatacttcttggtgagattggccgaagaagtggtggtgacaacgtgctagaaagggaagggtatgctgttgctgcaggttctgcattaggatttgttgccttgggtcatggcaatcgtgcatttggattcatggatactttcctagatcgactttttgaatatattggcaccaaagaagtctaccatgaaaagtacctaaatgcaacatctgccgatgatcaaagttgcaaccctggacagatgatggatggagcacaaataaatgttgatgttactgcacctggagcaatacttgctctagccttgatatttttgaaggccgagtctgaggagattgcagctagactcaatatccccaacacttacttcgatttgcagtatgtgaggcctgattttgttatgcttcgcattatagccaggaatttaatattgtggagcagaatacaacctaccaaaggatgggttgattctcaaattcctgaaacagtcaggtgtggtatttccaacatgagtgaagggactattgacagtgatgaattggatgctgaagctctttttcaagcttatgttaacatagtgactggcgcatgtattgcacttggactcaagtatgctggcagcagaaatggtgatgcccaagagctactctacgcttacaccgtctattttctaaatgagattaagcacatacctgttcgaacatcaaatatactaccaaagggattactacaatatgttgaccgtggaactcttgaactctgcttgcatcttattgttctctccctctctctggcattcaggcacctatatgtaatagctacagagcctcgatggattcagacagtggacattgacacagaacttccagtgtattgtccattggaagtgacagttgctgaaacggattattatgatgagaccaactattgtgaggtgacaccttgtcttctgccagaacgctcagtgcttaaaagcattcgagtttgtgggcctagatattggcctcaggtgataaaacttgcacctgaagacaagccatggtggagatctggagacaagacaaatccattcaatgggggagtactctacataaagcgaaaagttggatcttgctcctactctgacgatccaattggatgtcaatcgttaatttcacgggcaatgcatgaggtctgtgatgcaccatctgctagttgcagtaatcaaccaaacagcactaatggtagctacttcagagttgatcagctagtaagcactttctcggccaatccaagcttgattgcttttgcaaaactctgctccgtgtcatggaagagcagatgcaatagcaattttcaggagttctgttctcaagtgctatatgaatgtatgagcaaagatagaccatcactgttacaggcctatatcagtttttacacaacaatagagttaatgtgggagcatttgaagactgggaattttcctttttataattcccttttccttcccaacttgaaggtcgctttggcctacaacgaagcattagttgattctagaatcacaaatggaggaattattcattcgacattcttggagtcacttatgaagcgagtgggagacatctttgcggagctgccaaacctcaaggacaacctccaccgatacttgagcacgggcacatggcctgacacacaaaacgacgtggtggttctctcgtggtacctccaatggtacaatataccacctgcccatgttgtggcttctgcagttgagaaggtcagaccgagagtccctgccggtgtatctatgctcccactgcttcgcctcctgctgccaaccacacaccttgtgggactgatggagatcgagaaggtacagattgtcatggaatgctaaaggatgagcgtggaaaattcaatcaaccttctctgcatgcgggttacttgtgatgaacggtagcaagtattgcttagtgcacttgtgatgaaatctgccagggactaagctgttctgaattaagtttgagacaaaagaatcccataatttttattgtgctttgctttagattcatattttctgcatgaattgtttcgattctacccatgagaagtactccctctgtccttatcagaggtcaaaccctctaagtttgacaagtttatagaaaagagcaaccatataaaaatgtaagtcttatatatatatttcataatatacctaataaattttatgcggtattataaatataattgtggtcaaacattag

SEQ ID NO: 207355 - DNA, 618 bp, Zea Mays
tatcaaaggaaaagtacctaaatgcaacatctgccgatgatcaaagttgcaaccctggacagatgatggatggagcacaaataaatgttgatgttactgcacctggagcaatacttgctctagccttgatatttttgaaggccgagtctgaggagattgcagctagactcaatatccccaacacttacttcgatttgcagtatgtgaggcctgattttgttatgcttcgcattatagccaggaatttaatattgtggagcagaatacaacctaccaaaggatgggttgattctcaaattcctgaaacagtcaggtgtggtatttccaacatgagtgaagggactattgacagtgatgaattggatgctgaagctctttttcaagcttatgttaacatagtgactggcgcatgtattgcacttggactcaagtatgctggcagcagaaatggtgatgcccaagagctactctacgcttacaccgtctattttctaaatgagattaagcacatacctgttcgaacatcaaatatactaccaaagggattactacaatatgttgaccgtggaactcttgaactctgcttgcatcttattgttctctccctctctctggtga

SEQ ID NO: 207356 - DNA, 964 bp, Zea Mays
agcatgatataacaacacttggtttgttacttggtttggcagcatctcataggggaacaatggatcctgcaatatcaaagatgctctactttcatgttccttctcgacatccatcttctactccagagctggagttaccaactcttctacagtcagcagcagtaatgggaattggacttctatatgaaggctcagctcatgcactcaccatgaagatacttcttggtgagattggccgaagaagtggtggtgacaacgtgctagaaagggaagggtatgctgttgctgcaggttctgcattaggatttgttgccttgggtcatggcaatcgtgcatttggattcatggatactttcctagatcgactttttgaatatattggcaccaaagaagtctaccatgaaaagtacctaaatgcaacatctgccgatgatcaaagttgcaaccctggacagatgatggatggagcacaaataaatgttgatgttactgcacctggagcaatacttgctctagccttgatatttttgaaggccgagtctgaggagattgcagctagactcaatatccccaacacttacttcgatttgcagtatgtgaggcctgattttgttatgcttcgcattatagccaggaatttaatattgtggagcagtcaggtgtggtatttccaacatgagtgaagggactattgacagtgatgaattggatgctgaagctctttttcaagcttatgttaacatagtgactggcgcatgtattgcacttggactcaagtatgctggcagcagaaatggtgatgcccaagagctactctacgcttacaccgtctattttctaaatgagattaagcacatacctgttcgaacatcaaatatactaccaaagggattactacaatatgttgaccgtggaactcttgaactctgcttgcatcttattgttctctccctctctctggtga

SEQ ID NO: 207357 - DNA, 525 bp, Zea Mays
atggaccaatggggtagcgaaacgcgtcctgacaatttgttccgatcctcttatggttacgacccgcctgccgtccgctgccacacagcagcggagttagtgactacgcaatcggtcgagctcgtcgtgaggctcttccgctcttggtcggtggtgctgtttcgcgtcctgggaaaaatggatgcggaggcggcgagaaggaagcaggtggcgcctccgcaggagaagaggaagcgcggccggctggagctgcggcggatccaggaccggacgagccggcaggtgcgcttctccaagcgccggagcgggctgttcaagaaggcccacgagctctccgtgctgtgcgacgccgaggtcgcgatggtcgtcttctcccccgccggccgcctctatcactacgcctccctaggcaccagggtaccaagccgtggtggaggagcatttggccggaatggccgtggagggcgtgggcgcgttggacgcagccagcctgcgcgaggcaacaacagaccaccagcaaggcca

SEQ ID NO: 207358 - DNA, 539 bp, Zea Mays
atggaccaatggggtagcgaaacgcgtcctgacaatttgttccgatcctcttatggttacgacccgcctgccgtccgctgccacacagcagcggagttagtgactacgcaatcggtcgagctcgtcgtgaggctcttccgctcttggtcggtggtgctgtttcgcgtcctgggaaaaatggatgcggaggcggcgagaaggaagcaggtggcgcctccgcaggagaagaggaagcgcggccggctggagctgcggcggatccaggaccggacgagccggcaggtgcgcttctccaagcgccggagcgggctgttcaagaaggcccacgagctctccgtgctgtgcgacgccgaggtcgcgatggtcgtcttctcccccgccggccgcctctatcactacgcctccctaggcaccagcattgagaaaacattttgtcgttactgggaccttgccaacacagacattgatctcaatatcgaggcgcgagactcgagggacaactataatacacaggaagaagaaaccatggaccatctctt

SEQ ID NO: 207359 - DNA, 544 bp, Zea Mays
atggaccaatggggtagcgaaacgcgtcctgacaatttgttccgatcctcttatggttacgacccgcctgccgtccgctgccacacagcagcggagttagtgactacgcaatcggtcgagctcgtcgtgaggctcttccgctcttggtcggtggtgctgtttcgcgtcctgggaaaaatggatgcggaggcggcgagaaggaagcaggtggcgcctccgcaggagaagaggaagcgcggccggctggagctgcggcggatccaggaccggacgagccggcaggtgcgcttctccaagcgccggagcgggctgttcaagaaggcccacgagctctccgtgctgtgcgacgccgaggtcgcgatggtcgtcttctcccccgccggccgcctctatcactacgcctccctaggcaccagcattgagaaaacattttgtcgttactgggaccttgccaacacagacattgatctcaatatcgaggcgcgagactcgagggacaactataatacacagtgaagggaaccatccaatctgtatccttgag

SEQ ID NO: 207360 - DNA, 554 bp, Zea Mays
atggaccaatggggtagcgaaacgcgtcctgacaatttgttccgatcctcttatggttacgacccgcctgccgtccgctgccacacagcagcggagttagtgactacgcaatcggtcgagctcgtcgtgaggctcttccgctcttggtcggtggtgctgtttcgcgtcctgggaaaaatggatgcggaggcggcgagaaggaagcaggtggcgcctccgcaggagaagaggaagcgcggccggctggagctgcggcggatccaggaccggacgagccggcaggtgcgcttctccaagcgccggagcgggctgttcaagaaggcccacgagctctccgtgctgtgcgacgccgaggtcgcgatggtcgtcttctcccccgccggccgcctctatcactacgcctccctaggcaccagcattgagaaaacattttgtcgttactgggaccttgccaacacagacattgatctcaatatcgaggcgcgagactcgagggacaactataatacacagggctgattcatatagtccatcactacagaaaccaggtgtcg

SEQ ID NO: 207361 - DNA, 3762 bp, Zea Mays
atccccttctcctgggctggctggccagtgacggaccagccctctcccacctcgcacgcccctgtggctcctgaccttcccaccaccggagttaatgccgcctggcctggccgtctcgctggcgcggcgtgggacgtggtagcagtaccgcgcgtcgcggttgggccaatgggacgggcgtaagtgcgtaagcgaggacgcgaggtgaggtgtggagattgaggggtgggagctgttgtggcgcgtgtctccctgtcgcccgcagcttctttttattcctcccgtccggttccgttccggggaattgattctggggagccggcgcggccgcggctgctttgatcccttgccgcctgcctggcctgggctctcgtaccgcaaccgcaatttggcggcgtgcgtgttccttgcctagattggcgtgatccagctctgctccaaccgtagaagtgcgcgcacttgctgctagctaagaagcatctgcagtgatcgttccaggctcgtgaggaaactcatttgctcgaatcatgtccgactttgtcgggagcagatataccaagcaagaagatttccatgttttgttgagcaagaaagatcctggagaaccacctgaacataagcacgtcctgtggatggcacactggaccaaagcaagcagcaacaatggcagcagcaatcctttggagggtaccaccaagggcactactacgaaagatagcgagaccttgccttatgaattcacggaatctacggttgctaaaaggctcatggtaggagtaagccatggaagcgcctccatgcagcatgaccgacaattcaattctagtgtgtggggtatggcacgccatatttccaacgaattgggaccgaagaatagtgaacatgttgatgggtcttttgaaaaatttgtgaagaaggatgctgtgaacttgagagcaagggcagttgtgtcagaaacatactctgttcacaagctttcagagttaccgttggattttcagcaccttgggaactccgacgatccaagtccagattggagccactttccaatgttcgaaattaatcgaaagattgacagtattctcaaccgcaaacgaaggtctgcacctctgaatctaaatgcgtctgcatcccatgtattggccctatcgtcacaagaatacatgatgcactcacatcaaatagctgacgagaacttggatatgtgcagacctgcagaaggctttgcatctcacttagaagatcctgctggcctcaattcagatccttcagggccaaagttaaaaggacagttattggataccgtgtcatgttcttgcagcaaggacgacaccaattcagcagattgtctaatagacgagcagcatacaagccactattttgcaaactcaaagcatgaactgccctctgtatctaacgaaaagaagttcaagtttgcaggaaacaaccacaatcgaattcttgcaagtgcgtcccataaacatgaaagtgttgcagaggcaatgttctgtgcaccagtacttggtagtgagcttcagaatgaacctataactatttccaacatcggcaagaaggatggtgaaaacttccatgagatgtataattgtaatagcaaggctgttccttgttctttgttagctcatgagcaccatcgtcatctgaaaacacagagaacggaatctgcaggaaatttgaaagtctgcacgttacctgatcaacaaactgcaaatgaattggcagacaagagtaatggtgacctgctgacatatggaccaaagccaaagaagggctcttgcaaccgaagaagcctctatttattcgaaaagttaacgattccttccaaatcacaaagtgcatatcctaaaaattctgcgtcttcaggaaaatctagcggctttggagtttgtatgtacggcaccaatattggaagccagttattcggagcacagaatcaatcttcatctaagactgaaacattgcacagcgatgctcttattgggtccaaatcctcagcaggtgagaggtctagcatttttataatacagtgtcagctaagagtgtggtttaagtatggttgtttatgcgcaacatatatgctaacagagcagcgtcactggaatgtttcatctaatacatatcgggttttttttttcttttgctgatggtagcagtatcattctctgactcacacaatgttttctctttttttttttctggattgttgtaggcattgcttcattatcggcacaaaaggtatcagtgttccataatccatagcgatccgatctcctgtcttgcgcataaagagtgttcctggactacttatattgctcgatactaaaaactaaaaaagcagattttttttcaaaaaaaaactaaaaaagcagaatatggcttggaaccttttttgtattgtttggatggttttcaaagaaaaaaaaggtctataagttttgttgtcagaaatgcatctgatgtatcgtcaactttgtttttagtgttagtagatctttcttgtttatactctttcttggaatcttatcatatttatgttggtttgaatacacgtccacctacctgtttcttgtcattccacatgataattattccaagccgtgctcattagtcatggacccgtaccaaccagttgacagacctatgtactgattcttccattaccaataaatgtactacaggacaacggttgcccagccccagccccagccccagccccagacgaagcgaaaagcgagcagctagcagctccgtcgtccaacaccaagcagggaggagaatcagcatacagtaaagaagatggatctcataatctcaacgaaggccacgatgtttcgtccaaagcagctatcggtagcaagcaaccatgcatgcctggagcaggaatcacgaacctggatctcatactctcccagatgagcaggatgagaaaccagattcccagtggcggtgtaactcagccaccaataggcgccgagccaagtgatagatggctcaagcgcctgcagctcggcgtaccagaccctgacgtccttggttccaagaccaagaggccaaaagtcggagacagtcctccgccacccaggcaaataaaccggtcctttgacgtggcactcccttgcaacccaggaaaacaggaggagcagagcttgaatggaggggggaaagtgcagggaagagcccccccgattccagagaagagcgtcaatcgctggatagggagatggtgccagggcggcactcctgttttccgtgaaggcccaggccagggaaggcaggcaacgaaacctgctggccggttgtccgaggagcttgaaggacagttctttccaagcactgcggcgatggcgatgatggggcgcgcgatgcacaagctccggccgtgcgagcagcagcagaaggggccattcgtggtgtggaagatagattgacctttttgggtgtgatatacttgtttctttaaaaaaaataaaatgtaaggcaactatgcattttgcctggctgtggctcatggtttattgctttctggtagtggaagtagctaggtgtagtgcctactgattgtgtaatgctttgctgtaccaaaagtgtaatactatactgtttactgtgtcgttcgttatggtgatgtacaccatggagtaatcgaatgggacagacgaatgaactggaactggaaggtgagcatcatcagcatgtcgctactttgttggctgcttgcctcgatccgcctctatgtagttgcac

SEQ ID NO: 207362 - DNA, 2679 bp, Zea Mays
caggaagcgcccttgtgtctaaacaactcctgatggaacttctgaaagcatctgcagtgatcgttccaggctcgtgaggaaactcatttgctcgaatcatgtccgactttgtcgggagcagatataccaagcaagaagatttccatgttttgttgagcaagaaagatcctggagaaccacctgaacataagcacgtcctgtggatggcacactggaccaaagcaagcagcaacaatggcagcagcaatcctttggagggtaccaccaagggcactactacgaaagatagcgagaccttgccttatgaattcacggaatctacggttgctaaaaggctcatggtaggagtaagccatggaagcgcctccatgcagcatgaccgacaattcaattctagtgtgtggggtatggcacgccatatttccaacgaattgggaccgaagaatagtgaacatgttgatgggtcttttgaaaaatttgtgaagaaggatgctgtgaacttgagagcaagggcagttgtgtcagaaacatactctgttcacaagctttcagagttaccgttggattttcagcaccttgggaactccgacgatccaagtccagattggagccactttccaatgttcgaaattaatcgaaagattgacagtattctcaaccgcaaacgaaggtctgcacctctgaatctaaatgcgtctgcatcccatgtattggccctatcgtcacaagaatacatgatgcactcacatcaaatagctgacgagaacttggatatgtgcagacctgcagaaggctttgcatctcacttagaagatcctgctggcctcaattcagatccttcagggccaaagttaaaaggacagttattggataccgtgtcatgttcttgcagcaaggacgacaccaattcagcagattgtctaatagacgagcagcatacaagccactattttgcaaactcaaagcatgaactgccctctgtatctaacgaaaagaagttcaagtttgcaggaaacaaccacaatcgaattcttgcaagtgcgtcccataaacatgaaagtgttgcagaggcaatgttctgtgcaccagtacttggtagtgagcttcagaatgaacctataactatttccaacatcggcaagaaggatggtgaaaacttccatgagatgtataattgtaatagcaaggctgttccttgttctttgttagctcatgagcaccatcgtcatctgaaaacacagagaacggaatctgcaggaaatttgaaagtctgcacgttacctgatcaacaaactgcaaatgaattggcagacaagagtaatggtgacctgctgacatatggaccaaagccaaagaagggctcttgcaaccgaagaagcctctatttattcgaaaagttaacgattccttccaaatcacaaagtgcatatcctaaaaattctgcgtcttcaggaaaatctagcggctttggagtttgtatgtacggcaccaatattggaagccagttattcggagcacagaatcaatcttcatctaagactgaaacattgcacagcgatgctcttattgggtccaaatcctcagcaggcattgcttcattatcggcacaaaaggacaacggttgcccagccccagccccagccccagccccagacgaagcgaaaagcgagcagctagcagctccgtcgtccaacaccaagcagggaggagaatcagcatacagtaaagaagatggatctcataatctcaacgaaggccacgatgtttcgtccaaagcagctatcggtagcaagcaaccatgcatgcctggagcaggaatcacgaacctggatctcatactctcccagatgagcaggatgagaaaccagattcccagtggcggtgtaactcagccaccaataggcgccgagccaagtgatagatggctcaagcgcctgcagctcggcgtaccagaccctgacgtccttggttccaagaccaagaggccaaaagtcggagacagtcctccgccacccaggcaaataaaccggtcctttgacgtggcactcccttgcaacccaggaaaacaggaggagcagagcttgaatggaggggggaaagtgcagggaagagcccccccgattccagagaagagcgtcaatcgctggatagggagatggtgccagggcggcactcctgttttccgtgaaggcccaggccagggaaggcaggcaacgaaacctgctggccggttgtccgaggagcttgaaggacagttctttccaagcactgcggcgatggcgatgatggggcgcgcgatgcacaagctccggccgtgcgagcagcagcagaaggggccattcgtggtgtggaagatagattgacctttttgggtgtgatatacttgtttctttaaaaaaaataaaatgtaaggcaactatgcattttgcctggctgtggctcatggtttattgctttctggtagtggaagtagctaggtgtagtgcctactgattgtgtaatgctttgctgtaccaaaagtgtaatactatactgtttactgtgtcgttcgttatggtgatgtacaccatggagtaatcgaatgggacagacgaatgaactggaactggaaggtgagcatcatcagcatgtcgctactttgttggctgcttgcctcgatccgcctctatgtagttgcac

SEQ ID NO: 207363 - DNA, 1546 bp, Zea Mays
tggtcccatgggcccagaatggtggctgccagcaagacgaagatctacatggtgcttgagctcgtcaacggcggcgagctgctggacaggattgcggccagtgagggaaagctcccggagcaggaggcaaggaggctcttccagcagctggttgatggtgtaagctactgccatgaaaagggcgtctgtcacagagacctcaagctggagaacgttcttgtcgaccggaagggaaacatcaagatctctgatttcgggctcagcgctttaccgcaacatctcgggaacgatgggttgctgcacacgacctgcggtagccccaactacattgcccctgaggttctgcagaacagagggtacgacgggtcgctatcggacatctggtcatgcggggtgattctctacgtgatgctcgtagggcacctcccgttcgacgaccggaacatcgtcgttctctaccagaagattttcaagggcgatgctcagatcccggagtggctctctcccggcgcacggaaccttctccggaggatccttgagcccgacccggcggagcggatcgccatggcagagatcaaggcgcacccatggttccaggagcactacgtccctgtccttcctccgtacgacgacgacgacgaccacgattcagtgaagcaaatcggtgcgggtagtaaaaccactcatcacatcaacgcgtttcagttgatcggaatggcgtcgtccctagacctctcagggttttttgaggaagaggacgtgtcccaaaggaagatcaggttcacgtccgcacaaccgcctgaggatttgttcgccgagatcgaacgctctgcgactgacatgggcttccatgttcacagagggcatagtaagcttaggctgacgcgaaactgcgaccggtcgaagaatcagaagaaccctatgtcgtcgtcgtcgtcgtcgtttctagtctgcaccgaggtttttgagcttagcccctctttgtatgtcgtggagctcaacaagtcccatggcgaccctgcactgtacaggcagctctgtcagaggatctgcggtgacctaggtgtgctcgagatggaccagatctttgggacgaggccgccggtcgccgacgatctcgcgggcttggccttggcgttggagagacgatctgcgacgcctttggttgcgttgtgacgaaaggctgcccccgccggcccccctgaccgtgatgtttgtagcgtcagattatttagtgacgacgaagcagttcagctgcaacgcagctcggaacggttgtgtgatccctcccagaaatagaggacaaggtaaaagagtgtagccgtacacgtgtaggatcatgctccaatgtaaataaagtggtagtagccaccgatgtaaaactgaatgtaaaatctaagaaataaatcgtttatccagtacacagaagctctatagtggtggtactagagctatttgtactaacgtttttcagtgccaccagggtcagtagaaatcgtccttttcactgacggttgttttgcaactgtcagtgcaaataacatta

SEQ ID NO: 207364 - DNA, 1547 bp, Zea Mays
cttgacaagaacagaggcagcggtctccaaatcaacaggaaaggtggctgccagcaagacgaagatctacatggtgcttgagctcgtcaacggcggcgagctgctggacaggattgcggccagtgagggaaagctcccggagcaggaggcaaggaggctcttccagcagctggttgatggtgtaagctactgccatgaaaagggcgtctgtcacagagacctcaagctggagaacgttcttgtcgaccggaagggaaacatcaagatctctgatttcgggctcagcgctttaccgcaacatctcgggaacgatgggttgctgcacacgacctgcggtagccccaactacattgcccctgaggttctgcagaacagagggtacgacgggtcgctatcggacatctggtcatgcggggtgattctctacgtgatgctcgtagggcacctcccgttcgacgaccggaacatcgtcgttctctaccagaagatcccggagtggctctctcccggcgcacggaaccttctccggaggatccttgagcccgacccggcggagcggatcgccatggcagagatcaaggcgcacccatggttccaggagcactacgtccctgtccttcctccgtacgacgacgacgacgaccacgattcagtgaagcaaatcggtgcgggtagtaaaaccactcatcacatcaacgcgtttcagttgatcggaatggcgtcgtccctagacctctcagggttttttgaggaagaggacgtgtcccaaaggaagatcaggttcacgtccgcacaaccgcctgaggatttgttcgccgagatcgaacgctctgcgactgacatgggcttccatgttcacagagggcatagtaagcttaggctgacgcgaaactgcgaccggtcgaagaatcagaagaaccctatgtcgtcgtcgtcgtcgtcgtttctagtctgcaccgaggtttttgagcttagcccctctttgtatgtcgtggagctcaacaagtcccatggcgaccctgcactgtacaggcagctctgtcagaggatctgcggtgacctaggtgtgctcgagatggaccagatctttgggacgaggccgccggtcgccgacgatctcgcgggcttggccttggcgttggagagacgatctgcgacgcctttggttgcgttgtgacgaaaggctgcccccgccggcccccctgaccgtgatgtttgtagcgtcagattatttagtgacgacgaagcagttcagctgcaacgcagctcggaacggttgtgtgatccctcccagaaatagaggacaaggtaaaagagtgtagccgtacacgtgtaggatcatgctccaatgtaaataaagtggtagtagccaccgatgtaaaactgaatgtaaaatctaagaaataaatcgtttatccagtacacagaagctctatagtggtggtactagagctatttgtactaacgtttttcagtgccaccagggtcagtagaaatcgtccttttcactgacggttgttttgcaactgtcagtgcaaataacatta

SEQ ID NO: 207365 - DNA, 1833 bp, Zea Mays
gagaggagcgggcacgacggctgcaggagacccagatgagctgatcgagcagcccgtcgccaagccaaccggacatggtgagcgacggcgcgcgcgggctgctgggcgcgtacgagctcgggcggacgctcggggagggcaacttcgggaaggtgaagcaggcgcggcaccgcggcagcggcgggcagtttgccgtgaagatcatggagcgcgccagggtgctgtcgcagcgcgcggacgagcagatatgccgcgagatcgccacgctcaagctgctcgcgcaccccaacgtcgtccgcctccacgaggtggctgccagcaagacgaagatctacatggtgcttgagctcgtcaacggcggcgagctgctggacaggattgcggccagtgagggaaagctcccggagcaggaggcaaggaggctcttccagcagctggttgatggtgtaagctactgccatgaaaagggcgtctgtcacagagacctcaagctggagaacgttcttgtcgaccggaagggaaacatcaagatctctgatttcgggctcagcgctttaccgcaacatctcgggaacgatgggttgctgcacacgacctgcggtagccccaactacattgcccctgaggttctgcagaacagagggtacgacgggtcgctatcggacatctggtcatgcggggtgattctctacgtgatgctcgtagggcacctcccgttcgacgaccggaacatcgtcgttctctaccagaagattttcaagggcgatgctcagatcccggagtggctctctcccggcgcacggaaccttctccggaggatccttgagcccgacccggcggagcggatcgccatggcagagatcaaggcgcacccatggttccaggagcactacgtccctgtccttcctccgtacgacgacgacgacgaccacgattcagtgaagcaaatcggtgcgggtagtaaaaccactcatcacatcaacgcgtttcagttgatcggaatggcgtcgtccctagacctctcagggttttttgaggaagaggacgtgtcccaaaggaagatcaggttcacgtccgcacaaccgcctgaggatttgttcgccgagatcgaacgctctgcgactgacatgggcttccatgttcacagagggcatagtaagcttaggctgacgcgaaactgcgaccggtcgaagaatcagaagaaccctatgtcgtcgtcgtcgtcgtcgtttctagtctgcaccgaggtttttgagcttagcccctctttgtatgtcgtggagctcaacaagtcccatggcgaccctgcactgtacaggcagctctgtcagaggatctgcggtgacctaggtgtgctcgagatggaccagatctttgggacgaggccgccggtcgccgacgatctcgcgggcttggccttggcgttggagagacgatctgcgacgcctttggttgcgttgtgacgaaaggctgcccccgccggcccccctgaccgtgatgtttgtagcgtcagattatttagtgacgacgaagcagttcagctgcaacgcagctcggaacggttgtgtgatccctcccagaaatagaggacaaggtaaaagagtgtagccgtacacgtgtaggatcatgctccaatgtaaataaagtggtagtagccaccgatgtaaaactgaatgtaaaatctaagaaataaatcgtttatccagtacacagaagctctatagtggtggtactagagctatttgtactaacgtttttcagtgccaccagggtcagtagaaatcgtccttttcactgacggttgttttgcaactgtcagtgcaaataacatta

SEQ ID NO: 207366 - DNA, 1117 bp, Zea Mays
tttgatttgtggccatctggcatgtgccccttggacatgttccaagagccttcttccctgattccgtggccaccatcatttggtccctagcatattccgtgcccgtttgtgccatcatctcccgcgccgcgcgcgagtgcaacctctataaaagaagccacagtgcagcgtcgaagctcacaagcagcgagatctcgatcaaacagcttctctgatctcgctcagaagcgaggacatcagacattattgcaattgtatttgcacagcagcgagatctcgctcagaagagactctgaagagataacgagctgcgcttcttcgtcctcgatcaactagcttctctggtcgcttccatatggagagagctgcgtcaagctgcgctagcctcctagcacaaaggaggtgctactccgtggccgcggtcgtggtgaagggatgcgggcggaaggccgtggagaaggtggccaagcgcatcatgggcaaggaggtgaacaccgcggctgcctccggggagaagacgccgtgggtgccggacccagtcactggctactaccgcccggcgggtggcgccaaggaggtggacgcggcggagcttcgcgccaggctgctcaccaagaggatcgccaactgaatcaatctagctgcagagcagtgcggctgagattatttagcgccagttcatctcttgggcctagagcatgacggtgctgtatctttttgaggcataactagggaatggtcaggatcgctaacagttgtggcaaagcactcattgcagacaagaaagatggtagtgaggttccatacacttcggacaaggagcatgagccaccacgtgagctgactggtgatccttggtgatagctctaccacacccaccctggacaagccatgcacaacctaggtccctccaaccatgtcacctgtggacgatggccagcctatcgacctagccctagcgaccaccacagaggtgcctgcgctgaacctgtggcaacgcctaccatggacaaggacattgtcaatgcttcttcaatcgtggacaagaatgagacagtatttgcacaacgctcactgcgcgagagcctaacagccaagcttgcaagctattttttcg

SEQ ID NO: 207367 - DNA, 2160 bp, Zea Mays
gcatattccgtgcccgtttgtgccatcatctcccgcgccgcgcgcgagtgcaacctctataaaagaagccacagtgcagcgtcgaagctcacaagcagcgagatctcgatcaaacagcttctctgatctcgctcagaagcgaggacatcagacattattgcaattgtatttgcacagcagcgagatctcgctcagaagagactctgaagagataacgagctgcgcttcttcgtcctcgatcaactagcttctctggtcgcttccatatggagagagctgcgtcaagctgcgctagcctcctagcacaaaggaggtgctactccgtggccgcggtcgtggtgaagggatgcgggcggaaggccgtggagaaggtggccaagcgcatcatgggcaaggaggtgaacaccgcggctgcctccggggagaagacgccgtgggtgccggacccagtcactggctactaccgcccggcgggtggcgccaaggaggtggacgcggcggagcttcgcgccaggctgctcaccaagaggatcgccaactgaatcaatctagctgcagagcagtgcggctgagattatttagcgccagttcatctcttgggcctagagcatgacggtgctgtatctttttgaggcataactagcttcaagttcggaccgtctgaataaagttatccctgcataaacagggggttagagaagtggactcacatatccagtttctgtattgaagcaaacaatattctggtgaccttgagcatatgcaaagcactgtagcaaagtgagcactgaaacagaaatgaatagcaaaatattatcacatcaagcaaccttccatgggggtgctctgcaagcgcctgcttaaagtggttccagaaaatgacttagtaaaacaattaaatatgcctacttgatggcattgctcaacattgtttatataccattctccaacaaaacgcttgacgtacttgagcgtgtcgggatgactgattgtaaaccgtgctcaactcatgtgaacactcaggtgaaactctcaacagcttagggctggccaatcagcacatacggaaataattttagggcttagggttggccacaagaaactactatcatgtatcatacaaagtacttttttctcgaacacgtaggagagctacacatcattttataaaagaggaaaaaaaacaggggaaaagaatcccttacaagaaacccacttcaatccccaaccttgggagaaaggagttgagaaaacaaagacgaatccgcgcctgagacaaacaggatcgacctctagaaaggagagagttaaaccatccctccttcacgaccaaaaaccacccaccccactcactaaagcctagagcttagcagctcctgccaaacaccacaatctaacttcttctctgctgaagttctaggccaccgaaagagaaggagaggcacactcaaaagaagtaaacaaggctactgaattgtttgatttcttaattgtcagaccactcaatcacacaaatatcaaatggcaaatgagtctagctacatttcacacagggaacacacttggctacacaaacagacattcaattgaaacttgtattctacatggaaggttagacaaagtgagagatggcaaactaatagtcttttggatgcatgtcgccaaaattccatacaatgcaacatcgtaatcgaagcaagaagcaaaagtgggaacaaacaaatacctcactttccatgggcaataaactcctcacaccatgctgctcaaatttcgatgccagaaactgccctccagcaactaaccatggtgtcatagccattgaaatgtcaacgactaaaaatagcaacgatgttaattgaggtgatagaagaccctgtaaaatagtgtgttcattagtttcccctctgctctataacatttatccatagcacaacaatcatatgattcgtgacatacaacaattatagatgttcctatgatcaactattgtgtacatgagaagtaggtctagagacataaaaagagttctagttgttgtttctgaagaatgtatattgtggtgttgggctggaactaaggctctgcaatagctcttaggcgctggccgtgttaattttactggtgtgtggagctaggagtcctgtacttggttaattg

SEQ ID NO: 207368 - DNA, 1454 bp, Zea Mays
ttaactgatcgaacagcgtccatggagtcattcgacatgttaggcaggcgtttctcgagcaggacaatgagttggctgaaatgaggcagagactgcaagagcgtactgaccgtctgggggatctgaagacgcgcgccaagaagctgtcagaggatgttgtggttcggagggaacagctttgtgtcaagatcagaacgttgtcaggggcaagcaaggctctcgaggctgcacgcagcaatctgaaggaagctaatgaattgctgtcaggggaaaatggttgtgggcgccttaaagatctggaacagcagttacggatgagacagcaatatatggtagcgcaagttgctcagatatatcctgtgaggcctttggatgaacaatcttcagatcacaaacctggatttacttccaacataacgaaaacaagtaatgttgaatcagtgttgccaaatagcccccaaaacagacctttggtcatattgggtctacagttatcaaagctttctgtgaaaaagactggctacttcagtgacaagacagaggttcagaaatcttcgactgttcttggatatgctgctcattctccctcattgcatcctatctcaatgttcctcttcggtatcctttgcgctttggaggttcacggtcatatgttctcgaccctgcgccttcagttgagccatcatctataacctcagtaggaacgtctgtccctcccagcacaagcatgaggacaacggagttccctctgtttcttgacagccaggagacaacaaggtcatcatatgcgatattcttgttgaacaaggatatcgagcaacttctgaattacattggcgctgaaagcctcgggccaagacatgtcctagcaaacctgaagcagctgacaacgatcatccagtcacaaggatacatttctgatggttagtttaacccagatacagttttggtgctgtgagtttagtccagaagacacaggcacccttttttttaacccccctttgagtcttgagtcttgacacacaagagttggtcgctgtctctgtgctgacacgctcattgtaaatgagcaaaatggagtcactaccaggttgtacaggaaagatgtggatcatactactgtactgtgctatatacgcagcaaccggaggcgcttgttcatgggaaaattatccatgttgtagcgtgtttcttgatgtggatagcgctggtgagaaacacggccctggttcaactgcgcatggctgcggatggtcgtgctgtgatccattggccgacgtgtggtcgacagcactggtactgaaacctgctgacccaagttctagcttaggttgctagtggggattagggacacatgggcggatgcgcgatgcgtgccaagatgaactaggtcctgtctcgacacgcgattgcgtgcatctctaccctggcgcggcacgcttttgtggcggtga

SEQ ID NO: 207369 - DNA, 2911 bp, Zea Mays
gacaaatttgatagaaacatgcctcaaagttcaaactactgttgagaagcgaaataaccgagatttccaagtccgttcaagagtctatttccaactgcttcgtgctttcccaggtcctccatttcacccccatcgccgtgcaccggcaccagcgcgggcgcgcctcgccgcccccaccgccgtatcaacgcacgaggatgctgccgcacgcgccatcccgaacctcgggggccctcaggttcaaaccgcacctccccaccaagccgccgctcctcacctcttcctccaccgccacccccgcctctgcctccgcctccacgcgcggccgcctctgcgccgccgccgccgccgccgccacacgccgggacctcctcgtcctcgtcccctcgctagtcgcagcgtccaccgtcctccagtcccttcccctcgccgcctccgccgcggcaggcgatgacaagccggccccaccgacgccggctcaggcgcaggcgcccgcctctccggcctcgcctccgcctccgcctccagcggacgagcctgctctgtcgagggtatacgacgccacggtcattggggagccccaggccgtcgggaaggaagcgcggcggagggtgtgggagaagctgattgcggcccgggtggtgtacctcggtgagtccgagctcgtgcccgaccgcgacgacagggtgctcgagctcgagatcgtcaggaagctcgcggccggctgcgccgaggccgggaggagcatctccctcgcgctcgaggcctttccctgcgacctccaggagcagctcaatcggttcatggatggcagaattgatggcaataccttaaggctttatacatctcactgggcaccagagcgatggcaggagtatgaaccacttctgaattactgccgtgataatggaataaagcttgttgcatgtgggactccacttgaggtggtaagaactgtgcaagcagaaggaattagaagcctttcaaaagctcaaagaaagctttatgctcctccagctggctcaggcttcgtttctggctttacatccatctcaggtcgatcattgatagacaaaatttcatcaactcgtggttccccttttggcccaagctcatatttatcagcacaggcaagagtagtcgatgattataccatgtcccagacaataatgaaagaaattagtaatggagatccttcaggaatgctcgttgttgtaactggtgcgagtcatgtaatgtatgggccacgaggaattggcgttcctgctaggatatctaaaaagatgcaaaagaaaaatcaagttgtgatacttcttgatcctgagaggcaaagtataaggagagaaggtgaaatccctgtagctgatttcttatggtactctgctgccaagccatgcagtcggaattgctttgatcgtgctgaaattgctagagttatgaatgctgctggcaggaggcgtgaagctttacctcaggatcttcagaaaggaatagatcttggtgtagtttctcctgagatattgcagaacttctttgacctcgagaaataccctgtcatggctgaactgattcaccgtttccaaggttttcgtgaaaggttgctagcagaccccaagtttctgaatagattagctattgaagaggccatatcaataactaccactcttctagcacaatatgaaaaacgaaaaggacgtttttttgaagagatcgactatgttctcactgatacaattaggggttctgttgttgacttctttacagtgtggcttcctgcacctacaatttcactcttatcttttgccgacgatggctctggtgagagtgtggagcttctgaaaggaattttaggatcactgccagataatgcatttcaaaagggtattgttgggcagaactggaacattaaccagaggtttgcatcggtgcttatgggtggtctaaaacttgctggagttggattcatttctagtattggagctggagttgcttcagatgtcttatatggtgcccgtcggattcttaaaccttctgcaaatatggaagtggggcgcaaaagatctccgatctggaaatcagcagctgtttatagttgcttccttggaacatcagcaaacctgcgatatcaggtcatagctggtctgattgagcatcggctaggagagaatctgatggcctactatgaccagccacttattgctaacctgttgtcctttgtttcaaggacagttaactcatactggggaacacagcataggaccaaagactgtagaataagcaatggatcgatcttgcacgagttacaggcgtgcaaagaactaacaaagagctgccttctcctgaggtttcgagcgcatctgaaatgccactgctagaatgtggcacggcagaggtacagaatgcggacgacagcagtaaccagtcaaatgacttgacataagttatcgcgcagtggccatacaaaacacagagcagcttccttccatggcacaccgtatactagacaaaccgtacatgcatataaatgggactgtcttcttagagccaggctgtgaagcttagccatcgcgtcatgtggagagacgaatctgaaatcctgaagagtaaagcttttgaagactttcgacttgttatgatcacagccatttttacacaccatcatggggtgaataccgtttgtacattcatagaggagacggccgaagaattctttggagcacgtacagcattttacacgtgaaatttgttcagaaaacattactggagattgtcacatggcaaaaaggatcaggatcgttgcttgtgaattgtgatgcaccttgtatgcaatgcacttgaatccagagtgcacgtgtgattttattgtctgaacgaaccgtgcgacggcctgatgtttcctgtggtattgctg

SEQ ID NO: 207370 - DNA, 1709 bp, Zea Mays
ctccagccactcaacgacccccggttccccggtctcggactctcggtctcgcacgctccctccccatccccaattcggtttcgctccgccccggctgccgcacccatggcctcctcctcctcgctcttctcgccgtgcgccctcaccgccaagctcgggatagggcacgcgtcctatggctccggacgccgcgccaacttgcgccggcgcggccgcctctcggttgtggccgtacagacgggcccgcagaagccgtctccgtcgtcgtcccaggccgccgcggcggaggatgaggcggatgcgctgcagaagcttctgaagagggagtacaagtacgggttcgtatccgacttcgagtccttctccatccccaaggggctgtcggaggccaccgtccgccgcatctcggagcttaaggcggagccggcgtggatgctggacttccgcctcgccgcctaccgccgcttcctcaccatggtcgagcccacctggagcgacaacgagtacgcgcccgtggacctgcagtccatttgctactactccgcgcccaaaaccaagcccaagctcaatagcctcgacgaggtcgacccggagctgctcaagaccttcgaccgcctcggcatcccgctcaccgagcagaagcgcctctccaacgtcgccgttgacgccgtcatcgactccacctccatcgccaccacccaccgcgaagcgctcatggccaagggcgtcatcttctgctccatctccgaggccatccgcgagtacccggaccttatcaggcgttacctgggcagcgtcgtaccgccaggcgacaactactatgccgctctcaactcagcggtgttcagcgacgggtccttctgcttcgtgcccaaagacacagtctgccccatggaaatctcgacctacttcaggatcaacgacaaggagaccggtcagtttgagaggactctgattgtggccgatgagagaagcacagttagctatttggaaggctgcactgcaccagcttacgactcgaatcagctccatgctgcggttgtggagcttgtgtgtgaggagggggcagagatcaagtactccacggtgcagaattggtactctggtgatgaggagggcaaaggaggcatttataactttgtgacaaagaggggacggtgcaaagggcatggttcgaagatctcatggacacaggttgagactggatctgctattacatggaagtacccaagcgtcgagctcatcggggacgatagtgttggagaattctactcggttgcgcttacaaaggattgccaacaagcagacacagggacaaaaatgatccacaaggggaagaattcacgcagccggatcatatccaagggcatatctgcagggaagtcaaggaattgctaccgcggcttggtcctgatgaaccctagtgcggagaatgcttataattcttcacagtgtgactcattgctgatcggggataatgcggctgcgaacacctatcccaccattcagggcatatttataagggtaggcctggtgaagtggttagagctgtctcactgagtcaccaggtcacgggtttgaagtcgtctctctgcatttgcggggaaaggcttgcctcggtttatctcttccctagaccctgcttatgtgggatgttggagcgagcttggcagggtctctcacctcacacactcgctggaacagagaac

SEQ ID NO: 207371 - DNA, 1615 bp, Zea Mays
cggttccccggtctcggactctcggtctcgcacgctccctccccatccccaattcggtttcgctccgccccggctgccgcacccatggcctcctcctcctcgctcttctcgccgtgcgccctcaccgccaagctcgggatagggcacgcgtcctatggctccggacgccgcgccaacttgcgccggcgcggccgcctctcggttgtggccgtacagacgggcccgcagaagccgtctccgtcgtcgtcccaggccgccgcggcggaggatgaggcggatgcgctgcagaagcttctgaagagggagtacaagtacgggttcgtatccgacttcgagtccttctccatccccaaggggctgtcggaggccaccgtccgccgcatctcggagcttaaggcggagccggcgtggatgctggacttccgcctcgccgcctaccgccgcttcctcaccatggtcgagcccacctggagcgacaacgagtacgcgcccgtggacctgcagtccatttgctactactccgcgcccaaaaccaagcccaagctcaatagcctcgacgaggtcgacccggagctgctcaagaccttcgaccgcctcggcatcccgctcaccgagcagaagcgcctctccaacgtcgccgttgacgccgtcatcgactccacctccatcgccaccacccaccgcgaagcgctcatggccaagggcgtcatcttctgctccatctccgaggccatccgcgagtacccggaccttatcaggcgttacctgggcagcgtcgtaccgccaggcgacaactactatgccgctctcaactcagcggtgttcagcgacgggtccttctgcttcgtgcccaaagacacagtctgccccatggaaatctcgacctacttcaggatcaacgacaaggagaccggtcagtttgagaggactctgattgtggccgatgagagaagcacagttagctatttggaaggctgcactgcaccagcttacgactcgaatcagctccatgctgcggttgtggagcttgtgtgtgaggagggggcagagatcaagtactccacggtgcagaattggtactctggtgatgaggagggcaaaggaggcatttataactttgtgacaaagaggggacggtgcaaagggcatggttcgaagatctcatggacacaggttgagactggatctgctattacatggaagtacccaagcgtcgagctcatcggggacgatagtgttggagaattctactcggttgcgcttacaaaggattgccaacaagcagacacagggacaaaaatgatccacaaggggaagaattcacgcagccggatcatatccaagggcatatctgcagggaagtcaaggaattgctaccgcggcttggtcctgatgaaccctagtgcggagaatgcttataattcttcacagtgtgactcattgctgatcggggataatgcggctgcgaacacctatcccaccattcagcacgaagccgacggtggcgcaaccggaccccacttgagatcgacgctccgctgggatctcctcgtgcagcggtgcaggtgccatcgattcctcccagcacggtcaacatccctttacgattccttac

SEQ ID NO: 207372 - DNA, 1345 bp, Zea Mays
ttatattcgtcgaacttacctgcgttggagaagacattgatgatttgcagtacacacctaaacccgaatttgaggggtattttagagttaagaatgttcaaactgagttggatctacttaaagcatggttttctcacatgcaagaggttaagcctggcatttatgttacatacaacgatgacttttttgactggccatttttagagaagagggctgcacaccatggaataaaaatgaatgaggagattggtttccaatgtgacaataaccagggcgagtgtcgggctaaattttcttgccatcttgactgttttgcttgggtgaagcgagacagttaccttccacaaggaagccaaggtctaaaggctgttacaaaagccaagctacgttacgatcctctggaggttaatccagaagatatggttcgctttgcaatggagcagccacagacaatggcttcgtattctgtatcagacgatgttgcaacatactatctatacatgacttatgtccatcctttcatcttttctcttgcaaccataatacctatgttacctgatgaggtactgtggaaaggaagtgggacactttgtgaaattctgctaatggttcaggcattcaaggctggaggcacacaactatgaatagtgcatcttctaaaatctctcactaaatcagctagctcttctcactaaatcagccagctcttctgcttgtcccattgtcatccagatacttatttgggatgttgaagtacaaccaaatagacatgctgtcctaggagcaagcgagtctcgccctgatctgcacgattactgggggtctaggaatatttgcaacattgtttccaagctggatagccacatgaatgggtttacaagccccatataataaatcataacagtgcgggagcattttttggatgtccttcacacagatgcaggcaatgaaagaaacagaaaatagacaatgttagcgcggagtgagacagataggaattgggatagaatcatccttgttctcagatcagctgtacattctttattaaggtagtatatcatacatgtacgagtagactgacggttgcttccaaatactccatgtgtttgaaatatgtattgtatgtgatattctgtgttgcatgtgattttatgtttgtctaattttttatttctgtattttttatttttttttctgaaaaagggataagaacgtgggtaccgtcaaacataatgtgcagtccacgtagacccacgcaggccagataagttcgacggccacgtggccccgtcgaacttaacaataagaacgtgggtaccgtcgaacttatgagaacaaattcgac

SEQ ID NO: 207373 - DNA, 3066 bp, Zea Mays
ccaccaccaacctatcccccaccgcgtcacgcgcctccacctccccagatcggcggcgaaccggggggcccggacaggcggcggagagctcgaggcgtcatggcgaagtcgagcgcggacgacgccgagctgcggcgcgcgtgcgccgcggccgtggcggcgtcaggcgcgcgcggggaggaggtggccttctccatccgcgtcgccaagggccgcggcatcttcgagaagctcggcaggctcgccaagccccgtgtcctcgctctcaccgttaaacaatcatcaagaggcgaggcgaacaaagcttttcttcgagtattaaaatattcatctggggcagtgctcgagccagccaaactttacaagctgaaacatctaacaaaggttgaggttatttccaatgatcccagtggttgtacatttgttctgggatttgataaccttaggagtcagagtgttgccccaccacaatggacgatgcgtaacattgatgacagaaatcgtctacttttttgtattctgaatatgtgcaaggagatactcagttatcttccaaaagttgttggaattgatattgtggagctagctctttgggcaaaggaaaacacactgaccatagataatcaagtgagtacccaagatggtcaagaaacatcagttgctactcaaaccgagaggaaagtaacagtaactgttgaaaatgatctcgtgtcccaagcaaaagaggaggaagaagacatggaggcacttcttgacacgtatgttatgggaataggtgaagcagatgcattctctgagagattgaagcaggagcttgtggctttggaggctgcaaatgtatatcaattactggaaagcgagcctttaatagaagaggtcttgcagggtctggatgctgctagtgcaactgtagatgatatggatgagtggctacggattttcaatctgaagctgaggcacatgagagaagatattgcatcgattgaatcacgtaacaatggcttggagatgcagtctgtaaataacaaagggcttatggaagagctagataaattgcttgagcgtctgcggattccacaggagcatcattaactggaggctcatttgaagagtcacggatgctgaaaaatgttgaggcatgtgaatggttgacaggggccattcgcagtcttgaagttcctaatttggacccatgctatgtcaacatgcgcgctgttagagagaaaaaggcagagctggagaaactgaaaacaacttttgttcgacgagcatcagagtttttgcggaactacttctccagtttggtagacttcatgatcagtgacaaaagctacttttcacagcgtggacaattgaagcggcctgatcatgcagaccttaggtataaatgcaggacatatgcccgacttctgcagcacttaaagagtctggacaagagctgcttaggtcccttaaggaaggcatactgtcattcccttaatttactactacgacgagaggcacgcgaatttgccaatgaacttcgtgcaagtacaaaagcaccgaagaatcctgctgtttggcttgaaggttctggcggctctggtcataatggaagcagttctgatacttcacaggtctcagatgcatactcaaagatgcttacaatatttatcccgcttcttgtggacgagagttccttttttgcacattttatgtgctttgaagtacctgcacttgttccagctggttctcctaatgctaataagagcaaatccggaggaaatgacccggatgatgatctgggtcttatggatccagatggcaacgatctgaaacctgacagtacctctgctgaactgggtacattgaatgaagctcttcaagaattactcgatggaatccaggaagacttctatgcggtcgtagattgggcttataaaattgaccccttgcgttgcatctcaatgcatgggattacagagcgttacctttctggacagaaagctgatgctgcaggatttgttcgcaaactacttgatgacttggaatcaagaatatcagtacagttcagccggtttattgatgaagcatgccatcaaattgagcgtaacgaaagaaatgtgcggcaaactggaattctagcctacattccaagatttgctgtccttgcatcacgtatggaacaatatatccaaggacaatccagggatttaattgataaagcatacacaaagctagttagcacaatgttcgcaactttggagaaaattgcacagagtgatcctaaaactgctgatattgtgttgattgagaattatgctgctttccagaacagtctttatgacttggctaatgttgtgccaacgcttgcaaagttctaccatcaagccagtgaatcatatgaactagcttgcactcgccatatcagctcactcatttatctgcaatttgagaggttatttcaattcaaccggaaagttgacgaattgacttacactattgctgctgaggagataccgtttcagctgggattatcaaaaactgacctaaggagggtactgaaatccagcttatctgggattgataagtcaattagcgccatgtacaggaggttgcaaaagacactgacctccgacgagttgtttccttcgctgtgggacaagtgcaagaaggagtttttggacaaatacgagagctttgttcagatggtaacacggatatatgggaatgagccgatcatgtcagtcaacgaaatgaaagacgtccttgctggtttttagatacaagtacacagcaccatgtatgatttcagagaaatagctatgtattccattcattccattgaattctgcacccacttgcgttactgtgttaggcgccctttttgggttatgtgtgtgtatgtggatgtcctctgtatagaagtgaacgcggcatgcttcccctaatgatgttcctgtgtcgcatcgagccgtcagtgacaatgcaaactgcaaacccggagtaccggaaggaacatgttcatgtttatgacgtcatttgtccaattgccgttccattcacggtcaagaaggtcatgtcttg

SEQ ID NO: 207374 - DNA, 1196 bp, Zea Mays
gagcaacgtcacctatcctttctgcctccctcactttcccatgtcagcaacccaacccacatccaccggaagatgagagctccagctccagctgctcctattcccgcgctgctctcccgctgctcctcgcctccctcctcggccccgcgccgcctcctctcctcctcccgcacgccagccgcctgctgcccgcctccggcagtcgtccgctctgtctccgtcgatttgctggcggtcgccggggagccggctgtcgcaggcgccccctccgcaacgccgtgccgtcgcctcatcctcctccgtcacggggacagcgccaccgggggccgcttcaccagagatcatgacagacctctaagcaaggctgggagagctgacgcaatcagcgtctctaataaactccaacagatgggatgggtacccgagcttattctctgcagtgatgcaatgcgcacaaaggagactcttaagattctgcaagagcatgtccatggattgtctgaagcagtagtgcactttatcccaagtttctactcaattgcggcaatggatggccaaactgcagagcatttgcaaaaggcgatttgtgaatattcgagtgatgagatcttaactgtgatgtgcatgggtcataataaaggatgggaagaagccgcctctatgttttctggcgattcagttttgcttgagacatgtaacgctgcgttgctagaagctgcaggcaaatcatgggttgaggccttttttgtggctggtctgggaggatggaagctccatggaatttggtttttacatgccactgaagctttcggtctgaaggtatcaacatggttagatagatgagatgagatgaatgaattcttccacggtccatgagttatatcggttctgcttttgcactaagcaaaactgaagacctcgcatttcactcccttcacccagaaacctaaagtgtctgctatttatgtttaaatatagagtataaaatacaaagatatatgtgttttgttggttagatgggtgtgaacgtgagtttagagccattaaaccgggtttgacctgtatgattttagtttttttatcatttaaatgtgaggaaacagtgatggagccacatggtatgttgtagatgccccgacatacctatgcagttcgacagcgtgcattcgtttgttttggagcttgtgttttgggta

SEQ ID NO: 207375 - DNA, 1372 bp, Zea Mays
atttttttttctcatttagcaacataccatactgaattgtgatatgtagagtgcacgagccaattcagttcaaaataaaagagaaaattagcataatctagggcgagcaacgtcacctatcctttctgcctccctcactttcccatgtcagcaacccaacccacatccaccggaagatgagagctccagctccagctgctcctattcccgcgctgctctcccgctgctcctcgcctccctcctcggccccgcgccgcctcctctcctcctcccgcacgccagccgcctgctgcccgcctccggcagtcgtccgctctgtctccgtcgatttgctggcggtcgccggggagccggctgtcgcaggcgccccctccgcaacgccgtgccgtcgcctcatcctcctccgtcacggggacagcgccaccgggggccgcttcaccagagacctctaagcaaggctgggagagctgacgcaatcagcgtctctaataaactccaacagatgggatgggtacccgagcttattctctgcagtgatgcaatgcgcacaaaggagactcttaagattctgcaagagcatgtccatggattgtctgaagcagtagtgcactttatcccaagtttctactcaattgcggcaatggatggccaaactgcagagcatttgcaaaaggcgatttgtgaatattcgagtgatgagatcttaactgtgatgtgcatgggtcataataaaggatgggaagaagccgcctctatgttttctggcgattcagttttgcttgagacatgtaacgctgcgttgctagaagctgcaggcaaatcatgggttgaggccttttttgtggctggtctgggaggatggaagctccatggaattgtaaagccatgaattattgtaactaaaagctagatgtaattttttagctgtttcttaattattattattaacctttgtgtagtggtttttacatgccactgaagctttcggtctgaaggtatcaacatggttagatagatgagatgagatgaatgaattcttccacggtccatgagttatatcggttctgcttttgcactaagcaaaactgaagacctcgcatttcactcccttcacccagaaacctaaagtgtctgctatttatgtttaaatatagagtataaaatacaaagatatatgtgttttgttggttagatgggtgtgaacgtgagtttagagccattaaaccgggtttgacctgtatgattttagtttttttatcatttaaatgtgaggaaacagtgatggagccacatggtatgttgtagatgccccgacatacctatgcagttcgacagcgtgcattcgtttgttttggagcttgtgttttgggta

SEQ ID NO: 207376 - DNA, 2651 bp, Zea Mays
cccccagccagtaaccagaccaggttaagtacatcacacacgctggccgctgcatacacagcaggtctacacccactcgggcccatatacgcgtctgttgggccgacacacacgacgagttgccacctcctgcttgcttggaccattcggtattgcaccctctcgctgttgtagcggctgggaaatctcctctattggcgagttggtaacacactatcgctacatcatatgcttctgtccaagctatataagccgccgctgttgtacgccgcttcctccatccactagctgcccggccggccggctagcggagaaacagcccgcccgctcgcctctgcctctgcccctgcacgcccaagatcctcaggccgggccggccgcgtggcagtgccgcgcgcgcgcgagagcgagagggatccatgggcgtctccgaggaggcggcgcgggtgtgggcggagctgcccgtgcgggtggactgggcggccgcggcggcgcaatgcgcgtccctgtgggcgcacgcgcgcgcgctgctggtcgcgccagcggtgcgggtcctggtgctcctgtcgctggcgatgaccgtgatgatactggcggagaagctgttcgtctgcgccgtgtgcctcgccgtgcgggcgctccggctcggcccggaccggcgctaccgctgggagcccatcggcggcggagtcggagacgaggaggaggagtccgggtccggccacggcgccaagtaccccatggtgctcgtgcagatccctatgtacaacgagcgggaggtgtacaagctgtcgatcggggcggcatgcgagctggagtggccgtcggagcgcttcatgatccaggtgctggacgactccacggaccccgttgtaaaggatttggtggagacggaatgccaaagatggaagagcaaaggcgtgaatataaagtacgaggtgagggggaaccggaaggggtacaaggccggcgcgctcaaggaaggactgaagcatgactacgtcgaagactgcgagtacatcgccatgttcgatgctgacttccagcccgagcctgatttcctcctaagggctgtcccattccttgtgcataacccggagatcgccctcgtccaagctcgctggaaattcgttaattctggtgagtgtctgctgacgagattccaagaaatgtccttggactaccatttcaagtatgagcaagaggcaggctcctcactgcattcattctttggcttcaatgggacagccggtgtctggaggattgcagctatcgatgacgccgggggctggaaggaccggacgacggtggaggatatggacctggctgtccgtgcgatgctgcagggctggaagtttgtttacgtcggcgacataaaagtcaagagtgaattgcctagcacgttcaaggcataccggtttcagcagcacaggtggtcttgtggaccggcaaacctgttcaagaaaatgatggtagagattttagaaaacaagaaagtgtcattgtggagcaaaatctacttatggtacaatttcttcttcgttgggaaggtcgctgcccacacggtgacattcatctactactgctgtgcgatccccgtgtctgttttgcttcctgagattcagatacctctctggggagttgtctatatcccgacgctcataaccctcttgaaggctcttggcacaccaagttcgtttcacctggtgatcctctgggttctgtttgagaatgtcatgtcactgcaccggattaaagctgcagcaagtggtcttctggatgctggtggacgagtcaatgagtgggttgtcaccgagaagttgggcgacaccagcaaggcaaagcctggcgccaatggatcagatgatgtaaaggtgatagatgtaaagctaacagaacccctcgttcccaagctagtgaagaggcgagcaagattttgggagaggtacaactgctcagaacttttcgttggaacctgcatacttctgtgtggtttctatgacttgctttttgcaaagaagggatactacatttttctcttccttcaaggcacggctttccttgttgttggctttgggtatgtcggcacactacctcattgcaatgcataagctggcatggacaattcatataccttcttactagaaacagatcaagcaaagttcctctctcctgcccatatggaacttcaatgatagttgagcaatattcccatgatcagtcttggccagacatgattcactgccaagaaggttgttcagatgtcgtcgtcactcttctgtcagtctttattgtcaagaaggccattcaaatagtgtcaccgttccaaatttataataacagtgtttactgaagcatcatgacatacaagaatgattggtgcagcagcatttagtaaacatcccgtagagatgcagttcacagtcgtgaaagaactgcagctgctgtaaatggaatagcaccagttgccaatttctgtagatctccgaacttttttttggaaattttgtgatattactcagagttcagatcaataatggaagattgttggcttcctcagttcataacctgtgtatgcttaaaacttgtaaatgtaaattgttattgacactaataattttgtcgaacccaggcagttcttgaaatgcaaa

SEQ ID NO: 207377 - DNA, 1110 bp, Zea Mays
ccagcttccggtcacaactcacaaccggcaggcaggcggtggcgccgcggcgacaccgttccacggttccactccacgtctccacccctgacgcgcggaactggcggtggcgagcgaagctaatggccatccatgccccgctccgcctctgcctccgcctccatgcgaggaaggtagccagacgcgtataaagggcagccagaaattcggatccacctgtatgcgtctccgttcgttcacgccacaggcaaggcacaggggcttgtgagggagagcgaggagcggaggaggacatggtgcacgggacgctggaagtgctgctcgttggggccaagggcctcgagaacaccgattacctctgtaacatggatccgtatgcaattctcaagtgccgttcacaggagcagaagagcagtattgcaactggaaaaggaactacccctgagtggaatgaaaactttatcttcactgtgtctgaccggacaacagacttggtaatcaagcttatggacagtgatacaggcacagcagatgactttgttggtgaagcaacgattccattggaagcagtgtatactgaaaggagcattccaccaacactctataatgttgtgaaaggtgaaaaatactgcggggaaatcaaagttggtctcacattcactcctgaggatactcgccagcggggtctcccagaggacttcggtggatggaagcaatcatcttagagctagatgctttaagggtgcaccagagcacagcgacaattcatgcgcttggagccttcagccgtcgagtacttcatgctaatgcagaattcattcgatttggcttcttttgattgtttcagaagaagtgttattaggattgaagctgcactgctgcaggacagcagaaggcttctggtgcaaaatgtgcaacctcctcgcctgttcgcctcgctttaatctgtttctacaatgtttttgttttcttgtattgtagccgtaacagtctaaatagccgcgatggcaatcgtgggaagcaattgaacgaattggtgttgttactgtcgtttcggacactgaaagaccatctttctttgcttgctttgccccgaaaggaggaattttg

SEQ ID NO: 207378 - DNA, 7462 bp, Zea Mays
gcagacattcccctcgtcgtctcaggctctccgcagtccccacacatcagctgccgtagcaacgttcccgggaattccccaaaatgcccctcgaccccgactcctcgtcgccgccgccgccacaccgcgactggttcttcccgccggcgccgccgttcctcgcctcctccaggtcccggacccccagtgcgcccttcccctccacctaccgctcctccaagccctactcagcctaccccctcgccgaccgccgaccgcctcctaccccacgctcccgctcccgctctccgcacccaccgccggagcagcagcagaagacgccgacgccgcctactcctacgtccgcgccgcgccgccgtgaccctcggtacgccggcgtccgccgcgaagatgcccgtacggctgcctccgagcaagcggcggccccgatggccgcgccagtgcacgggaggaagcccgcagcgtcggcgatcgctccacggtggtcgggggtgctctccgtggcggttattttactgtgcctggcctcccttctccgcaggaacttctctttgcacgaccaggtttaccttctgcaggagcagctggctgtagctactgcaaaacttcagtcctgcactgtagattcttcattgaatacaagcatcattaatctgttctatcaggatgctgctaacagtaccacgcagagcagaagccttaagaacctttccttgcttatctcgctttcggtattatacgcaccactcctcattctcaagtacgtggaccttgtgtcaaagataaggaggtcacgtgactctgaacaagttccaataaacaagcggttcgcatacagggtcgatatatttttgtcacttcatccgtatgctaaaccattggtcctacttgttgctacgttgttactaattgctcttggtggactggctctgtatggtgtgacggatgatagcttatctgattgtctttggctgtcctggaccttcgtcgctgactcagggaaccatgccaatgctgtgggtcttggacccaagctggtttcagtttcaattagtattggtggaatgttggtttttgctatgatgcttggtcttgtcactgattcaatctctgagaagtttgattctttgaggaaaggaagaagtgaagtcatagaacagagccacactctaattcttgggtggagtgataaattgggatctttgctgaaccaaattgccattgctaatgaaagcttgagaggtgggaccattgtagtgatggctgagagagacaaagaagaaatggaagcagatattgctaaaatggagtttgacatgaaaggaacagctgtaatatgtagaagtggaagccctttgatacttgctgatttgaaaaaggtctcagtttcaaaggcgcgggcaattgttgttttagctgaagaaggaaatgctgaccagagtgatgcacgagcactgcgaacagtcctgagtttaactggagttaaagagggactaagtggtcacatagtagtggagcttagtgatcttgacaatgaagttctagtcaaacttgttggtggagatcttgtggaaacagttgtggcacatgatgtgattggacgattgatgatacagtgtgcacgtcaaccaggccttgcacagatatgggaagacattcttggttttgagaactgtgaattctacattaaaagatggcctaaattggatggaatgcgatttgaagatgtgctgattagctttcctgaagctgttccatgtggcataaaagtggcatcttatgggggcaagattattttaaaccctgatgattgttatgttttgcaagagggtgatgaggtgatagtaattgcagaggatgatgatacatatgctccagcaccattgcccaaggttaggagagggtatctgcctaaagattttgttgttccaaagtctccagaaagaatattgttttgtggttggcgccgtgatatagaagatatgataatggtacttgatgctttccttgcgccaggatcagagttgtggatgtttaatgacgtccctgaggttgacagagaaagaaagctaattgatggaggtttggacttcagtcgcctcgataatattactttggtgcatcgtgagggaaatgctgttattcgccgtcacttggagagccttcctttagaatcattcgattctatcctgattttggcagatgaatctgtagaagattcagcaatccaagctgactcaaggtcacttgcaactttgctgctgataagagatattcaggcaaaacgtcttccatgcaaggaatcattgatttcacatgttccccgagggaccttttctgaaggttcttggataggggagatgcaacaagcatctgataaatctgtcataatcagtgaaattttggaccccaggacaaaaaatttgttgtcagtgtcaaaaattagtgactacgttctttcaaatgaattagtgagcatggcattggcaatggtcgcagaagatcggcagataaataatgtcttggaggagctcttcgctgaacaaggaaatgaaatgcaaatacgaccttctgatatgtaccttagagaagaagaggaattaaatttctttgaggtcattctgcgagctaggcagaggaaagagattgtcattgggtaccgtcttgaggcagctgagcgtgccataatcaatccaatagacaaagtttcaaggcgaaggtggtcacccaaggatgtttttgttgttatatccgagaaagaatgaggtttatcagatcacagttgacacaaaagcaagctcctgaccagtgaccacacctaatgaagaacaggcagctgcgccgcagcacacacacacacaccgaccagcgcagagagctatttgattcagatgcgcatttggctgattcagatgcgcatttggcagaaggcaatcgctgagcgcgaaggagtaaaagcatgatcagatattcagatcttggatcagtctagactgacaccttaggtcgccctttacaaatatgacttaaaaaggatgtgaacagagtagtacagcacatgctttggaagtttggatattcttgtccgtgtaacttcccacatgaacaacgagcaaagcatcgcctgcatgcatcaattaatggcttaaagctattgagtgctgatactgagcagttttccagtgagcctgttacaccctcccatagagcgtagacgacagcgatagttcagcattctgtacattgcataggcgcattctgttgccagtccatgtaaacaacatgagatgtcggccagtccatgtaaatatgtaatctggaagatcatctgtaggtactgttgcggtgttggatcttgtgaagaatgcagagagcaatgccgaagcgtgtcaccttgcctcattgtacttgagcagatatatattatgtccaacaagtctatgcttcacaacgaatactcaaaatctttgattcataaactcaacaaaagatctgctgttgtgatttatgcacacttccatggatatcatcccaactgattctagctggggttttcatgataaaaatgtaggtgtaactccaaaatcctacttactgctgggccccaagaattcgatgcagcccagcccaaccacctcccagcttatccttctcccggtctccctcggctccgctctgccgcagccgcgggaaatggtcgcgctccacctccacgccaagcaacccacgcctcgtctcctccccgttccaccgagccatgcccgtacccgtacgcccacggcggcggcggtcaacgtgagccacgctgcgcctccgcccgacgtcgtcctcgactgcaaacggctggacgggctgatgaagtccgggaggctgggggacgccctggacctgttcgatcggatgcctcgcaagaacgtcgtcgcgtggaccacggccatctccgggtgcacgcggaacgggcgccccgaggcggctgcgaccatgttcgcggacatgctggagtccggcgtcgcgcccaacgacttcgcgtgcaacgcggcgctggcggcgtgcgcggccgctggcgcgctcggcctcggcgagcaggtgcactcgctcgccgtgcgggcgggcttcgcggccgacgcctggatcggaagctgcctcatcgagctctactcgaggtgcggctccctgcgggcggccgaggaggtctttcgccggatggaggcgccggacgtcgtggggtacacctcgctcgtctcggcgctctgccggaacggagagctcgcacgggctgtggatgtgctctgccagatgacgaggcaggggttgcagccgaacgagcacacgatgacgagcatgctggcagagtgccctcgtggaattggtgagcagatacatggatatatgctcaaggtaatgggttcgcagagcgtctatgcatccactgcactgatcgacttctactcgaggtacggtgactttggcacggcgaaaacggtctttgaaaatcttgagtccaagaacgtggtgtcgtggtgctccatgatgcagctgtgcattagggatggaaggttggacgatgcgctgcgagtgttcagtgagatgatttcagagggcgtccagccaaatgaatttgcgttctcaatcgctcttagtgcctgtgggtctgtttgtctggggcgtcaaattcactgctcagccatcaagcgtgacttaatgactgacatccgagtatctaatgctttactctctatgtatggtaggagtggttttgtttcagaactcgaggctgtgcttggcaagattgaaaatcctgatcttgttagctggacagctgccatttctgcgaacttccagaatggtttcagtgagaaggctgtagcattgcttcttcagatgcattcagagggttttacaccgaatgactatgccttctctagtggtctgagttcttgtgcagacctggcattgctgcatcaaggaaggcagcttcattgcctggcactgaaactggggtgtgacttcaaagtttgtactgggaacgcactaattaacatgtattccaagtgtggtagaattggatctgcaaggcttgcatttgacgtcatggatactcatgatgtcatgtcttggaactcattgattcacggtctcgcacagcatggtgacgcaaacttggcactggagacattcagtgagatgtgctcaagcgattggcggccagacgattcaacatttctgtcagtcttggtagggtgcaatcatgcaggtctggtaaaggaaggggagacctttttcagacaaatgactgaccggtatggtctcacaccgaccccttctcactacgcatgcatgatcgacatgctgggtcgaaatggcaggttcgccgaggcgctacgcatgatcgagaatatgccattcgagcctgatgttttgatttggaagacactattagcatcatgcaagctgcacaggaatcttgacatcgggaagctcgcagcagataagctgatggagctttcagaaagagactccgcgagctacgtgctcatgtcaaacctctatgcgatgcatgaagaatggcgggatgccgagagggtgcgtcggaggatggatgaaattggggtgaagaaggatgccggttggagctggattgaggtcaagaacgaggtcaacacctttgttgcaggagacatgtctcatccagactccacatccatctatcagatgcttgcagagctccttgttgtgatgcaagatacagatttagatgttcatatgcagatttagatgtccaaaaagagaacataccacttgcagacattacatgtacagggtacaacagcacatagcgcctgattggttgctcatctgggtggagcctggtccaaacctggatgcaggctgagaccagcctatatgtgtggatgcaagtgccaagtttgcttgcatgtttggttggatgtaccaaagcagccatgatttaatgggcacatgtttggttaaacaacaccaagtcggcgaatgttttttacaagaggttgcggagcgggcgttatttttgtggaataatgaccatatcgagagtctgatcaaacagaatagtagggttatacatctaagtggcttttccttgccatctgggatggcctatggtggtgcaacaacagtcaaaatcttctatcaacggcgtcgaaaaaccactgctggaaataatattgctacaattaatgatgatgatattgcggaggctcatgcttgggattgggcttggatgttgatgtgacagcggttactccgtctgaccccccctcggacgtggaaggcgctgctgatactccgtctgagaccatctcaagatttcaggggccattattattagagtacaatggaacagcgaggagggctgacgcagactcaactgttccactcaggcatgaggtggtagcctttgatgacagttccaggcagaattttggggattcatgtgactcctcattggatccattatcttctatggaatctagaagaagatcattcatggctaagataacaatggcacattcacagctccttgctgctcctgtcctccccaagcggtcaaggggtgccacaaaacatggtactgcgctacgacggagccgacgggttgcaggggcaggggtggaatttaacatgcaggatctggagaacagagccacaaaacaagtaatgcggactctgagagtcatcacagagaatgcaagcatcaaccagcaagctgttaaggattatgagaatctttttcagcatcccttaactcaaagtcatgttgaagcgttagcggctctctttggatgggagactccggggaatctcttcccgtagtgtgtttttctttctgggttgtaatttataattgttgtaatggatcctagcaaaattatatgttggaatgtgagaggtttaaattcagctgatcgtcaaaattcagtccggaatctagttctgtcctctaaagctgatgtggtctgtctccaggaaactaaaatgactgtcatttctacaagaaccattcttgcagccttgggttcggatttctgccagttctcctttctaccatcttgtggtgctagtggtggtgtgctggttgcttggaagcgacatctgggagtgactgggttgtctaggattgacagatacagcatttcaatccaattctgcaatgcgcataatcgctgttggtggttaacttgtgtttatggtcctcaaagtaacagtgataagatgttgtttcttcaagaactgagagacatcagggctgcttgcactggaccctggttgattgctggtgacttcaatctcatctacagggcttcagataaaaataattcaaatattaacagagctatgatggggagatttaggaagttggttgaggacttgagtctcaatgaggttccactttttgggcgtaaatacacgtggtcaaatcagc

SEQ ID NO: 207379 - DNA, 7455 bp, Zea Mays
gcagacattcccctcgtcgtctcaggctctccgcagtccccacacatcagctgccgtagcaacgttcccgggaattccccaaaatgcccctcgaccccgactcctcgtcgccgccgccgccacaccgcgactggttcttcccgccggcgccgccgttcctcgcctcctccaggtcccggacccccagtgcgcccttcccctccacctaccgctcctccaagccctactcagcctaccccctcgccgaccgccgaccgcctcctaccccacgctcccgctcccgctctccgcacccaccgccggagcagcagcagaagacgccgacgccgcctactcctacgtccgcgccgcgccgccgtgaccctcggtacgccggcgtccgccgcgaagatgcccgtacggctgcctccgagcaagcggcggccccgatggccgcgccagtgcacgggaggaagcccgcagcgtcggcgatcgctccacggtggtcgggggtgctctccgtggcggttattttactgtgcctggcctcccttctccgcaggaacttctctttgcacgaccaggtttaccttctgcaggagcagctggctgtagctactgcaaaacttcagtcctgcactgtagattcttcattgaatacaagcatcattaatctgttctatcaggatgctgctaacagtaccacgcagagcagaagccttaagaacctttccttgcttatctcgctttcggtattatacgcaccactcctcattctcaagtacgtggaccttgtgtcaaagataaggaggtcacgtgactctgaacaagttccaataaacaagcggttcgcatacagggtcgatatatttttgtcacttcatccgtatgctaaaccattggtcctacttgttgctacgttgttactaattgctcttggtggactggctctgtatggtgtgacggatgatagcttatctgattgtctttggctgtcctggaccttcgtcgctgactcagggaaccatgccaatgctgtgggtcttggacccaagctggtttcagtttcaattagtattggtggaatgttggtttttgctatgatgcttggtcttgtcactgattcaatctctgagaagtttgattctttgaggaaaggaagaagtgaagtcatagaacagagccacactctaattcttgggtggagtgataaattgggatctttgctgaaccaaattgccattgctaatgaaagcttgagaggtgggaccattgtagtgatggctgagagagacaaagaagaaatggaagcagatattgctaaaatggagtttgacatgaaaggaacagctgtaatatgtagaagtggaagccctttgatacttgctgatttgaaaaagtttcaaaggcgcgggcaattgttgttttagctgaagaaggaaatgctgaccagagtgatgcacgagcactgcgaacagtcctgagtttaactggagttaaagagggactaagtggtcacatagtagtggagcttagtgatcttgacaatgaagttctagtcaaacttgttggtggagatcttgtggaaacagttgtggcacatgatgtgattggacgattgatgatacagtgtgcacgtcaaccaggccttgcacagatatgggaagacattcttggttttgagaactgtgaattctacattaaaagatggcctaaattggatggaatgcgatttgaagatgtgctgattagctttcctgaagctgttccatgtggcataaaagtggcatcttatgggggcaagattattttaaaccctgatgattgttatgttttgcaagagggtgatgaggtgatagtaattgcagaggatgatgatacatatgctccagcaccattgcccaaggttaggagagggtatctgcctaaagattttgttgttccaaagtctccagaaagaatattgttttgtggttggcgccgtgatatagaagatatgataatggtacttgatgctttccttgcgccaggatcagagttgtggatgtttaatgacgtccctgaggttgacagagaaagaaagctaattgatggaggtttggacttcagtcgcctcgataatattactttggtgcatcgtgagggaaatgctgttattcgccgtcacttggagagccttcctttagaatcattcgattctatcctgattttggcagatgaatctgtagaagattcagcaatccaagctgactcaaggtcacttgcaactttgctgctgataagagatattcaggcaaaacgtcttccatgcaaggaatcattgatttcacatgttccccgagggaccttttctgaaggttcttggataggggagatgcaacaagcatctgataaatctgtcataatcagtgaaattttggaccccaggacaaaaaatttgttgtcagtgtcaaaaattagtgactacgttctttcaaatgaattagtgagcatggcattggcaatggtcgcagaagatcggcagataaataatgtcttggaggagctcttcgctgaacaaggaaatgaaatgcaaatacgaccttctgatatgtaccttagagaagaagaggaattaaatttctttgaggtcattctgcgagctaggcagaggaaagagattgtcattgggtaccgtcttgaggcagctgagcgtgccataatcaatccaatagacaaagtttcaaggcgaaggtggtcacccaaggatgtttttgttgttatatccgagaaagaatgaggtttatcagatcacagttgacacaaaagcaagctcctgaccagtgaccacacctaatgaagaacaggcagctgcgccgcagcacacacacacacaccgaccagcgcagagagctatttgattcagatgcgcatttggctgattcagatgcgcatttggcagaaggcaatcgctgagcgcgaaggagtaaaagcatgatcagatattcagatcttggatcagtctagactgacaccttaggtcgccctttacaaatatgacttaaaaaggatgtgaacagagtagtacagcacatgctttggaagtttggatattcttgtccgtgtaacttcccacatgaacaacgagcaaagcatcgcctgcatgcatcaattaatggcttaaagctattgagtgctgatactgagcagttttccagtgagcctgttacaccctcccatagagcgtagacgacagcgatagttcagcattctgtacattgcataggcgcattctgttgccagtccatgtaaacaacatgagatgtcggccagtccatgtaaatatgtaatctggaagatcatctgtaggtactgttgcggtgttggatcttgtgaagaatgcagagagcaatgccgaagcgtgtcaccttgcctcattgtacttgagcagatatatattatgtccaacaagtctatgcttcacaacgaatactcaaaatctttgattcataaactcaacaaaagatctgctgttgtgatttatgcacacttccatggatatcatcccaactgattctagctggggttttcatgataaaaatgtaggtgtaactccaaaatcctacttactgctgggccccaagaattcgatgcagcccagcccaaccacctcccagcttatccttctcccggtctccctcggctccgctctgccgcagccgcgggaaatggtcgcgctccacctccacgccaagcaacccacgcctcgtctcctccccgttccaccgagccatgcccgtacccgtacgcccacggcggcggcggtcaacgtgagccacgctgcgcctccgcccgacgtcgtcctcgactgcaaacggctggacgggctgatgaagtccgggaggctgggggacgccctggacctgttcgatcggatgcctcgcaagaacgtcgtcgcgtggaccacggccatctccgggtgcacgcggaacgggcgccccgaggcggctgcgaccatgttcgcggacatgctggagtccggcgtcgcgcccaacgacttcgcgtgcaacgcggcgctggcggcgtgcgcggccgctggcgcgctcggcctcggcgagcaggtgcactcgctcgccgtgcgggcgggcttcgcggccgacgcctggatcggaagctgcctcatcgagctctactcgaggtgcggctccctgcgggcggccgaggaggtctttcgccggatggaggcgccggacgtcgtggggtacacctcgctcgtctcggcgctctgccggaacggagagctcgcacgggctgtggatgtgctctgccagatgacgaggcaggggttgcagccgaacgagcacacgatgacgagcatgctggcagagtgccctcgtggaattggtgagcagatacatggatatatgctcaaggtaatgggttcgcagagcgtctatgcatccactgcactgatcgacttctactcgaggtacggtgactttggcacggcgaaaacggtctttgaaaatcttgagtccaagaacgtggtgtcgtggtgctccatgatgcagctgtgcattagggatggaaggttggacgatgcgctgcgagtgttcagtgagatgatttcagagggcgtccagccaaatgaatttgcgttctcaatcgctcttagtgcctgtgggtctgtttgtctggggcgtcaaattcactgctcagccatcaagcgtgacttaatgactgacatccgagtatctaatgctttactctctatgtatggtaggagtggttttgtttcagaactcgaggctgtgcttggcaagattgaaaatcctgatcttgttagctggacagctgccatttctgcgaacttccagaatggtttcagtgagaaggctgtagcattgcttcttcagatgcattcagagggttttacaccgaatgactatgccttctctagtggtctgagttcttgtgcagacctggcattgctgcatcaaggaaggcagcttcattgcctggcactgaaactggggtgtgacttcaaagtttgtactgggaacgcactaattaacatgtattccaagtgtggtagaattggatctgcaaggcttgcatttgacgtcatggatactcatgatgtcatgtcttggaactcattgattcacggtctcgcacagcatggtgacgcaaacttggcactggagacattcagtgagatgtgctcaagcgattggcggccagacgattcaacatttctgtcagtcttggtagggtgcaatcatgcaggtctggtaaaggaaggggagacctttttcagacaaatgactgaccggtatggtctcacaccgaccccttctcactacgcatgcatgatcgacatgctgggtcgaaatggcaggttcgccgaggcgctacgcatgatcgagaatatgccattcgagcctgatgttttgatttggaagacactattagcatcatgcaagctgcacaggaatcttgacatcgggaagctcgcagcagataagctgatggagctttcagaaagagactccgcgagctacgtgctcatgtcaaacctctatgcgatgcatgaagaatggcgggatgccgagagggtgcgtcggaggatggatgaaattggggtgaagaaggatgccggttggagctggattgaggtcaagaacgaggtcaacacctttgttgcaggagacatgtctcatccagactccacatccatctatcagatgcttgcagagctccttgttgtgatgcaagatacagatttagatgttcatatgcagatttagatgtccaaaaagagaacataccacttgcagacattacatgtacagggtacaacagcacatagcgcctgattggttgctcatctgggtggagcctggtccaaacctggatgcaggctgagaccagcctatatgtgtggatgcaagtgccaagtttgcttgcatgtttggttggatgtaccaaagcagccatgatttaatgggcacatgtttggttaaacaacaccaagtcggcgaatgttttttacaagaggttgcggagcgggcgttatttttgtggaataatgaccatatcgagagtctgatcaaacagaatagtagggttatacatctaagtggcttttccttgccatctgggatggcctatggtggtgcaacaacagtcaaaatcttctatcaacggcgtcgaaaaaccactgctggaaataatattgctacaattaatgatgatgatattgcggaggctcatgcttgggattgggcttggatgttgatgtgacagcggttactccgtctgaccccccctcggacgtggaaggcgctgctgatactccgtctgagaccatctcaagatttcaggggccattattattagagtacaatggaacagcgaggagggctgacgcagactcaactgttccactcaggcatgaggtggtagcctttgatgacagttccaggcagaattttggggattcatgtgactcctcattggatccattatcttctatggaatctagaagaagatcattcatggctaagataacaatggcacattcacagctccttgctgctcctgtcctccccaagcggtcaaggggtgccacaaaacatggtactgcgctacgacggagccgacgggttgcaggggcaggggtggaatttaacatgcaggatctggagaacagagccacaaaacaagtaatgcggactctgagagtcatcacagagaatgcaagcatcaaccagcaagctgttaaggattatgagaatctttttcagcatcccttaactcaaagtcatgttgaagcgttagcggctctctttggatgggagactccggggaatctcttcccgtagtgtgtttttctttctgggttgtaatttataattgttgtaatggatcctagcaaaattatatgttggaatgtgagaggtttaaattcagctgatcgtcaaaattcagtccggaatctagttctgtcctctaaagctgatgtggtctgtctccaggaaactaaaatgactgtcatttctacaagaaccattcttgcagccttgggttcggatttctgccagttctcctttctaccatcttgtggtgctagtggtggtgtgctggttgcttggaagcgacatctgggagtgactgggttgtctaggattgacagatacagcatttcaatccaattctgcaatgcgcataatcgctgttggtggttaacttgtgtttatggtcctcaaagtaacagtgataagatgttgtttcttcaagaactgagagacatcagggctgcttgcactggaccctggttgattgctggtgacttcaatctcatctacagggcttcagataaaaataattcaaatattaacagagctatgatggggagatttaggaagttggttgaggacttgagtctcaatgaggttccactttttgggcgtaaatacacgtggtcaaatcagc

SEQ ID NO: 207380 - DNA, 1387 bp, Zea Mays
tgcagcccagtgcagttgtctgcaaggattcttggtgttcaatgctgttggtggtggtactggctctggacttggttcactgctgttggagcgcctttcagttgattatggcaagaagtctaagcttggtttcaccatttatccttccccacaggtgtcaacagctgttgtagagccatacaacagtgtcctctcgacccactccttgctcgagcacactgatgttgcagtcctcctggacaacgaggctatctatgacatatgcaggaggtcccttgacatcgaaaggccaacctataccaacttgaacaggctgatctcacagatcatatcatcacttaccacctccctgaggtttgatggggctatcaatgtggatgttactgagttccagaccaaccttgttccatacccacgtattcatttcatgctttcctcatatgcccctgtaatatctgctgagaaggcctaccatgagcagctctctgtgcctgaaatcaccaatgctgtatttgagccctcaagcatgatggccaagtgtgacccaaggcacggaaagtacatggcttgctgcttgatgtaccgcggtgatgttgttcctaaggatgtcaacgctgcagttgcaaccatcaagaccaagagaactgtccagtttgtggactggtgccccactggattcaagtgtggcatcaactatcagccaccctctgttgtccctggaggtgacctggcaaaggtccagcgtgccgtgtgcatgatcagcaacaacaccgccgttgccgaggtgttctcacgcatcgaccacaagtttgaccttatgtacgccaagcgtgcattcgttcactggtatgtcggtgagggtatggaagagggtgagttctcagaagcccgtgaggacttggctgctcttgagaaggactatgaggaagtcggtgcagagggtgccgatgatgagggtgacgagggagacgactattgagtagctggctaataagtagttctctggtggttaatggttgggttattttgagtatatactctatggttccactccattggatactgctgctgtgtgtttccattttgtactatgtagtaaattgttcgtagccccctattggccatgattgttcatatcatccttctttggtttgcaacgctattcgtccaatttcggtgtatatgctataatgctattatgttgcaagtgtgctgtgctcaaccattgggttttatttatatttagaaacagaaggcattattactctgcgctgcagcttgtttctggatcatgggaacattgagatttgagaagttttgatagcagtctatcactgtgagggcctaaggaggcccacggaggggctgcggtagcagcagccatggg

SEQ ID NO: 207381 - DNA, 1580 bp, Zea Mays
gctgctctggggccatcttcgtcgaccttgagcccactgtcatcgacgaggttcgcactggctcgtaccgccagctcttccacccagagcagctcatctcggggaaggaggacgcagctaacaactttgcccgtggccactacacggttgggaaggagattgtcgatctatgcctggaccgtgtgcgcaagcttgcagacaactgcactgggctgcagggattcttggtgttcaatgctgttggtggtggtactggctctggacttggttcactgctgttggagcgcctttcagttgattatggcaagaagtctaagcttggtttcaccatttatccttccccacaggtgtcaacagctgttgtagagccatacaacagtgtcctctcgacccactccttgctcgagcacactgatgttgcagtcctcctggacaacgaggctatctatgacatatgcaggaggtcccttgacatcgaaaggccaacctataccaacttgaacaggctgatctcacagatcatatcatcacttaccacctccctgaggtttgatggggctatcaatgtggatgttactgagttccagaccaaccttgttccatacccacgtattcatttcatgctttcctcatatgcccctgtaatatctgctgagaaggcctaccatgagcagctctctgtgcctgaaatcaccaatgctgtatttgagccctcaagcatgatggccaagtgtgacccaaggcacggaaagtacatggcttgctgcttgatgtaccgcggtgatgttgttcctaaggatgtcaacgctgcagttgcaaccatcaagaccaagagaactgtccagtttgtggactggtgccccactggattcaagtgtggcatcaactatcagccaccctctgttgtccctggaggtgacctggcaaaggtccagcgtgccgtgtgcatgatcagcaacaacaccgccgttgccgaggtgttctcacgcatcgaccacaagtttgaccttatgtacgccaagcgtgcattcgttcactggtatgtcggtgagggtatggaagagggtgagttctcagaagcccgtgaggacttggctgctcttgagaaggactatgaggaagtcggtgcagagggtgccgatgatgagggtgacgagggagacgactattgagtagctggctaataagtagttctctggtggttaatggttgggttattttgagtatatactctatggttccactccattggatactgctgctgtgtgtttccattttgtactatgtagtaaattgttcgtagccccctattggccatgattgttcatatcatccttctttggtttgcaacgctattcgtccaatttcggtgtatatgctataatgctattatgttgcaagtgtgctgtgctcaaccattgggttttatttatatttagaaacagaaggcattattactctgcgctgcagcttgtttctggatcatgggaacattgagatttgagaagttttgatagcagtctatcactgtgagggcctaaggaggcccacggaggggctgcggtagcagcagccatggg

SEQ ID NO: 207382 - DNA, 1271 bp, Zea Mays
ttcctgtccatgtgatgtggtccattcagcttgttcatgtgtcaacagctgttgtagagccatacaacagtgtcctctcgacccactccttgctcgagcacactgatgttgcagtcctcctggacaacgaggctatctatgacatatgcaggaggtcccttgacatcgaaaggccaacctataccaacttgaacaggctgatctcacagatcatatcatcacttaccacctccctgaggtttgatggggctatcaatgtggatgttactgagttccagaccaaccttgttccatacccacgtattcatttcatgctttcctcatatgcccctgtaatatctgctgagaaggcctaccatgagcagctctctgtgcctgaaatcaccaatgctgtatttgagccctcaagcatgatggccaagtgtgacccaaggcacggaaagtacatggcttgctgcttgatgtaccgcggtgatgttgttcctaaggatgtcaacgctgcagttgcaaccatcaagaccaagagaactgtccagtttgtggactggtgccccactggattcaagtgtggcatcaactatcagccaccctctgttgtccctggaggtgacctggcaaaggtccagcgtgccgtgtgcatgatcagcaacaacaccgccgttgccgaggtgttctcacgcatcgaccacaagtttgaccttatgtacgccaagcgtgcattcgttcactggtatgtcggtgagggtatggaagagggtgagttctcagaagcccgtgaggacttggctgctcttgagaaggactatgaggaagtcggtgcagagggtgccgatgatgagggtgacgagggagacgactattgagtagctggctaataagtagttctctggtggttaatggttgggttattttgagtatatactctatggttccactccattggatactgctgctgtgtgtttccattttgtactatgtagtaaattgttcgtagccccctattggccatgattgttcatatcatccttctttggtttgcaacgctattcgtccaatttcggtgtatatgctataatgctattatgttgcaagtgtgctgtgctcaaccattgggttttatttatatttagaaacagaaggcattattactctgcgctgcagcttgtttctggatcatgggaacattgagatttgagaagttttgatagcagtctatcactgtgagggcctaaggaggcccacggaggggctgcggtagcagcagccatggg

SEQ ID NO: 207383 - DNA, 1900 bp, Zea Mays
agcgagttggattcagagtcagagcaaccctatctcttccccactccgctcctcgctcaccctctcaccaaatccttctcctccgcgccgccacagccgggcgcgcctctcgatcgagatccaggagatatgcctcgttatgatgatcgccatgggaatacacgcttgtatgttggaagattggcccctcgcacccgttcccgcgacctagaatatcttttcagcaaatatggaaggtaagagccgcactctgtctgcacagagagttattctgaagttcagagtgtgctaacttttattatgagggtgagacaccagttctgtcctagtatcacgagcagtttgtgctaacactgtggttgaattttgtggtacacagctacacatcaatcctgctaaactacactagcaaatatagggtcctttcctattttgttgatgatatgtggtttatgaaggttttgtgttgcttgaagtcattctgaggtttttgtggatggggtcatacaagtcttttttcttggtgtatgctctgttacatcactaagcacttcatagatgtttgacctccgggcctgtttgacttgaatgatcttgttgaaggttttcggttttttacccaaccatggaggtctgtggtggaagggtgcccttggtggaattggtggccattgttccgatatttgtggaggactttggtgaagggcgcccttggtgtaatcttattgactgttgtagatgaagttgcaagttgatgcatttgagtacttgactcatgtcagcagcttactgtttgtggaaactatttgcgcagaatacgtgaagtggagttgaagcgtgactatgcattcatgaattcagtgacccccgtgatgctgatgatgcgcagtacaacctagatggcagggaagtcgatggaagccgtattattgttgaatttgctaaaggagttcctcgtggttctggtggttcacgtgagtacatgggaagaggacctccaccaggaacaggtcgttgttttaactgtggaatggatggtcactgggcaagggactgcaaggctggtgactggaagaacaaatgctaccgctgtggtgaatcgggccatatagagagaaattgccagaacagtccaaggaatctcaggcgtgataaaagctattcacggtctccatccccacgtggtggacgtggccgcagccggagctacagcagaagccggagctatagccgatccagatccccatctggatctcccaggggtggacgccgtgaacgtgacgagaggagatctaggagtcttagctacagcaggagcgcaagccccaggcgttctgtctcacctgcaaaggaaaaggagcgcagtcgcacacccaatggcagtaggagcccaaggagccccagcccaagggctgaggtgagcccaccactgaaggataatggtgcacgcaatggctcagaccatgaaggcaaccctggtggtggagagaacagcaagaggagtcggagcccatctgatggctaccgtagccctgtggccaatgggcgcagcccgagcccgagggacgatcggagcccaagccccaagggcaacaacgaagatgacgagcgccgtggttcacctagaggaagtcagtcccccctgaactgagaaattctgatcaaatttgggccgcacgattcggttgtaactgttatattttagtttgagacaacaaactgtatttgctcatttctcatacagtcaggtttatgctttttgagctagaaaacatgtgtaagaatttgttaccttcaagctattcctggtttgtgatatggtaatacttgaactatttagcttgccaaatctgaatacttttaactatcaagtatcttgagttagtttgtctgttttgct

SEQ ID NO: 207384 - DNA, 3788 bp, Zea Mays
ataaatacccgccctccagcttcccagttcccactcctctctcctttcccctccgcttccgcagacggccaggccaacgcaaccgctcctgccatccgcaccagtccccccctcccctccctcccggactcacccggccgccagcggggtttggccgcttcctcctcctctgcggcgggagcgggacaacagacacaggggcacagaggaaccggcgcggggcggcgcaatgggggacgctgcggcggcggggaccctgcacaagagctacttcgacgtgctggggatctgctgcccctccgaggtgcccctcgtcgagaagctgctgcggccgctgcccggcgtgcgcaccgtcaccgtcatcgtcccgtcccgcaccgtcatcgtgctccacgacgccgccgccacctcgcccgcgcaaatcgtttccggggcgatagctctcaaggactactccgaggctgggttcatcgtgttcctgttcactacggccgaatggctggagaccagggcgagccacaaggcgactgctgggatgtcgtcgctgatgagcatggcgccacagaaggctgtcgtagcagagacgggggaggtggtggcggctcaggacgtcaaggtgggcacggtgctagccgtcaaagccggggaggtcgtgcccatcgacggcgtggtcgtggacgggcggagcgaggtcgacgagagcaccctcaccggggagtccttcccggtcgccaagcagccggagtcccaggtctgggccggcacgctcaacatcgatggctacatcgctgtcaggacaactgccatggcggacaactctgccgtcgctaagatggcgaggatggttgaggaagcacagaacagtaggtcccgaactcagaggctgattgatacgtgcgccaagtactatacgcccgctgttgtggtcatggctgcgggggtggcggtggttcctgtggtggtgagagcgcacaacctcaagcactggttccaactggccctggtcctgctggtgagcgcgtgcccgtgcgcactagtgctgtcgacgccggtggccaccttctgcgctctcctgacggccgcgaggacggggctcctcatcaaaggaggggacgtcctcgaaaccctggccaggatcaagattgccgcctttgataagacaggtacgatcactcgaggggagttcagcgtcgaggagttccaggcggttggcgagcgcgtcactacgccacagctcctttactgggtctcgagcattgagagcagatcgagccacccaatggcgtctgtgctggttgattatgcccagtcgaagtcagttggacccaaatctgataatgtcgccgagttccaaatcttccccggtgaggggatttacggtgagatcgatggggaaggtgtgtatattgggaacaagaggattttgtcaagggcctcatgtgaaacagttcctgacatgaaagatatgaaaggagttaccgtcggatacgttgcctgcaaagggcagttaatcggagtattcactctctcggattcctgccgaactggatcagatgaggccatcagggagctgaggtcgctgggcatcaagtcagtgatgcttactggggatagttctgcagcagcttcatatgcacagaaccagcttgggaacatacttgatgaggttcactctgagcttcttccagaggacaaggtgaggatcgtcgacgagctcaaggcaaagcatggcccgactctgatgatcggcgacggcatgaacgatgccccagcgctggccaaggccgacgtcggagtctcgatgggggtatctgggtcagcggttgcgatggagacgagccacataaccctgatgtcaaacgacatccgccggatcccgatggccgtccagctggcgcggaggacgcaccggacgatcgtcgtcaacatcgtcttctcggtgatcaccaagcttgcgatcgtcgggctcgcgctcgccgggcatccgctcatctgggcagccgtcctcgcggacgtcggcacatgcatgctggtgatcatgtacagcatgctgctgctgagatcggaatcgaacggcggccggaaggtgaagaagtgctgtgcctcgtcgcagcatgggtcacactcacacgccaggaagaagcattgtgtctcccaccactgttcagatggcccgtgcaacaagtcgacggcaggctgttccaaggaatcgccgtctgctggtaagcatgcttgcagtgatcatggccatgcccacacccactgcaaagagccgagcaaccaccggccggaaaggcatgcctgtcatgatcacggccacagccataaccactgcaaagagcccagcagccatgtggttacagaaaagcatgtctgccatgaccacggcaacacccatagccactgcgaagaggcaggcaaccagctgctgcttgtagagagccacggttgcaatgaccatggccatgggcatagccatgaccgctgcaaagagctcagcagcccgcgcttcaccagcaagcacgagtgccatgaccatgagcatagccactgcaaagagcccaagactccgtgtgctgacagtgaggctgcttgccatggccatggccatggacacgaacatcggcactgcgaaggggacagccactcacacgctacaggtgagcatggctgccatgaacatgatgcgcacagccactgcgaggagcacggccattcagacaccgctgttgagcatgcttgcgagcatgagtgccatggtgagcaccaaactgtgcacgctgtggaaacacaccactgccatgaccacgaccatgagcacggacagcatgagcttggggagatcgaggaacctgagaaggactgccacgaccacagccaccactgctgccatgagcctcacggcaaggacaaggtcgcggccgagccagttgaagaggtcacgatctcaatcgctgccctgcccaaagacgaaggccaccaccacagcgaggaacaacacaatggggagcactgcaggaaggcgaaagactgcggcggcggcggcggcgctgctcccaccgactgcgctgcgagcaagaactgctgcggcgtcaaaggtggagacgcctgctcgagcgtgcaggccgcgcgtgctagggagaccggcccgtgctgccggagctacgtgaagtgccccaggacggcggcggcgagcaggagcagctgctgcggccacagcatgctgaagctgcccgagatcgtggtagagtagtagtagtactgtagtagggtggaaattccaccgtgggagaagggtgtgcacatatgaacaagcaactgtgaggtgagtgtgactcgccggcgtaaatgtagactaagatcgccggtgcagggtgtttgatctagtagtctagttactatataggtttgctggagaaaaaaatgatgtaggattttgactgagcagagcagggggtctgaaaggtggaaggaagggctctgcttggttttcctgcacactgctcctctgtttgcgtcttctgtggcggcggcggcaatggagactgtcacagacgaaggatgtcatgtgactagtgccggccggggccaacactaatattcaggaactatccatatccatttcggtcccttttaaaatgggagtttctttttctatctcctacgttttctattttagaataaattgatttatgtgactgcgattgcgttttagaataaattgatttatgtgactgtggctatgaaattactgggttctaaaatttctgtgctacggcccgatcgtg

SEQ ID NO: 207385 - DNA, 3518 bp, Zea Mays
cttcctccttgtactcgtacgcggcggcggcggcgaggtctctgggaccgggcggcggcgtgcgcccatgcggcgctcctcctcgtactcgtacgcctcctccaggagcacttccgttcccgcgccgcctcttccaggtgcacgcgctgctccttgacccacagtgctctctcccactccggccagcccatctctccctccgcggccagcagctttctcttccagtccggccagcgagcccctgcgcatccacttccaggcgtagcagcggcgtgtagggactccgctcgtggcggccggcggcggcggcattctgccattgccaactactcacataatcccaggcgctggcctctcgcatgcacgagcacaagctatgctcaggcacctaaccaacaacccattgctctcgcgccgatgccaccgcatgttccatcacaaccggctctgtaccaccgccacatcctcggcggccgccggtgagatcgcgccggatcccgccgcatacgagactaccgttggcgttgaatatgacctcgcgcaggagttgcgcagccacctcgtgcgcgacacctgcaggctgctcgagctccgggactcgtggagcgccaagctggaggcgcagctccggcacttcctccgcgcgctgacgccatcgcaggtccgcgccgtgctgcgcgcgcaggcgcagcgggacgcccgcgctgcgttcgagttctttcgctgggccgaccgccagtggaaataccgtcacgccccggaggtgttcgacgaaatgctggcgctcctcagccgcaccaggctccacgacccggcgcgccgcgtcgtgcgcctcatgatccggcgtggtatacgccggggcacgcggcagtttgcacacctcatgctctcgtacagccgcgccgggaagctccgctccgccatgcgcgtgctccagctcatgcagaaagatgggtgcgcgcccgacatatgtatatgcaacgtggctgtgaacgtgcttgttgtggccggacgtgttgacaaggcgctcgagtttgcggaaaggatgaggcgtgttggggtcgatccggacgtggtcacatacaattgcctaatcaagggattatgcggtgctcggcggattgttgaggcattggagatgattggctcaatgctgcaaaatgggtgcccgccagataagattagctactttacagtgatgagcttcttgtgtaaggagaaaagggtggcagaggtgtggaatttgctcgagaggatgaggaatgatgcaggtatatttcctgatcagatcacgtataacatgcttattcatggccttgcaaagcatggtcatgcagatgaggcgttgactttcttgagggagtcagaggggaaaagattccgtgttgatcaggttggctatagtgcgattgtgcattcgttttgcttgaatggtaggatgtcagaggcaaaggaaattataggcgagatgatttcaaaggggtgccgccctgatgttgtaacttatagtgcggttgtagatggattctgccggattggggaactcgatcaagcaagaaagatgatgaagcatatgtataagaatggttgcaagccaaatacagtcacacatactgcactgttaaatgggctttgcaaagttgggaaatcttcagaagcatgggaactgctaaacaagagcgaagaagagtggtggactccaagtggtatcacatacagtgttattatgcatggatttcggagggaagggaagctagtggaatcatgtgatgtggtaatgcagatgttgcagaagggtttcttccccacggctgtggagattaacttgttgattcacgcgctatgcaaggaacaaaaaccagcacgtgccaaagacttcatggagcagtgccaaagcaagggctgctttattaatgttgttaatttcacaactgtaatccatggattttctcggcagggtgatctggaatcagcactatctttactggatgacatgtatctcaccaacaggcatcctgatgttgttacatacactgttgttgttgatgctttaggaaggaaaggtaaaatgaaagaagcaacagcgcttgtagagaaaatgcttaacagaggtttgctccctacacctgtcacatacaggactgtgatacataggtattgtgaaaagggtgcggtggaagatttactcaatctgctggataagatgttaacaaaacaagggtttagtagtgcatataatcaggtcatcgaaaagctatgtgcatttggtaaacttagtgaggcttacaatctgctcagcaaggtactaagaagtgcctcaaaaagagatgctcaaacatgccacattttgatggatagttttctgaacagaggactcccacttcaatcatataatgtggcctgccgcatgttccagagaaatttaattcctgatcttaaattatgtcaaaaggttgacagtcagttggccctagtgggtgagagacatgctgctggaaagcttatcacgaagtttcttgaaagaggtattttagaacaagaaaaacaagatagctgatctgtaccacagtcctgtggtgttacctgtctttatttatagattgcaggtgttgcgatggattgcggtccccccatcccccactagcataatagctagccaagtactgtactacggattgctgatttccctgccccgtcatgataccttgcagcatggagtactggcctgacccacagcgggggatcaaggaagcatacagggtcttgaggctcgttgggctagctagcttacgtgattggcccgatgtacccacccttctggctaccccgcttcttcgccgacatgtgggtgctcttccccaaggaggaagagtacatcgagtcgttcaagaaggctgggtttaaggatgtcaagctgaaaaaggatcggaccgaagtggtaccgtggtgtctgaaggcatggcctcatcatgggttgctctgtcacaggcgtcaagagagagcgtggagactctcccttggagctcggccccaagttggaggatctcagcaagccagtgaatccgatcaccttcctcgcttccttgtaggaacaatatgtgcatcacactatgttctgtgcctatttacatgtggataaaggaccaggtcgtgccaaaaggcatgccaatctgagtgggaaggggaatgagctgcatggaagagaggatagccaacatctgaattagtcttctctatattaggcacttcttgtgtgttttgtattagtacctcttgttttcctactgctatgtactccttgtactgttgttcctgtttatgggaattgataataccaagacacggatattatccagtttcttgagcatgactgcttgcagtggaacctccgtagcagattatcggatttgaattacatggtgtacaactgtacaatttggttagttaaattatatgaatgtataatttagtcggttcctggctctgcaaaattccttctttccctttatcattagtac

SEQ ID NO: 207386 - DNA, 1056 bp, Zea Mays
atggggatagatcattgcattgttggtcttcacgaggaatgcctagtaagcgcgagtcatcagctcgcgttgactacgtccctgccctttgtacacaccgcccgtcgctcctaccgattgaatggctcggggaggccgaggacgaggagaccaacccgctggccatcgtgccggacagcaaccccatcccgtcgccgcgccgggcccggggcccgcccaccccaggcgccggcgccgcccacgccaacggcgacggtggggtgtccgtggggcaggtcaggaaggaggaggtggagtccaagatcgccgcgtggcagatcgccgaggtggccaaggtcaacaaccggttcaagcgcgaggaggtcgtcatcaacggctgggagggcgaccaggtggagaaggccggcgcctggctcaacaagtacgagaggaagctcgaggagaagcgcgccaaggcgatggagaaggcgcagaacgaggtggccagggcgcggcacaaggcggaggcgaagcgcgcgtcggcggaggccaagcggggcaccaaggtcgcgcgggtgctggagctcgccaacttcatgagggccgtggggagggcgccctccgccaagcgctccttcttctgaaccctcccccaccgcccaccgggcctctcctccttcaccagttcctctgccctgctctgctcgtcgtcgccgcccgccgcctgtgcagttcagttgcatcgttcaccgcttcactccacgggatcagacagagtgatcagtgccgtgcttagctgtgtggaacgcttgttttagtgctgtgtccacatgtatgatttgtaaccttttcttctccctcctgtttatgtcagtacacgaaggatgtgctctgccggagtgttgagggcaagagctgcctgtattttgttgatatttcgtcatcaacagctgtgtatgtcagtacgaacaagataatggaagtccattaccactgtgtaaagtgtaaactttgtgcttgtctgctgcatgcaccgacgagcttcactacttggaacttcagttttgctgttgagct

SEQ ID NO: 207387 - DNA, 1645 bp, Zea Mays
gtctcggcttgcctctccaaacctccgcatcctggaacccgccccgccacgccaccgccatctccccgcgccgccggcctaaaacctagccaagccatctcccccgcccgaaccttccaacgccggccgcttcctatctcaaccactcgccgctccgtctggtcttccttcacaccgattacgtggcgcacctactcgtgctcctcacctacgtctccagcgcttctgctctccgccgccacttccgtcgctcggtcaccgttgactgctgctacggctagctgggtgttaactgaatcgtaggaatttaggaatatagttggcacagcccgccacggcatggaggtcgacggcgaggcacaacatttccgcctcttctccaagagggccaagcccaagctcaagcccgaggtccagccccagccggagccggaacccccaagccgtgaccccgccgccgccgaagcctacctcgaccctgctcccacaatcgtgaccgagaccggccaggccgacgacgcggcggacgctgccggcacggcgccggcgaccttcgcggaccttggcctatcgcagtggctggtggatgcgtgcgaagccctgggcatgcggcgccccacggcggtgcagcgccggtgcattccgcgcgcgctcgcgggggcggacgtgctcgggatcgccgagacggggagcggcaagacggccgcgttcgcgctgcccatcctgcaccgcctcggggaggacccctatggcgtggccgcgctcgcgctcgcccccacgcgcgagctcgcggcgcagctcgccgagcagttccgcgcgctcggggcgccgctcggcctcaggtgcctcgcggccatcggaggattcgactcgctcgcgcaggccaaagggctctcgcgccgcccccacgtcgtcgtcgccaccccaggacgcattgcgacgctcgtcaaaaacgatcctgacctcgccaaagtattctcccgcacaaagtttcttgtgttggacgaggccgatagaattctagatgttaattttgaagaggaacttcgtgtcatatttggctgtctaccaaagaagcggcaaacctttttgttttcagcaacaatgtcagacaatctgagatctttgcttgaactttcggggaacaaatcatacttttttgaagcatacgaaggtttcaagacagtggagaccttaaagcaacaatacatccatgttcctccacagggaaaagagcttcatctttggcatcttttgtcagttatgaagggaaaaacggaagaccctattcgttcagccattgtatttgtctctacttgcaaagactgccaatatttagatctgctgctggaagaacttcgttatcctgcggttgctttgaactctcacaagtctcaggcacagcggctctcagcacttaaccggtttaaatccggtcaggttcctgtattgcttgccactgatgtgggcagtcgtgggttagatatccagacagttgatcttgttatcaactacgacatgccgatgtctccacgtgattacatccaccgggttggacgaactgcaagagcttcaaggggagggctcgctataagctttgttacacagctctctgtcagtcaaggaggaacagcagttgtgggaa

SEQ ID NO: 207388 - DNA, 2034 bp, Zea Mays
gtcaagcagaagcagaagcgctgaagcagcgcgtttgcagactgcaaagacccctgtgaatttgtgatgtactgaggtgttgtccagccaacagtccttgctcccaagattcttccgtactcccccctccatcggaccatcctctaccatagatctcccgaactccgccgtaatcgggacgaatcccgcgcgtgctcttgctccctgtcgttctccgcggccggcgcgagctgccggtggttcgttgccgtcgacctcgtctggccgctcctctgccctgccagctgccggattcctgctgctggactggattgctgcgcgtggagtcgtgagtatagctccatctatcctgactgatacggatcgacctctcctctcgtgggtttttgggttttcatcagttctatcagaggagtgcttatggatgattgcatggctgtagctagctaggccctgctttcctgtttgtaaagatacatcatggcaccacgcagtagggctccatctagaaggcctctctggttcattgtcttggttgcctttgtctgtgtagtagccattggagcctatctttatactccacagcattacacagcctgttatctggtaccatcagaagcctgcaattctcggcctcctccagaacctgctagggtatacactgatgatgagattgctgctcgtgttatcatgagagacatcattcgggctcggccagtgcagtcaaagaacacaaaaattgctttcatgttcttaacacccagtttattgccatttgagaagctatgggaaaaattcttcatgggtcatgaagacagatacaccatatacgtgcatgcatcaagagatataccgagtcattcaagtccaatattcgctggcagggatattcgaagcgaaaaggtgatatggggcacgatttctatgcttgatgctgaaaagaggctcttggcccatgccctacaagatcctgaaaaccagcattttgtcttgctttctgagagttgtgtgccacttcataacttcgattatatatatagttatctcatggagacaaacgtcagttttgttgactgctttgatgatcctggtccacatggagcaggtagatattctgagcatatgctacctgaaattgtgaagaaagattggagaaagggtgcgcagtggtttacagtgaaacggcagcatgcgattcttattctcgcggacaccctttactatgggaagttcaagcgttactgtaagccaggaaacgaatggcataactgctattcagacgagcactacttgccaaccctctttaacatggttgatccgactggaatctcgaactggtcggtgacgcatgtcgactggtccgaagggaagtggcatcccaaagtctacagggctgcggacacaagcttcgatctgctcaaggacatcgcgcatgtcgcgcagaggaggccgtgcgtgtggaacggcatgaagcggccctgctacctgttcgcgcgcaagttctacccagaggcgctggacaacctgctgaacatattctcgaacttcaccatcatctgagcgagcggtggatcggggaggggtttccgtcctccctcttgagtgctgcggcatcagcggccgcccgccgtggtaactggtgaggccgtccggccgtctacttggtgacgggaatctagtagctgaaggaagcaggaacacggttaccggagcacgcagatctgggagatcgggattcagatgttgccacctgcttgctcatcctgccgcactcgtgtgatctcgctctagtagatcgctggtgtttttgcaggtgtagacattggctaggctggtgttggatgcacttctgttggtgttgatgaagaactgtgattaatttaataataatacgtacgtactaagttgtactcctccgtcccaaaatataactagttttagactaaccatacatctattaattatctgcatttattattattcattgtaacgtggatagaaaaaaaagatgtccagaaaagaactatatttttg

SEQ ID NO: 207389 - DNA, 1371 bp, Zea Mays
ccaagtgtcagcagcggacctgtggactgtgatgtcgcgagcgcgcgcgtgtgtggataacgattttgaccgatctaaacgggccaaatggatctatcaggtctttgacccacattatttcaagtaagttattaatgggcaggaatatggcccaaacaaaaatcagagtccacaagggcctatgaagactagatccacagtcagagtcaccaccagattcgcgtgtagggaaagctagcggatcgctcgacggaatccggaaggcggaagccaccgaggcgagcggcgagcgcacgcaccggcacaagcaccacaccgccgctaccgactcgaccatcactcacccaattcgtggaggtgagagatggcggcgtcgggatcgggaggcaacgagcccagcggacggccctggactgcaaccagcacgtggacccccggtcccgccggcggggccgtggcggacgctgtctcgtttgagacctccgacgacgacgcggaggcgtcaccggcgggcgtcgtgctctgccacccgtcggccgactcggaccgcgacatgactccctgcccctgcgaggtcactgttagtttcaggggaaagtatgagattcacagggtatatgtgcgaagcacggctcggatatatgaactataccactctcctgatgcaaagggtaccagcaaggattatctatgcactgtgcgttgtggacttgctgttaaagaaacacagtgctgtggtgaagaaagtatgtcacagtggactggcagtgctttaaacagtgacaagcgtgaacatgaggcaaaaagtgtaagcagtgcaagtgatgaagatagttgggttgatgtcaagattccagaatctcctgcaggaaataaaacaccagaatctcaagaaaggagtgtgattcgaacctgccgagaaaatactctgccacactatgaagctactgctgagatgactgatgtgaacccatgtgtatctcttactgtacgtcttctatcacttcagtcgaagacatccgtgcacattgaggaaatctacatatttgctgatcctgttgagcccaccgatgatgtttcagtaagaggtcctgtaaacatgggaggtagttctttgctggcaatgcttgttcctggccttatgcaaatgtctaaatcaaggaatttgaaaatcgatgacagttatttttctgacggatcaaggaatcaagaaagcagcaaatgtgaaagctttacacaggaagcagggccatgtagcacaaatgattcaaaacatacgtctgcaggaatagaaaatggaatgaactctacagtcggtgtttcagcatctgatgataaaagcagccaagttctgagcattgcaggagaaag

SEQ ID NO: 207390 - DNA, 4547 bp, Zea Mays
ccaagtgtcagcagcggacctgtggactgtgatgtcgcgagcgcgcgcgtgtgtggataacgattttgaccgatctaaacgggccaaatggatctatcaggtctttgacccacattatttcaagtaagttattaatgggcaggaatatggcccaaacaaaaatcagagtccacaagggcctatgaagactagatccacagtcagagtcaccaccagattcgcgtgtagggaaagctagcggatcgctcgacggaatccggaaggcggaagccaccgaggcgagcggcgagcgcacgcaccggcacaagcaccacaccgccgctaccgactcgaccatcactcacccaattcgtggaggtgagagatggcggcgtcgggatcgggaggcaacgagcccagcggacggccctggactgcaaccagcacgtggacccccggtcccgccggcggggccgtggcggacgctgtctcgtttgagacctccgacgacgacgcggaggcgtcaccggcgggcgtcgtgctctgccacccgtcggccgactcggaccgcgacatgactccctgcccctgcgaggtcactgttagtttcaggggaaagtatgagattcacagggtatatgtgcgaagcacggctcggatatatgaactataccactctcctgatgcaaagggtaccagcaaggattatctatgcactgtgcgttgtggacttgctgttaaagaaacacagtgctgtggtgaagaaagtatgtcacagtggactggcagtgctttaaacagtgacaagcgtgaacatgaggcaaaaagtgtaagcagtgcaagtgatgaagatagttgggttgatgtcaagattccagaatctcctgcaggaaataaaacaccagaatctcaagaaaggagtgtgattcgaacctgccgagaaaatactctgccacactatgaagctactgctgagatgactgatgtgaacccatgtgtatctcttactgtacgtcttctatcacttcagtcgaagacatccgtgcacattgaggaaatctacatatttgctgatcctgttgagcccaccgatgatgtttcagtaagaggtcctgtaaacatgggaggtagttctttgctggcaatgcttgttcctggccttatgcaaatgtctaaatcaaggaatttgaaaatcgatgacagttatttttctgacggatcaaggaatcaagaaagcagcaaatgtgaaagctttacacaggaagcagggccatgtagcacaaatgattcaaaacatacgtctgcaggaatagaaaatggaatgaactctacagtcggtgtttcagcatctgatgataaaagcagccaaggtgaattccatttcaaggacccagattctcttccactccctgtacaaacattagaaagtacacaagcgccttcagtgaagaaccagcatgaattaaacacaggttatcttgctaatcccatcatgagtgaaaaccttactccttctaatcatattgagagaaagctggacactctgctttcgaaggtagagaatatggaattattttgctctaggtttgaggacagcatgataaagccccttggtagcattgaggcaaggcttcagcgactggaggaacagtttagttcgttcgctgttgatattcagtctttgagagattattctgcatttaggtcagcaccagatggtatgcctaatacaaagagctcacaggaggaagcacataatgatgctaatgatagaagtacttctacatctgacaggaagccaggtttagttgtcagggcgccagattttgtgtcagatgattcatgtggttgtaatgtgataactaatggaagccgtgttaattgtcatgggcctaatgtggtgccaagaatacttgtgaaggcccctgattttatttcccaacctgagttaacggatgaaaacctccatgacggacatgctctatcttctgaaaaggagtgtaagacttccccaggtttagttgtcaaggttcctgaactcccagatgatgatgatgatgatggagtcgaagataagaaacaggcagaagtttgtggtgatggtgatgatcacacaaggtctgatgatactctaaggaaaagcacagctggcaacaccaagagcaaaaaatctgtatctatcaatggcgcgttggcatccgcattggaggcattactcacttctaccataggaacatcatattcaaaacctactatttgtgctaccagtaatttaagtgctgaaaatattaatggtttcttcagttgctccccttgtcctgaaaaaactggcgagatgtccactaaagatggttcagctgtccaaattctgggtacatctggtgatccaaatttggtcggtgccttcatatcttctcaggaaattgatacagctccacataattctctctcaaaggaaatgttggatagcaaggttgagataaatgaacagaactgtgacatcaatacagaaaatgtggcatttgttgcaatcacagaaccattggatgttccctcacaggctgatacagttgaggaatctattaatgatggaagttgggtgaatagacaaaactatggttctaatttgaatgcaatgccttatgccatgaacgttgaacctttggatcctcctaagcctcctacagtttctgaacctgttgatagtggagttcaggtgaatgaagatagaccttccatatccttggtggagtttcttgcagcaaggaatgctagctcttgtaagaatggtacttctgaggtatgccttggtaatgttgccgctgaaaaactgtcttttgagagaacatcggctggagctggtaaaaactcgaaaaatatcagtcagcttctagtgaagaaagctcttgaggttgatgcggacaagatattttttttgtttagtgtacccattgggccaaaatttgaaggatcaagcagtcccacccccagaactagtgggcacaatattaataatacagaagaagctgtctcagataaggaatgtggcgtgaaggataccaagaatggatttaggccctctttggggatggactctatattttctcagtaccatgctacagattctaagaaaaatttgagtgagaacagcagttcggaccggattctagatgagagtttctcaaaacagaatggagaacaatctcggtcaagtctgagtagtatggtgtcatttagtggagcatctgccacagaacccgttgttccagggagtggcacatcggaaaattacgtggaagatcttacaggcgttagagatcgtcctgttgcaacactaaattctggggaagagctccaaaaggtctgtgatttactttatgagtttaaggatgaaatgttgagggcctccgtagcgaagtgtacaaataagagcagcccgtcacttgaagctttgcttgctgaatcatctgattctgaagcgcaaatctctgatctggagggtactgacagtggtgctggcattggctccggtcgactgtttagtacactctcatcttcagatgacgatgatgcttctgctgcggacgagcctttagttgatgttgctgacctgactacgccaccagagcgatatacttctgtccccagcgacgagcctctggttgacatagctgacctgacaaacccttcagggatagatgcttcttcagtgaatgagcctccggctgatgtggttgatctgctacatacttcaaacgagcctttggtcagtttggatggtctgccaaaccatccagagatgtgttttggtgggagcagtggagaacataccgacagtcttatttaaaggataaggccatgcggtactgatagttcagagatgagcggaacatataagtccatgcggctgatgtgaacgacagtctcatataattctgagcattgcaggagaaagcaaagttactacttaccagacgcgcctatattggtaccatttcagtttgaagtgatgtcacattgtcaccagacctgagttacaatcatgatgaacaacatctagaccagaccagacaagtgacaggttaagctcggaacatgctgtgttcttttactttcgatggaacacgccatgttccttccataagtaagcgaacagaagaacaggcggcgctctgttcacatgtgagcatgactgccacctgctgcgcgcctgcgctccgtgtatagaacacgggctagccctggtcctggcgaagtcgtcccgccattaatacgagacacggcccggcccggcccgtgcggcccattagtgggtccgactccgtcttcgctctgtctaggttcaaggaataggttataggaatccatggattcgcattcgcatccccgcgagatcacaaacacaaagagacacaagagaaacaatagtggataaacttttctcttgttatttagtatgagaaggtagatgcttatgatatacaaaagtagagccacttatggatatgtttgatattgtgcacttaaccatcgtatggtttcttaatattataccattttgtcttctc

SEQ ID NO: 207391 - DNA, 967 bp, Zea Mays
cctccacgaattgggtgagtgatggtcgagtcggtagcggcggtgtggtgcttgtgccggtgcgtgcgctcgccgctcgcctcggtggcttccgccttccggattccgtcgagcgatccgctagctttccctacacgcgaatctggtggtgactctgactgtggatctagtcttcataggcccttgtggactctgatttttgtttgggccatattcctgcccattaataacttacttgaaataatgtgggtcaaagacctgatagatccatttggcccgtttagatcggtcaaaatcgttatccacacacgcgcgcgctcgcgacatcacagtccacaggtccgctgctgacacttgggttccggggcgacctctggcaaggatgcaggtggcagtccgcccgctcgctccgagcgccgtcggaggaggaggggggcgaggaggcggcgcggcgcgagacgccggaggagacgcggaagcggctggaggagctggacgcgctgctggaggggctggtcgagcccaagatgcggccgccaacgccacctcctcctccggatccgtacctggaccgagccacgatgataactgggcggggatcatcagccgacgagctgccagagttttctccgacatacgtggcgttctcgacgcttggactcgtcatcctcaccatcttcaccaacgtcatgttcaacctgtacataaaaccctccgtggacggcgtcgatccaccgcctgaaagaatccagagaacggccctagtcaatccagcagacaggccgtccgaatagttttctgcgcagcacaatacacacagtatacggttttgatgatgaagacatgtgtcccaggtgggaatggactatttaattgtgtggacagtgggtggactcacacattattactagcgtcatactgcttctctcaagtgacccattatccggtgggattacatgactgcgag

SEQ ID NO: 207392 - DNA, 2955 bp, Zea Mays
atcaacggagcttagcctgggcagcagtgagcagccgccttcccctgtgctgcggatcgctacactacaccaccactcaccactcagttactcaccacacatccatccaactatccaagcccacagtgaggcagtgagcagcatcccctctcctgtagggggagtctgtagtagcaacctgttgtcgatcctactcatcagtcatcttccctgcgcaaagcctgcagctttaccaccgccgccgccgccgccgcctcctctccttcgaaagcgcgcctcctgctagctggctgtcctgagctcgggcctgtcccgcgcacgcaatcgcgccctgcctagcaagctagacaggcgccgccagttattgcaccgggtgcgatatcgcgctagccgcggagtgcggagtagtgggcggcggataggctgcgccgctactccttcgtgcgtgtgtggggaggattagtaactgtagaggaaggcaggcacgcaaaaggacgccctcgcctccgcctcccgcccgcgcactcacgtgattcatacttgcggccttctcgctcgctcccttcttcatcaccacccctctcgcgccgcagcgggcgggcaactactatatcaagcaccaaattaaacccacccagctcctctctcgccccttcgttcctgggagaccgtaccggccggccgcgggagatggtcgaggcgccggccgtcgtggtggtggtgcgggcgtacgacgccgcgcgcgaccgcgtcggcgtggaggaggtggagcgcgcgtgcgaggtcgggtgcagcggcggcggcaagatgtgcctcttcacggacctcctcggcgacccgctctgccgcattcgccactcgccggactccctcatgctggtacgtgtacacgtgcgtacgtgctgtgctcgcgcgctctctgtctgctctatacacccacgttgtggtcgtggctgcctgcggctaagcacaggcccagcggccggccggccagatgcagcaggtgtgagatgagccgctggggctggggctgggctcgcccgacctagcctaccacctgtcctgcgcccgtccccccatgcctcccgccctcgtctccttccgcctcgtcgtgtttcgttttcgtttcgtttcgtttcgtttcttctcgttccggttccggcgccccgtacgtagtacgacgtgggtcccggccggacggaggaaacaggaaggaactcaactgaaattaatggactgcccgcgaaacgcatgtctgaacggccgggatatgcattggaaaagcaggtcgcagagacagcaaccggccccaacagcacggagatcgccggagtcgtccgcggctgcgtcaagaccgtcgtctctgctggcaccaccaccacccagcaggctaataaggacgaccccatctacaccaaggttggctacatcctcggcctccgcgtctcgcccagccaccggaggaaaggggtggggaagaagctggtggatcgtatggaggagtggttccggcaaaggggggccgagtactcgtacatggcgacggagcaggacaacgaggcgtcggtgcggctgttcacgggccgctgcggctacgccaagttccgcacgccgtccgtgctggtgcacccggtgttccggcacgccctgaggccgtcccggagcgcggccatcgtggccctggagccgcgggaggcggagctgctgtaccgctggcacttcgccggcgtggagttcttccccgccgacatcggcgccgtgctatccaacgcgctgtcgctgggcacgttcctggcgctgccgtcgtcgccggcgcggtgggagggcgcggaggcgttcgtggcggcgccgccggcgtcgtgggccgtgctgagcgtgtggaactgcatggacgccttccggctggaggtgcgcggggcgccgcgcctgatgcgcgccgcggcgggcgccacgcggctggtggaccgcgcggcgccgtggctcgggatcccctccatccccaacctgttcgcgccgttcgggctctacttcctctacggcctgggcggcgccgggcccgacgcgcccaggctcgcccgcgcgctgtgccgcagcgcgcacaacatggcgcgcgacggcgggtgcggcgtggtggccaccgaggtcggcgcctgcgagcccgtccgcgccggggtgccgcactgggcgcggctaggcgccgaggacctctggtgcatcaagcggctcgcggacggctacggctccggcccgctcggcgactggaccaaggcgccggccagacgctccatattcatcgacccgagggagttttaggctgataagtagtaaatacacttaggcctagctttagggtttttttttggttctccccgggtcgtcgtccgttggatcccgtatccgacggctcctagtagctagctctagagaaggtcccacccttttgtgtttcgtttcaaaacatgtggtaacgcgcgcttgcttaggcgtaatttctgctagcgaaccgaattagttaaccttttcgatcttttgattgatgcatgtgaaacacacagctgctacaccctttttagttgttgtaactcgttggtggaccagggtggagaccagggccagtaccttctcctttttgggtccatcagagattaagctgagaccgcgttgagacaacgatctggacaggagctgagaacatgatttcccacttctgcctctttttttttttttggttttcgtagtattgttctttacggggattatctcggatgttacgtttggcaaaagtattattgcaatcacacggaaaataagcatgatcgtggtggtgatggtggtcgtggttttgtttgtttgccaaatgatgacacccatgattggtttgaagatcatgaagctagatcatgtacaaggtgcttatacccgtgattacgaacgcttaaagtgagaatgattgca

SEQ ID NO: 207393 - DNA, 366 bp, Zea Mays
gcgtggacggccagatggcctgcgcctgtcctgccccccggtcccgggcctataaatggaggcggcggaggcctctctcccgtcggagcagggcaggggttgcgtctcagttcctggttgtgttgttgtaagctcccaggtttcttctcttcgcgtgagctagctagagtgggatcgcgaggaagaaggatgtcgtgctgcggaggcaactgcgggtgcggcagcggatgcaagtgcggcagcggctgcggagggtgcaagatgtacccggacatggttgagcaggcatatgagcatgagctaaaagagacggtcctactttgacgatggggcagtgtttcctttttttcccaacatgtggataag

SEQ ID NO: 207394 - DNA, 6791 bp, Zea Mays
tggagagggaggaggaagatgcagctgtctatgaatggttctatgatcacaaacctctaatgaagacaaaacttataaatggtcccagttacaggaaatggcatctatctcttcccataatggcaacactatatcgccttgctggccagctgctgtcagatctgatcgataggaattatttctacttatttgatatggagtccttctttacagccaaggcccttaatatgtgcattccagggggtccaaagtttgagccattgtaccgtgatatggagaagggtgatgaggactggaatgagtttaatgacataaataagctcatcatacgtcagccacttcgaactgagtacaggattgctttccctcacctgtacaacaacaggccaaggaaagtgaaacttggtatctatcatacccccatgataatgtacatcaagactgaagatccagacttgccagcgttctactatgatcctctgataaatcctatcacttcaaccaacaaggttgatcgtcgggagaggaaagcagctgaagaggaagatgatgaagatttttgtctcccagaagatgtagagcctctcttgaaacagactgaactctacactgatacaacagctgctggtatatcgttactttttgctccaaagccttttaacatgagatctggtcggacacgtcgtgcagaggatattcctcttgtatctgagtggttcaaggaacattgccctccagcttatcctgtgaaagttcgtgtgagttatcagaagctattgaagtgttatgtgctcaatgagctacatcataggcctcccaaggcccagaagaagaagcatctgttccgttcactccaagcaactaagttcttccaaactactgagcttgactgggcagaagcaggcttgcaagtttgcaagcaggggtacaacatgctaaatttgttgattcacaggaaaaatcttaactatcttcatttagattacaatttcaatttgaagcctgtaaagactcttacaacaaaggaaaggaagaaatctcgttttggaaatgcattccatttgtgtcgtgagattttacgacttacaaagttggttgttgatgctaacatccagttccgtctgggaaatgttgatgccttccagttggcagatggtctgcaatacatattttctcatgttgggcagttaactggtatgtataggtacaagtaccgattgatgagacagattaggatgtgcaaagatctgaagcacttgatatattatcgtttcaacactggccctgttggtaaagggcctggttgtgggttttgggctccaatgtggagagtgtggctcttcttccttcgaggtattgtcccactattggagcgctggttgggcaatcttctggcacgtcagtttgagggccgtcattccaagggtgtggccaaaactgtaacaaagcaacgtgttgagtctcactttgatttagaacttcgtgctgcagttatgcacgacgtcctagatgctatgccagaaggcatcaaacaaaacaaggctcgaactatattacaacatcttagcgaggcatggcgatgctggaaggcaaatatcccatggaaagtccctggtctacctgtgcctattgaaaacatgattcttcgttatgtgaaatccaaggcagattggtggacaaatgttgctcactacaatcgtgagcgtatcaggcgtggtgctacagttgacaaaactgtttgtcggaaaaatctaggaaggttaactcgtctgtggctgaaggcagagcaagagaggcaacacaattacctgaaagatgggccatatgttactcctgaagaagctgttgctatttatacaacaactgttcattggctggaatcaagaaagttctccccaattcctttcccgccattgtcatacaagcatgacactaaacttcttatacttgctctagaaaggctgaaggagtcatacagcgtagcagttagattgaaccaattgcaacgagaggagcttgggttgattgaacaagcttatgataatccacatgaagcactgtcaaggataaaaaggcatctccttactcagcgtgcttttaaagaagttggtatagaattcatggacttgtacagctacttgattccggtatatgaaattgaacctcttgaaaagatcactgatgcataccttgaccagtacctgtggtacgagggggacaaacggcacctcttcccaaattgggttaagcctgctgattcagaaccaccacctcttcttgtttataaatggtgccagggtataaataatttactggatatatgggacacaagtgatggacagtgtgttgtgatgctccagacaaaatttgagaagttctttgagaaaattgatctgactctgttgaacaggcttctgcgcttggtcttggatcataacatagctgactatgtcactgcaaagaacaatgtagtgttgtcttacaaggacatgagtcacacaaattcttatggtctcattcgagggcttcaatttgcatcttttgttgttcagtattatggccttgtgctggatctcctgattcttggtctaactcgtgcaagtgagattgctgggccacctcaaatgccaaatgagttccttacatatgctgacacaaaagttgagacaaggcatcccataagattatattctcggtatattgacaaggtgcatatattgttccggttcacccatgaggaagcacgagatctaattcagcgttacttgacagaacatcctgatcctaacaatgagaacatggttggttacaataacaagaaatgttggcccagagatgcaagaatgaggcttatgaaacatgacgtgaatcttggaagaagtgtgttctgggatatgaagaaccgccttccaaggagcattacaactttagaatgggagaatagctttgtctctgtttacagcaaggacaatccaaacctgctttttagcatgtctggctttgaagtccggatactgccaaagatacggatgacccaggaggcattcagcaacacaaaagatggagtatggaatttgcagaatgaacagacaaaagaaagaacggcaattgccttcctgagggttgacgatgaacatatgaaagtgttcgagaaccgtgtccggcagattctaatgtcatcagggtcaacaacattcaccaagatagtcaataagtggaatacagctctcattggccttatgacatatttccgcgaagcaactgtccatacccaggagcttttggatttactggtcaaatgtgaaaacaagatccagactcgtataaagattggcctgaattcaaagatgcctagtaggtttcctccagttatcttctatactcccaaggagattggaggtcttggaatgttatcaatgggccatattcttataccgcagagtgatcttaggtatagcaaacagacagatgttggtgtaacacattttagaagtggtatgagccatgaagaggatcagcttattccaaacttgtatcgctacatccagccatgggagagcgagtttattgattcacagcgtgtttgggctgagtatgctttgaagaggcaggaagcacaatcacagaacagacgattaactcttgaggatcttgaagattcatgggatagaggtatacctcgtatcaacactcttttccaaaaagaccgtcatacactagcctatgacaaaggatggagagtgagaacagattttaagcaatatcaagtgctgaaacagaacccattctggtggacacatcagcggcatgatgggaagctttggaatctaaataactacagaacagatgtcatccaagcacttggtggtgtagaaggcatcttggagcatactttatttaaagggacttacttccccacttgggagggtctgttttgggagaaggcatcaggtttcgaagagtcaatgaaatacaagaaactgacaaatgcacagcggtctggtctcaatcaaatccccaatcgaagatttaccctgtggtggtcaccaaccatcaatcgtgcaaatgtctatgttggtttccaggtccagctagatcttacgggcatattcatgcatggtaaaatcccgacattgaagatttctctgatccagatcttccgtgcacatctgtggcagaagatccatgaaagtgttgttatggatctttgccaagttttagaccaggagttggatgcacttgagattgagactgtgcagaaggagacaatacatcccaggaagagttacaagatgaacagttcctgtgctgatatccttctctttgctgctcatagatggcagatgtccaaaccaagcttagtttctgagtcgaaggatgtatttgatcagaaagcaagtaacaagtattggattgatgtgcaactgcgttggggagactatgattcacatgacatagaacgttatacaagagccaagttcatggattacacaacagacaatatgtccatatacccatcgccaactggtgtgatgattggaatcgatctagcgtataatttgcactctgcttttggcaactggtttcctggatcaaagccactacttcagcaggcaatgaacaagatcatgaagtcaaatcctgctctgtatgtcctgagggagagaataaggaagggtctgcagttgtactcttctgaacccactgaaccatacctgtcttcacagaactatggagagatattcagcaatcaaatcatatggttcgtggatgatacaaatgtgtatcgagtcactattcacaaaacatttgagggtaacttgaccaccaaaccaattaatggtgctattttcattttcaatccaagaacgggtcaactttttcttaaggttatccacacaagtgtatgggcggggcagaagcgtcttgggcagctggccaagtggaaaaccgctgaggaggttgctgcattggttcgatctcttcctgtagaagagcagccaaagcaaattattgtgacaaggaagggcatgttggatcccttggaggtccatctacttgacttccctaacattgttattaagggcagcgagctgcagcttcctttccaggcttgcttgaagattgagaagtttggtgatcttatactgaaggcaactgaaccacagatggttctttataatatatatgatgattggttgaaaagtatatcatcatacacagcattctcccgcattgtgcttattctacgtgcacttcatgtgaataatgagaaggcaaagatgttgctcaaacctgacaaaacaattgttactgaaccacatcatatatggccatctctgaatgatgaacagtggttgaaggttgagtgtgcactaagggacctcatcctttctgattatgcaaagaaaaacaatgttaatacttctgcactgacacaatctgaaatgcgagatatcattcttggagctgaaattgctccaccatcacagcagaggcaacagattgctgaaattgagaaacagtcaagagagactactcagttaactgctgtaaccacaaggacgacgaatgtgcacggagatgaactcattatcacaaccacaagtccatatgagcaacaagcattcgcatcgaagactgattggcgtgtcagagccatctctgccacaaacttgtatctacgtgtaaatcacatttatgtcaattctgatgatataaaggaaactggctacacttacattatgccaaagaacatattgaagaaattcatatgcgtagcagatctgcgtacacaaatcgctggattcttatatgggctgagtccacaggacaatcctcaagtcaaagagattaggtgtatagccatccctccgcagcatggaacacaccagatggtgactctgccatcaaatcttcctgaacatgagttccttaatgatcttgaacccttgggatggatgcatacacagccaaatgaagctccacagctatcaccacaggacctgacatcacatgccaagattctggagaacaacaaacaatgggatggtgagaagtgcatcattctgacatgcagcttcaccccaggatcttgctcgttgactgcttacaagctgacaccaagtggttatgagtggggacgcagcaacaaggacaacggaagcaacccacatggatacctcccaactcattacgagaaggtccagatgcttctgagcgaccgcttccttggtttctacatgattccggataacaccccttggaacttcaacttcatgggagtgaagcacgacccacagatgaagtacaacatgaagctgggcatgccccgggacttctatcacgaggaccacaggccgacacacttccttgagttcagcaacatcgaggagggagaggtcgctgaaggtgatagggaggacacattcacgtagggcgctgggcgcctgttttagaaactcagtatctcaaacgcactttagctctgttttgaatggcaatgtgtgaaaggctgaaagctgtaacctgactcgacgggtgtcatctgtttttttggcttaatcctgtatcataccttgttgtaagacagccctggagaggggtaaaaattgtacaagtgcacgccatggcaacagtaaagattttacttagtagctatgctattctaagatggctcctcccaagctttaattttctcataatccctgctggacagcagaccgaagggttaaaaggaatatctcccacgccactctttgtgtgctatgggatcaggaagagaaaactat

SEQ ID NO: 207395 - DNA, 7326 bp, Zea Mays
tccatttccccttcccttttcactccgaagtccgacctctctcgaacacacaccacaccaccccgcttgacgacgcttaaaccctagcggcagttgcgggaggccgccgcgccgcgccgcgccgccccgtcgccgatgtggaacggcgcgccgcctccgccgccgccgcagatggcggcggccccgcctccccctggcacgacggtgcccggggcaggccaacctccgcccccgccgccgccggccggggcgccgttgggcggcaagccgctgacgccggccgagctcgaggctcagctggtggagaaggcccgcaagtggcaccagctcaactccaaacgctacggcgacaagcgcaagttcgggttcgtcgaggcacagaaggaggacatgcctcctgagcacgtccgcaaaatcatcagagaccacggagacatgtcttccaagaagtacaggcatgacaagcgtgtttatcttggtgcactcaaatttgtgccccacgctgtgtacaaacttctagagaacatgccgatgccttgggagcaggttcgccatgtgaaaatcttgtatcacatcactggggctatcacttttataaatgaaatcccatgggttgttgaaccaatatacctcgcacagtggggtacaatgtggattatgatgcggcgagagaaaagggataggcggcattttaaacgaatgcgctttcctccatttgatgatgaggagcccccactggactatgctgataatttgttggatgttgaaccacttgaagctatacagttggagttggatgaggaggaagatgcagctgtctatgaatggttctatgatcacaaacctctaatgaagacaaaacttataaatggtcccagttacaggaaatggcatctatctcttcccataatggcaacactatatcgccttgctggccagctgctgtcagatctgatcgataggaattatttctacttatttgatatggagtccttctttacagccaaggcccttaatatgtgcattccagggggtccaaagtttgagccattgtaccgtgatatggagaagggtgatgaggactggaatgagtttaatgacataaataagctcatcatacgtcagccacttcgaactgagtacaggattgctttccctcacctgtacaacaacaggccaaggaaagtgaaacttggtatctatcatacccccatgataatgtacatcaagactgaagatccagacttgccagcgttctactatgatcctctgataaatcctatcacttcaaccaacaaggttgatcgtcgggagaggaaagcagctgaagaggaagatgatgaagatttttgtctcccagaagatgtagagcctctcttgaaacagactgaactctacactgatacaacagctgctggtatatcgttactttttgctccaaagccttttaacatgagatctggtcggacacgtcgtgcagaggatattcctcttgtatctgagtggttcaaggaacattgccctccagcttatcctgtgaaagttcgtgtgagttatcagaagctattgaagtgttatgtgctcaatgagctacatcataggcctcccaaggcccagaagaagaagcatctgttccgttcactccaagcaactaagttcttccaaactactgagcttgactgggcagaagcaggcttgcaagtttgcaagcaggggtacaacatgctaaatttgttgattcacaggaaaaatcttaactatcttcatttagattacaatttcaatttgaagcctgtaaagactcttacaacaaaggaaaggaagaaatctcgttttggaaatgcattccatttgtgtcgtgagattttacgacttacaaagttggttgttgatgctaacatccagttccgtctgggaaatgttgatgccttccagttggcagatggtctgcaatacatattttctcatgttgggcagttaactggtatgtataggtacaagtaccgattgatgagacagattaggatgtgcaaagatctgaagcacttgatatattatcgtttcaacactggccctgttggtaaagggcctggttgtgggttttgggctccaatgtggagagtgtggctcttcttccttcgaggtattgtcccactattggagcgctggttgggcaatcttctggcacgtcagtttgagggccgtcattccaagggtgtggccaaaactgtaacaaagcaacgtgttgagtctcactttgatttagaacttcgtgctgcagttatgcacgacgtcctagatgctatgccagaaggcatcaaacaaaacaaggctcgaactatattacaacatcttagcgaggcatggcgatgctggaaggcaaatatcccatggaaagtccctggtctacctgtgcctattgaaaacatgattcttcgttatgtgaaatccaaggcagattggtggacaaatgttgctcactacaatcgtgagcgtatcaggcgtggtgctacagttgacaaaactgtttgtcggaaaaatctaggaaggttaactcgtctgtggctgaaggcagagcaagagaggcaacacaattacctgaaagatgggccatatgttactcctgaagaagctgttgctatttatacaacaactgttcattggctggaatcaagaaagttctccccaattcctttcccgccattgtcatacaagcatgacactaaacttcttatacttgctctagaaaggctgaaggagtcatacagcgtagcagttagattgaaccaattgcaacgagaggagcttgggttgattgaacaagcttatgataatccacatgaagcactgtcaaggataaaaaggcatctccttactcagcgtgcttttaaagaagttggtatagaattcatggacttgtacagctacttgattccggtatatgaaattgaacctcttgaaaagatcactgatgcataccttgaccagtacctgtggtacgagggggacaaacggcacctcttcccaaattgggttaagcctgctgattcagaaccaccacctcttcttgtttataaatggtgccagggtataaataatttactggatatatgggacacaagtgatggacagtgtgttgtgatgctccagacaaaatttgagaagttctttgagaaaattgatctgactctgttgaacaggcttctgcgcttggtcttggatcataacatagctgactatgtcactgcaaagaacaatgtagtgttgtcttacaaggacatgagtcacacaaattcttatggtctcattcgagggcttcaatttgcatcttttgttgttcagtattatggccttgtgctggatctcctgattcttggtctaactcgtgcaagtgagattgctgggccacctcaaatgccaaatgagttccttacatatgctgacacaaaagttgagacaaggcatcccataagattatattctcggtatattgacaaggtgcatatattgttccggttcacccatgaggaagcacgagatctaattcagcgttacttgacagaacatcctgatcctaacaatgagaacatggttggttacaataacaagaaatgttggcccagagatgcaagaatgaggcttatgaaacatgacgtgaatcttggaagaagtgtgttctgggatatgaagaaccgccttccaaggagcattacaactttagaatgggagaatagctttgtctctgtttacagcaaggacaatccaaacctgctttttagcatgtctggctttgaagtccggatactgccaaagatacggatgacccaggaggcattcagcaacacaaaagatggagtatggaatttgcagaatgaacagacaaaagaaagaacggcaattgccttcctgagggttgacgatgaacatatgaaagtgttcgagaaccgtgtccggcagattctaatgtcatcagggtcaacaacattcaccaagatagtcaataagtggaatacagctctcattggccttatgacatatttccgcgaagcaactgtccatacccaggagcttttggatttactggtcaaatgtgaaaacaagatccagactcgtataaagattggcctgaattcaaagatgcctagtaggtttcctccagttatcttctatactcccaaggagattggaggtcttggaatgttatcaatgggccatattcttataccgcagagtgatcttaggtatagcaaacagacagatgttggtgtaacacattttagaagtggtatgagccatgaagaggatcagcttattccaaacttgtatcgctacatccagccatgggagagcgagtttattgattcacagcgtgtttgggctgagtatgctttgaagaggcaggaagcacaatcacagaacagacgattaactcttgaggatcttgaagattcatgggatagaggtatacctcgtatcaacactcttttccaaaaagaccgtcatacactagcctatgacaaaggatggagagtgagaacagattttaagcaatatcaagtgctgaaacagaacccattctggtggacacatcagcggcatgatgggaagctttggaatctaaataactacagaacagatgtcatccaagcacttggtggtgtagaaggcatcttggagcatactttatttaaagggacttacttccccacttgggagggtctgttttgggagaaggcatcaggtttcgaagagtcaatgaaatacaagaaactgacaaatgcacagcggtctggtctcaatcaaatccccaatcgaagatttaccctgtggtggtcaccaaccatcaatcgtgcaaatgtctatgttggtttccaggtccagctagatcttacgggcatattcatgcatggtaaaatcccgacattgaagatttctctgatccagatcttccgtgcacatctgtggcagaagatccatgaaagtgttgttatggatctttgccaagttttagaccaggagttggatgcacttgagattgagactgtgcagaaggagacaatacatcccaggaagagttacaagatgaacagttcctgtgctgatatccttctctttgctgctcatagatggcagatgtccaaaccaagcttagtttctgagtcgaaggatgtatttgatcagaaagcaagtaacaagtattggattgatgtgcaactgcgttggggagactatgattcacatgacatagaacgttatacaagagccaagttcatggattacacaacagacaatatgtccatatacccatcgccaactggtgtgatgattggaatcgatctagcgtataatttgcactctgcttttggcaactggtttcctggatcaaagccactacttcagcaggcaatgaacaagatcatgaaggttatccacacaagtgtatgggcggggcagaagcgtcttgggcagctggccaagtggaaaaccgctgaggaggttgctgcattggttcgatctcttcctgtagaagagcagccaaagcaaattattgtgacaaggaagggcatgttggatcccttggaggtccatctacttgacttccctaacattgttattaagggcagcgagctgcagcttcctttccaggcttgcttgaagattgagaagtttggtgatcttatactgaaggcaactgaaccacagatggttctttataatatatatgatgattggttgaaaagtatatcatcatacacagcattctcccgcattgtgcttattctacgtgcacttcatgtgaataatgagaaggcaaagatgttgctcaaacctgacaaaacaattgttactgaaccacatcatatatggccatctctgaatgatgaacagtggttgaaggttgagtgtgcactaagggacctcatcctttctgattatgcaaagaaaaacaatgttaatacttctgcactgacacaatctgaaatgcgagatatcattcttggagctgaaattgctccaccatcacagcagaggcaacagattgctgaaattgagaaacagtcaagagagactactcagttaactgctgtaaccacaaggacgacgaatgtgcacggagatgaactcattatcacaaccacaagtccatatgagcaacaagcattcgcatcgaagactgattggcgtgtcagagccatctctgccacaaacttgtatctacgtgtaaatcacatttatgtcaattctgatgatataaaggaaactggctacacttacattatgccaaagaacatattgaagaaattcatatgcgtagcagatctgcgtacacaaatcgctggattcttatatgggctgagtccacaggacaatcctcaagtcaaagagattaggtgtatagccatccctccgcagcatggaacacaccagatggtgactctgccatcaaatcttcctgaacatgagttccttaatgatcttgaacccttgggatggatgcatacacagccaaatgaagctccacagctatcaccacaggacctgacatcacatgccaagattctggagaacaacaaacaatgggatggtgagaagtgcatcattctgacatgcagcttcaccccaggatcttgctcgttgactgcttacaagctgacaccaagtggttatgagtggggacgcagcaacaaggacaacggaagcaacccacatggatacctcccaactcattacgagaaggtccagatgcttctgagcgaccgcttccttggtttctacatgattccggataacaccccttggaacttcaacttcatgggagtgaagcacgacccacagatgaagtacaacatgaagctgggcatgccccgggacttctatcacgaggaccacaggccgacacacttccttgagttcagcaacatcgaggagggagaggtcgctgaaggtgatagggaggacacattcacgtagggcgctgggcgcctgttttagaaactcagtatctcaaacgcactttagctctgttttgaatggcaatgtgtgaaaggctgaaagctgtaacctgactcgacgggtgtcatctgtttttttggcttaatcctgtatcataccttgttgtaagacagccctggagaggggtaaaaattgtacaagtgcacgccatggcaacagtaaagattttacttagtagctatgctattctaagatggctcctcccaagctttaattttctcataatccctgctggacagcagaccgaagggttaaaaggaatatctcccacgccactctttgtgtgctatgggatcaggaagagaaaactat

SEQ ID NO: 207396 - DNA, 4248 bp, Zea Mays
tccatttccccttcccttttcactccgaagtccgacctctctcgaacacacaccacaccaccccgcttgacgacgcttaaaccctagcggcagttgcgggaggccgccgcgccgcgccgcgccgccccgtcgccgatgtggaacggcgcgccgcctccgccgccgccgcagatggcggcggccccgcctccccctggcacgacggtgcccggggcaggccaacctccgcccccgccgccgccggccggggcgccgttgggcggcaagccgctgacgccggccgagctcgaggctcagctggtggagaaggcccgcaagtggcaccagctcaactccaaacgctacggcgacaagcgcaagttcgggttcgtcgaggcacagaaggaggacatgcctcctgagcacgtccgcaaaatcatcagagaccacggagacatgtcttccaagaagtacaggcatgacaagcgtgtttatcttggtgcactcaaatttgtgccccacgctgtgtacaaacttctagagaacatgccgatgccttgggagcaggttcgccatgtgaaaatcttgtatcacatcactggggctatcacttttataaatgaaatcccatgggttgttgaaccaatatacctcgcacagtggggtacaatgtggattatgatgcggcgagagaaaagggataggcggcattttaaacgaatgcgctttcctccatttgatgatgaggagcccccactggactatgctgataatttgttggatgttgaaccacttgaagctatacagttggagttggatgaggaggaagatgcagctgtctatgaatggttctatgatcacaaacctctaatgaagacaaaacttataaatggtcccagttacaggaaatggcatctatctcttcccataatggcaacactatatcgccttgctggccagctgctgtcagatctgatcgataggaattatttctacttatttgatatggagtccttctttacagccaaggcccttaatatgtgcattccagggggtccaaagtttgagccattgtaccgtgatatggagaagggtgatgaggactggaatgagtttaatgacataaataagctcatcatacgtcagccacttcgaactgagtacaggattgctttccctcacctgtacaacaacaggccaaggaaagtgaaacttggtatctatcatacccccatgataatgtacatcaagactgaagatccagacttgccagcgttctactatgatcctctgataaatcctatcacttcaaccaacaaggttgatcgtcgggagaggaaagcagctgaagaggaagatgatgaagatttttgtctcccagaagatgtagagcctctcttgaaacagactgaactctacactgatacaacagctgctggtatatcgttactttttgctccaaagccttttaacatgagatctggtcggacacgtcgtgcagaggatattcctcttgtatctgagtggttcaaggaacattgccctccagcttatcctgtgaaagttcgtgtgagttatcagaagctattgaagtgttatgtgctcaatgagctacatcataggcctcccaaggcccagaagaagaagcatctgttccgttcactccaagcaactaagttcttccaaactactgagcttgactgggcagaagcaggcttgcaagtttgcaagcaggggtacaacatgctaaatttgttgattcacaggaaaaatcttaactatcttcatttagattacaatttcaatttgaagcctgtaaagactcttacaacaaaggaaaggaagaaatctcgttttggaaatgcattccatttgtgtcgtgagattttacgacttacaaagttggttgttgatgctaacatccagttccgtctgggaaatgttgatgccttccagttggcagatggtctgcaatacatattttctcatgttgggcagttaactggtgtgatgattggaatcgatctagcgtataatttgcactctgcttttggcaactggtttcctggatcaaagccactacttcagcaggcaatgaacaagatcatgaagtcaaatcctgctctgtatgtcctgagggagagaataaggaagggtctgcagttgtactcttctgaacccactgaaccatacctgtcttcacagaactatggagagatattcagcaatcaaatcatatggttcgtggatgatacaaatgtgtatcgagtcactattcacaaaacatttgagggtaacttgaccaccaaaccaattaatggtgctattttcattttcaatccaagaacgggtcaactttttcttaaggttatccacacaagtgtatgggcggggcagaagcgtcttgggcagctggccaagtggaaaaccgctgaggaggttgctgcattggttcgatctcttcctgtagaagagcagccaaagcaaattattgtgacaaggaagggcatgttggatcccttggaggtccatctacttgacttccctaacattgttattaagggcagcgagctgcagcttcctttccaggcttgcttgaagattgagaagtttggtgatcttatactgaaggcaactgaaccacagatggttctttataatatatatgatgattggttgaaaagtatatcatcatacacagcattctcccgcattgtgcttattctacgtgcacttcatgtgaataatgagaaggcaaagatgttgctcaaacctgacaaaacaattgttactgaaccacatcatatatggccatctctgaatgatgaacagtggttgaaggttgagtgtgcactaagggacctcatcctttctgattatgcaaagaaaaacaatgttaatacttctgcactgacacaatctgaaatgcgagatatcattcttggagctgaaattgctccaccatcacagcagaggcaacagattgctgaaattgagaaacagtcaagagagactactcagttaactgctgtaaccacaaggacgacgaatgtgcacggagatgaactcattatcacaaccacaagtccatatgagcaacaagcattcgcatcgaagactgattggcgtgtcagagccatctctgccacaaacttgtatctacgtgtaaatcacatttatgtcaattctgatgatataaaggaaactggctacacttacattatgccaaagaacatattgaagaaattcatatgcgtagcagatctgcgtacacaaatcgctggattcttatatgggctgagtccacaggacaatcctcaagtcaaagagattaggtgtatagccatccctccgcagcatggaacacaccagatggtgactctgccatcaaatcttcctgaacatgagttccttaatgatcttgaacccttgggatggatgcatacacagccaaatgaagctccacagctatcaccacaggacctgacatcacatgccaagattctggagaacaacaaacaatgggatggtgagaagtgcatcattctgacatgcagcttcaccccaggatcttgctcgttgactgcttacaagctgacaccaagtggttatgagtggggacgcagcaacaaggacaacggaagcaacccacatggatacctcccaactcattacgagaaggtccagatgcttctgagcgaccgcttccttggtttctacatgattccggataacaccccttggaacttcaacttcatgggagtgaagcacgacccacagatgaagtacaacatgaagctgggcatgccccgggacttctatcacgaggaccacaggccgacacacttccttgagttcagcaacatcgaggagggagaggtcgctgaaggtgatagggaggacacattcacgtagggcgctgggcgcctgttttagaaactcagtatctcaaacgcactttagctctgttttgaatggcaatgtgtgaaaggctgaaagctgtaacctgactcgacgggtgtcatctgtttttttggcttaatcctgtatcataccttgttgtaagacagccctggagaggggtaaaaattgtacaagtgcacgccatggcaacagtaaagattttacttagtagctatgctattctaagatggctcctcccaagctttaattttctcataatccctgctggacagcagaccgaagggttaaaaggaatatctcccacgccactctttgtgtgctatgggatcaggaagagaaaactat

SEQ ID NO: 207397 - DNA, 1476 bp, Zea Mays
caaataaaggggtggctcgtgagatttgggaggctcggatttggtttctggtctcagttgcgttgtgggtgatccactcgttcttccctccacgcgccaaaaccccagccacggccatctcctcctccactcctcccgttcgtccacatccaaaagcttcccaggagaaaaaaagaacagttatttgcagcgggaaccctaacaaatcactcgctacaagcgagcgagggagagatgtctctccagtacgtggcgcccccggtccgagcactcgccgtgctaccggcgccaggcccccctcgccgccggacaagccatgtgtccctataccttccgagccggcggccagggctcgccgtcgccccggtccgtgcggcggagtcgtcctctccgcccaccgtgcccgcctccgcggccggcaaggctgtcgtcccggacgacgagttctccctcgccaaggtctctttcggtgtgatcgggctggggcttgggctctcgctcctgtcgtacggattcggatcgtatttcaacctgcttcctggttcggaatggtcagctttgctgctaacctacgggtttcctctcacaatcatcggcatggccttaaagtatgcagaactgaaaccagtaccctgcataacctacgctgatgcctttgctctaagagaaaagtgtgctacccctattctgaagcaggtcaggagtgatgttacacgttttagatatggtgatgaacaacacttggatgaagcactgcagagaatctttcaatatggtttgggtgggggcattcctagacgtaatgcacctatattacaaaagattcgagaggaagtaactgacgatgggaaatacagtttagtactcgtatttgaagccaaagcattggagctatctgattttgagaagagacaggctaaattcacctccttttttggtcctgggattaaagcagaaatcggaaaaggtggcggtgatctatatgaagttcgtctaatctcagacactgtttagaaacaatctttgtgaattttctctaatacaaaactaaacttttattttttttctttgatccgctgattttgcatatatgatgttaatagcatcagattttacccttgtttctgttgtgccttctgagcttccatgtatattggctgttgatccttggccatgacctgacaccttcatacactccatggacatgtgtgaaggaaaagttgttgtaatattagatgtaaatgaactttgattgggaacgctgtccatatagttgaaaggtatttagctgtttttttcatggagttgaataatgttggatttgacgcatccatctttctgatgctgaggattggctaacttttgtccacataagaaacgtagtgccatagttaacttgttcggaaagcagcggcagagcatttgtacttacaattcaaagattgtttcttgacaatggactttgtaaagttcttc

SEQ ID NO: 207398 - DNA, 1026 bp, Zea Mays
tttggtttctggtctcagttgcgttgtgggtgatccactcgttcttccctccacgcgccaaaaccccagccacggccatctcctcctccactcctcccgttcgtccacatccaaaagcttcccaggagaaaaaaagaacagttatttgcagcgggaaccctaacaaatcactcgctacaagcgagcgagggagagatgtctctccagtacgtggcgcccccggtccgagcactcgccgtgctaccggcgccaggcccccctcgccgccggacaagccatgtgtccctataccttccgagccggcggccagggctcgccgtcgccccggtccgtgcggcggagtcgtcctctccgcccaccgtgcccgcctccgcggccggcaaggctgtcgtcccggacgacgagttctccctcgccaaggtctctttcggtgtgatcgggctggggcttgggctctcgctcctgtcgtacggattcggatcgtatttcaacctgcttcctggttcggaatggtcagctttgctgctaacctacgggtttcctctcacaatcatcggcatggccttaaagtatgcagaactgaaaccagtaccctgcataacctacgctgatgcctttgctctaagagaaaagtgtgctacccctattctgaagcaggtcaggagtgatgttacacgttttagatatggtgatgaacaacacttggatgaagcactgcagagaatctttcaatatggtttgggtgggggcattcctagacgtaatgcacctatattacaaaagattcgagaggaagtaactgacgatgggaaatacagtttagtactcgtatttgaagccaaagcattggagctatctgattttgagaagagacagacaatgtcatggccgatacctgagcatgaccatggcgaaggagacaagatgctggccgctggtgtggctgctgagtagtggttttttttaattgtgtcggcgttcgtgtgtgggccgtggaagcgtgtgtgcttgggctgttgaggtggg

SEQ ID NO: 207399 - DNA, 855 bp, Zea Mays
cactcacacgtgtgcctgggcgagcaccatgcgttggacgacgctctctgccgtgtgggaccccctgctagctttccctttccccgatcgagagcatgaacagaaccatcaccaaagattctggcactggatcgtaacagaaatcaacaaattcgtcggctttatcattctaggtgctcctcgaggctatatatgtcgagcctccccattcatctcataccatcatcgggagaaatcgtacaccaggccagaaccagtagtgagaggaacggagagagggggatcggaagccgcccgcgtcttgcgcttgattcaccggagcctcagccacaaggatcggacggtgggcatcgtcttggttcacaggatgcatgtgcgtcaattgcatgcaccgtggatggctggagactacacaattgctcgtcgaacttcgagcgctgccacggttccatgccgagcagcggccagactttgcagacagcctaaagcaccgttgaaggatgaccaggcgaagccatccttgttgttgcgaaggcaggttatcaatttttcctcgtcttcgctgttgaggtgttcgatgacgagtattgtatggttgagtactgctaggcctaggtggacttgtttggcccattttgtgctttggattgggtgcttttccttttttccattttctccatgcgagggcttgagtggtgtttggtttctttgtcaaggtaatgtacatttctctagatgggaatgaagtccctttcgatgttgtgagcagtctactaatttccatagactatgattacacccaagggcatgaaagtttaatgcaaaggtataggtcgtgaatggcagcttcaagtt

SEQ ID NO: 207400 - DNA, 931 bp, Zea Mays
cactcacacgtgtgcctgggcgagcaccatgcgttggacgacgctctctgccgtgtgggaccccctgctagctttccctttccccgatcgagagcatgaacagaaccatcaccaaagattctggcactggatcgtaacagaaatcaacaaattcgtcggctttatcattctaggtgctcctcgaggctatatatgtcgagcctccccattcatctcataccatcatcgggagaaatcgtacaccaggccagaaccagtagtgagaggaacggagagagggggatcggaagccgcccgcgtcttgcgcttgattcaccggagcctcagccacaaggatcggacggtgggcatcgtcttggttcacaggatgcatgtgcgtcaattgcatgcaccgtggatggctggagactacacaattgctcgtcgaacttcgagcgctgccacggttccatgccgagcagcggccagactttgcagacagcctaaagcaccgtttttgcttctttggctggatcgaagggttgatgctcaagctgtgttcgatgatgttgtgactggctcctactagattgaaggatgaccaggcgaagccatccttgttgttgcgaaggcaggttatcaatttttcctcgtcttcgctgttgaggtgttcgatgacgagtattgtatggttgagtactgctaggcctaggtggacttgtttggcccattttgtgctttggattgggtgcttttccttttttccattttctccatgcgagggcttgagtggtgtttggtttctttgtcaaggtaatgtacatttctctagatgggaatgaagtccctttcgatgttgtgagcagtctactaatttccatagactatgattacacccaagggcatgaaagtttaatgcaaaggtataggtcgtgaatggcagcttcaagtt

SEQ ID NO: 207401 - DNA, 3019 bp, Zea Mays
caaaaggtgacggcaccactaaccaagccagcaccagcggaactgtgctgtgcaagcactcagcttcgcctccattccgctcacttcccgcggccactccgctccccaaaccctaacgccctcgagcggagcgatctctttgcttcgccagtgccgcgcccgggcatgccgccgccactgggtggcgcggtcaaggccgactgatccgtgcgcttgggagccgccaccgccgccgccgccgccgctgccattcctccctcggtgcccactggggtggagcggagactggagattctgccgtctgtcgcaagtcacacactaggtttctcgggcgctgacattgttggaagatgtggaggatcaagctcgcctgtttgcttcttatctttgtgcaagtgcaacgagtggtccttggaacacatgacgtgtacatcgtggtgatggaaggggatccggttgtgagctaccgaggtggcgttgacggatttccggcaactgctgtggatttggacgaggaaatggacgttaccagtgaagctgttacatcgtatgccctccacctccgagggcaccatgacaagctcctagactcacatttagtagaaggaacgtatgagaagctttatagctaccaccatcttatcaatggctttgcagttcacatgtcgtcactgcaggctgagttcttgaggaaagcgccaggagttaagcatgttgagagagacatgaaggtacagaaattgactacacacacccctcagtttctcggattgccaactggggtatggccaacaggaggtggacttgatagagctggtgaagatgttgtgatcggttttgtggattctggaatttacccccaacatccgagcttcgcggcgcacaagactgatcgatatggtcctgtccctcgttataaaggaaaatgcgagaaggatctagtaacacaaagaagcttttgtaatgggaagatagttggggctcagcattttgcaaaagctgcaatggctgctgccacacagctgcaattgctgctggaaacaatgggattccggtgcgaatgcatggtcacgagtttggcaaagcaagtggcatggccccacgtgctagggtagctgtctacaaggttctttacaggcttttcggtggttatgtggctgatgttgtggcagctattgatcagctggggtatttgttgcccaagctgcaggaaatggcggaccatttccaaaaacactggtgtctttcagcccatggataaccactgttgctgctggagttgatgaccgcagatacaagaatcatttaacactaggaaatggaaaacttatttctggacttggagtatctcctgcaacacatgggaatatgtcgtttagcctgatttctgcagctgatgctcttctgggctcatctgcaagcaagtacagtgcattagactgtcagaggccagaactattgaataagaggaaagttcagggaaaaattcttttgtgtggctattcattcaattacatttctgggacagcctcaataaagaaagtgtctcagacggccaggagtctcggcgcagctggctttgttgttgctgtggagaatagttacccaggaacaaaatttgaccctgtaccagtcagcatccctggaattctcatcacagatgtcagcaaaaccgaggatcttatagactactacaattcttccaccgtaagagattgggctggaagggctacagcctttaaagcaacagccggtattgcagatggtttggcaccaacactatacaattcagctccccaggttgcgctgttctcttctcgaggacctgatgtgaaagattttagctttcaagatgctgatgtccttaaaccagacatacttgctcctggcaatctcatatgggctgcatgggcgcctaatggaacagatgaatcaaattatgctggtgaaggatttgcaatggtttctggaactagcatggctgcgccgcatattgctggcattgcagcactgataaagcagaagaacccaaagtggagcccctcagcaataaaatctgccctgatgacaacggccaatacactggacaaagggagccatcctcttagagcgcagcagtacaccgcatcagaaatgatgacactttcacgggccacaccgttcgattgtggcagtggcgctgttaacccaaaaggcgccctcgatcctggccttgttctagacgcaagccatgaagactacatcacgtttctgtgctcgatccccgacgtcaaccagagcgaagtatcaaacatagccggctcggcttgcaactccaactccaagggacaacgccccttcgacctcaacatcccctcgatcgccgtctctcagcttcgaggcacggtggtagtgaagcggaccgtcacgagcgtgtccgacgaaaccgagacctacaccatcatgacaaggatgccgccagaggtcgccctggaggtgacgcctccggcggtgaccgtggtccccggagcatcacgagagataactgtgaccctgacggcgaggtccgtgaccggcacctacagtttcggtgagattgccatgaaaggtgaccgcggtcacctcgtcagaatcccagtcgtagctatgggattcaagtaggtagaagacgactgtgacatctcctagggagtagaggataggaagagcgagttgtgcctctgtaatctgaggtcttgagctgcagaggaacgttgtataattttttcataggttgtagagaataagagttggcacaatgctgtaagtgttatgcatgccccctccaggttgtaaaatatatttgggtgccctaaatcctctgacatggtgactagaggacctcttgtattgtagtccagccttgttctgattctctaatgcatgaaggtttgaatctcatctggttttcttctatgtcgtttcatccagaattttaattcgtattgtgggcttaatattaaaattccccaaatatgggagatgtgaaatttcttgtcag

SEQ ID NO: 207402 - DNA, 1726 bp, Zea Mays
ctcggtttatcccttccctagaccaccccactcatgtggtggaagcctttgacactagctgcaacacatgggaatatgtcgtttagcctgatttctgcagctgatgctcttctgggctcatctgcaagcaagtacagtgcattagactgtcagaggccagaactattgaataagaggaaagttcagggaaaaattcttttgtgtggctattcattcaattacatttctgggacagcctcaataaagaaagtgtctcagacggccaggagtctcggcgcagctggctttgttgttgctgtggagaatagttacccaggaacaaaatttgaccctgtaccagtcagcatccctggaattctcatcacagatgtcagcaaaaccgaggatcttatagactactacaattcttccaccgtaagagattgggctggaagggctacagcctttaaagcaacagccggtattgcagatggtttggcaccaacactatacaattcagctccccaggttgcgctgttctcttctcgaggacctgatgtgaaagattttagctttcaagatgctgatgtccttaaaccagacatacttgctcctggcaatctcatatgggctgcatgggcgcctaatggaacagatgaatcaaattatgctggtgaaggatttgcaatggtttctggaactagcatggctgcgccgcatattgctggcattgcagcactgataaagcagaagaacccaaagtggagcccctcagcaataaaatctgccctgatgacaacggccaatacactggacaaagggagccatcctcttagagcgcagcagtacaccgcatcagaaatgatgacactttcacgggccacaccgttcgattgtggcagtggcgctgttaacccaaaaggcgccctcgatcctggccttgttctagacgcaagccatgaagactacatcacgtttctgtgctcgatccccgacgtcaaccagagcgaagtatcaaacatagccggctcggcttgcaactccaactccaagggacaacgccccttcgacctcaacatcccctcgatcgccgtctctcagcttcgaggcacggtggtagtgaagcggaccgtcacgagcgtgtccgacgaaaccgagacctacaccatcatgacaaggatgccgccagaggtcgccctggaggtgacgcctccggcggtgaccgtggtccccggagcatcacgagagataactgtgaccctgacggcgaggtccgtgaccggcacctacagtttcggtgagattgccatgaaaggtgaccgcggtcacctcgtcagaatcccagtcgtagctatgggattcaagtaggtagaagacgactgtgacatctcctagggagtagaggataggaagagcgagttgtgcctctgtaatctgaggtcttgagctgcagaggaacgttgtataattttttcataggttgtagagaataagagttggcacaatgctgtaagtgttatgcatgccccctccaggttgtaaaatatatttgggtgccctaaatcctctgacatggtgactagaggacctcttgtattgtagtccagccttgttctgattctctaatgcatgaaggtttgaatctcatctggttttcttctatgtcgtttcatccagaattttaattcgtattgtgggcttaatattaaaattccccaaatatgggagatgtgaaatttcttgtcag

SEQ ID NO: 207403 - DNA, 1380 bp, Zea Mays
ctgcttactgcgctactgtaggatgacagggcagaaaggatcttatagactactacaattcttccaccgtaagagattgggctggaagggctacagcctttaaagcaacagccggtattgcagatggtttggcaccaacactatacaattcagctccccaggttgcgctgttctcttctcgaggacctgatgtgaaagattttagctttcaagatgctgatgtccttaaaccagacatacttgctcctggcaatctcatatgggctgcatgggcgcctaatggaacagatgaatcaaattatgctggtgaaggatttgcaatggtttctggaactagcatggctgcgccgcatattgctggcattgcagcactgataaagcagaagaacccaaagtggagcccctcagcaataaaatctgccctgatgacaacggccaatacactggacaaagggagccatcctcttagagcgcagcagtacaccgcatcagaaatgatgacactttcacgggccacaccgttcgattgtggcagtggcgctgttaacccaaaaggcgccctcgatcctggccttgttctagacgcaagccatgaagactacatcacgtttctgtgctcgatccccgacgtcaaccagagcgaagtatcaaacatagccggctcggcttgcaactccaactccaagggacaacgccccttcgacctcaacatcccctcgatcgccgtctctcagcttcgaggcacggtggtagtgaagcggaccgtcacgagcgtgtccgacgaaaccgagacctacaccatcatgacaaggatgccgccagaggtcgccctggaggtgacgcctccggcggtgaccgtggtccccggagcatcacgagagataactgtgaccctgacggcgaggtccgtgaccggcacctacagtttcggtgagattgccatgaaaggtgaccgcggtcacctcgtcagaatcccagtcgtagctatgggattcaagtaggtagaagacgactgtgacatctcctagggagtagaggataggaagagcgagttgtgcctctgtaatctgaggtcttgagctgcagaggaacgttgtataattttttcataggttgtagagaataagagttggcacaatgctgtaagtgttatgcatgccccctccaggttgtaaaatatatttgggtgccctaaatcctctgacatggtgactagaggacctcttgtattgtagtccagccttgttctgattctctaatgcatgaaggtttgaatctcatctggttttcttctatgtcgtttcatccagaattttaattcgtattgtgggcttaatattaaaattccccaaatatgggagatgtgaaatttcttgtcag

SEQ ID NO: 207404 - DNA, 927 bp, Zea Mays
gagcatcaaagcaagccatgtggaggagggctttagcgatggtcctgttcatggctggcgccgcgctgctcgccggggctgccggcgccggcgcgcagcagggcgtgtggagcatcatcacccggcccatgttccagagcatgctgagccaccgcggcgacagcgggtgccagggcgccttctacacctacgacgccttcatcgaggccgccagcaagttccccggcttcggcaccaccggcgacgagcagacgcgcaggcgggagctcgccgccttcttcggccagacgtcccacgaaaccaccggtggatgggcgactgctccggatggaccgtttgcctggggatactgccgggtgaaggaacagaaacagacggacccaccctactatggacgaggacccatacagctaactcataagtacaactacaggctcgccgggcaagcgctgaacctgaacctggtgggcgacccggacctggtggcgagagaccccgtggtagccttcaagacggccatctggttctggatgacgccgcagtcgcccaagccctcgtgccacgccgtgatgaccggcgactggaggccctccgccaccgaccgcgccgcggggaggctccccggatacggcctgaccacgaacatcatcaacggtggtctagagtgcggcgaggaccgctccaccgacggcgccaaagccgccaaggaccgggtcggctactacaagagctcgcaagccgagtcgagccgagcatcctccttcagcttgttgagtgggcgatcctagctcggttaaccaacaagctgcaccgagtccaaccgatctcggctcgtttccagccataactcagaccatgcatggcaaggaccttctttgtaaaactagatgctaggtctaattggccatataataattaaatagtcct

SEQ ID NO: 207405 - DNA, 1435 bp, Zea Mays
atgttgtattcgagagtgaattccacataccctatctcttccagtcttcctacgctcctgtcggcgcgtcctccgcatcccggtgaccggtgtgttctccgatttgaggggcgtccctcgcacgctccggtctgctgctcctccgccctccggagtccattccagcggagcgcgctacggcacagatcggccgccgtccatccctttcccagctctccagagcctccgctgccgcgtccggtgagcacgtctcgaccggtttccagggcgtatctgttggaaatgctcagttgctagcttttcctggtagatcatcaagccttaagagcacccagtttcttgttaaaacgaatcattttcctgcaagagctctacgtgttggtactgattctattcatcatgccatgcctacatcatccccaagggaaaattctgtcaggggaatcccatcactatcaagacagcacaatcagcatccaaggtccgttagttgtcaggcatcctcactggcatctttcagctaccctgagctgacatccaaacccagatggtggtggagaactctagcttgtgtgccgtacttgctgccactgcacaacatgtggtcttatgctgacgtgatctaccagctgcacacttatttgcaggggttttctctgttgtacaccttcatcgataccatgactctgtgtcctgggtggctctttctggtgatatttatgacagtgtacttcttcgttgtgaggcggaagtggtcgccgcactttctgaggttccatgtgatcctagcaatccttctggacactggctcccaagcagtggccaccatgtgtacatggatgccaagcatcgtttatcaggggaagccaatgcagtacctctggatgtctattgcattcatacagatcttcacagtgctcgagtgtttgcggtgtgctctttgtggaatgtatcctaatgtcccattcatatcccatactgctttcattcactctgatctaaatctgttcagataggtgtttataaggtccgggattcaagaagggtgattttttttgaaatggctacttatcataggaccagctggtacaatagcattcgaacaacactgcgattgatttttgttcctaagatgttattcaatgtacgttgactacctgcaaattttgttttgaggggcactacttgttttatccgaacttggttgagaacttgagatgaagctggaagttgagatgcattaaattgtgcattatatggtgacctgcagctctaagttgagaacttgagatgaagctggaacagaatggaggggttacgaagaaattttgagacttgtactgcctgtgaagtttactctttccatgaggactttgtgaatattttgcctaacaacagtttggtagagtttgggaaagaaacaacagttcattga

SEQ ID NO: 207406 - DNA, 1031 bp, Zea Mays
atacctgtgccctaatagaatttttacccgtctggtttcggggtaccgattgccagccagagcgagagggagagcgagcgcgagcgcgcagtcgccgtccacaccgttgagttttttctcaggcttcgcatggcctgattcatcctacagtctccaacaagccaagcaaacgccgcatcgcgctttctccgcttccttctttcccctcacagggtcagaccccaacgccgggagaataggggattaggagccagacctggcggcgccgggcgtccaagaaacgctgcctaataaaatccctccggcgtctgtcgtcttgaccgcggcggcgcaggcttcttcttttcgctctccaccacacttggatgaatgttgtcattgccaagggtgtgctggcaagtatacactactcagagatgaagaaaacccacggtggacaatctttgagaggcggcttccttgctgtggttgtgggataggatggtcttcttttcttttaggtttcttgtgtcctttgatttggtactttgcaaccactctttactgctgcaagtactacaacaaagatcctcgagagcgccctgggctagctgcatcagctgttgcggcactcatcttcacagtcctggcactcatcgctctctctgtggcactgataatctatatataaaacgaggaatgaacttgcgcttgcttgaaatgcgtactcaggcactcatcttcacagtcctggcagccatacatcgctctctgtggcacagatcatctgaaacccaaagcgaggaaaacgcggtagctggacctggcattcagaaggaacttgtaatttcagtgatagtagcatatagttgcaatcatccttcatgtatcaccatatcaagttgttgatttaaatgctgcaaccgtccctgttgtcggttgacctgtcggctgctgttgtctatcaacgaggatgatcattgctctatcgcaaactgtgtgctccgtgatctgcgatgcttctgaactcatgctgtcttggcaacctttag

SEQ ID NO: 207407 - DNA, 1197 bp, Zea Mays
atacctgtgccctaatagaatttttacccgtctggtttcggggtaccgattgccagccagagcgagagggagagcgagcgcgagcgcgcagtcgccgtccacaccgttgagttttttctcaggcttcgcatggcctgattcatcctacagtctccaacaagccaagcaaacgccgcatcgcgctttctccgcttccttctttcccctcacagggtcagaccccaacgccgggagaataggggattaggagccagacctggcggcgccgggcgtccaagaaacgctgcctaataaaatccctccggcgtctgtcgtcttgaccgcggcggcgcaggcttcttcttttcgctctccacggcagcgtcatgaagattaaggggaacttgcatgtttgatgtacccctgtagcaaaaaattcttgtgataaaatttgttgaattagtcactgtcagggagggatctagttgtcagttgtttgtattaaagctgctggcactttccttgcagggtttctgtagaataaatgggagaagcacacttggatgaatgttgtcattgccaagggtgtgctggcaagtatacactactcagagatgaagaaaacccacggtggacaatctttgagaggcggcttccttgctgtggttgtgggataggatggtcttcgtttcttgtgtcctttgatttggtactttgcaaccactctttactgctgcaagtactacaacaaagatcctcgagagcgccctgggctagctgcatcagctgttgcggcactcatcttcacagtcctggcactcatcgctctctctgtggcactgataatctatatataaaacgaggaatgaacttgcgcttgcttgaaatgcgtactcaggcactcatcttcacagtcctggcagccatacatcgctctctgtggcacagatcatctgaaacccaaagcgaggaaaacgcggtagctggacctggcattcagaaggaacttgtaatttcagtgatagtagcatatagttgcaatcatccttcatgtatcaccatatcaagttgttgatttaaatgctgcaaccgtccctgttgtcggttgacctgtcggctgctgttgtctatcaacgaggatgatcattgctctatcgcaaactgtgtgctccgtgatctgcgatgcttctgaactcatgctgtcttggcaacctttag

SEQ ID NO: 207408 - DNA, 1057 bp, Zea Mays
atacctgtgccctaatagaatttttacccgtctggtttcggggtaccgattgccagccagagcgagagggagagcgagcgcgagcgcgcagtcgccgtccacaccgttgagttttttctcaggcttcgcatggcctgattcatcctacagtctccaacaagccaagcaaacgccgcatcgcgctttctccgcttccttctttcccctcacagggtcagaccccaacgccgggagaataggggattaggagccagacctggcggcgccgggcgtccaagaaacgctgcctaataaaatccctccggcgtctgtcgtcttgaccgcggcggcgcaggcttcttcttttcgctctccacggtttctgtagaataaatgggagaagcacacttggatgaatgttgtcattgccaagggtgtgctggcaagtatacactactcagagatgaagaaaacccacggtggacaatctttgagaggcggcttccttgctgtggttgtgggataggatggtcttcttttcttttaggtttcttgtgtcctttgatttggtactttgcaaccactctttactgctgcaagtactacaacaaagatcctcgagagcgccctgggctagctgcatcagctgttgcggcactcatcttcacagtcctggcactcatcgctctctctgtggcactgataatctatatataaaacgaggaatgaacttgcgcttgcttgaaatgcgtactcaggcactcatcttcacagtcctggcagccatacatcgctctctgtggcacagatcatctgaaacccaaagcgaggaaaacgcggtagctggacctggcattcagaaggaacttgtaatttcagtgatagtagcatatagttgcaatcatccttcatgtatcaccatatcaagttgttgatttaaatgctgcaaccgtccctgttgtcggttgacctgtcggctgctgttgtctatcaacgaggatgatcattgctctatcgcaaactgtgtgctccgtgatctgcgatgcttctgaactcatgctgtcttggcaacctttag

SEQ ID NO: 207409 - DNA, 2368 bp, Zea Mays
atacctgtgccctaatagaatttttacccgtctggtttcggggtaccgattgccagccagagcgagagggagagcgagcgcgagcgcgcagtcgccgtccacaccgttgagttttttctcaggcttcgcatggcctgattcatcctacagtctccaacaagccaagcaaacgccgcatcgcgctttctccgcttccttctttcccctcacagggtcagaccccaacgccgggagaataggggattaggagccagacctggcggcgccgggcgtccaagaaacgctgcctaataaaatccctccggcgtctgtcgtcttgaccgcggcggcgcaggcttcttcttttcgctctccacgtaagtctgctacctttccccccacggttccagcgcttgcccccctgcgggagcgtgtcttggatcctttggttgggaattgggattcgaagccgtcgtcgggattgtctgttcccgttcttgaattctagcgcggaggcggattggattcgagctgcgagttttagcttactaatttttctgtgcggtgggtcgagtaatagaatctggagggcgtccttttgtgcgatattgtcagttcatagctgttactcagctcgatgatgcaggcagtgagctcaacatgttcgatgaaattgcttacccaagttacttatctaaggaaggattgctgcggtcagaattacatcttcaagattgtagactgacaactgtgtttccaaacttaaactgacggcaggacatgcaagaagcaagacacacttagggctggtttggtgactagagaattgggggttcattttctccctcaatccccttcaatatcacttaattccccggtcatcaaaccggtcagaattacagcgtaagggtgggtttggtgaccagtgaattgagaattccccctccaattactctcaattcccttatcaccaaaccaactctaaagcttagacacggcacctactgatttatgtaggactaattcctatggtcctatcaattgcaagggacatgcatctgtgcctatgatcctatttgttacagaggaatatatagattttcatgcatttgttcctatcaatttactcatgtttgtattttttttccagggcagcgtcatgaagattaaggggaacttgcatgtttgatgtacccctgtagcaaaaaattcttgtgataaaatttgttgaattagtcactgtcagggagggatctagttgtcagttgtttgtattaaagctgctggcactttccttgcagggtttctgtagaataaatgggagaaggtaacaattttcaactttatattgtttcttgtggatcaattgactgttgcacctttgcaacatcagagtccgtcattgtagaattgtgcttttctgttaccttcagaattagatgttattatacctgccatgtgtaaacatcagcatggctgcgtgttcctcttggggcctctttgtcatgcctctggaaggcgcttggtctactgtacataaacactctttcgtatcttaatcgaaaggcagagctcctgccacatctttcaaaaaaaatgcatctcattaacacttagacttgatgtaggatactggctctgttcattatcttaaatttccagatttaggaagaaacttcagttactgatcatattcttcctttgctttgcatagcacacttggatgaatgttgtcattgccaagggtgtgctggcaagtatacactactcagagatgaagaaaacccacggtggacaatctttgagaggcggcttccttgctgtggttgtgggataggatggtcttcttttcttttaggtttcttgtgtcctttgatttggtactttgcaaccactctttactgctgcaagtactacaacaaagatcctcgagagcgccctgggctagctgcatcagctgttgcggcactcatcttcacagtcctggcactcatcgctctctctgtggcactgataatctatatataaaacgaggaatgaacttgcgcttgcttgaaatgcgtactcaggcactcatcttcacagtcctggcagccatacatcgctctctgtggcacagatcatctgaaacccaaagcgaggaaaacgcggtagctggacctggcattcagaaggaacttgtaatttcagtgatagtagcatatagttgcaatcatccttcatgtatcaccatatcaagttgttgatttaaatgctgcaaccgtccctgttgtcggttgacctgtcggctgctgttgtctatcaacgaggatgatcattgctctatcgcaaactgtgtgctccgtgatctgcgatgcttctgaactcatgctgtcttggcaacctttag

SEQ ID NO: 207410 - DNA, 790 bp, Zea Mays
gtcaggttcgcccattggccgttgagtttgagggacgacgaggggctgtacctcgccagtgattcggacgagcagctgctgatctacatccccttcatgcaagtggtcaaactgcattccgtgctattcaaaggccccgaggaagagggccctaaaacagtaaaactcttttccaacaaagagcatatgggtttcagcaatgtcaatgactatccaccaatggacacccttgagctatcctccgatcatttgatagagaataaacctttgccgctaaagtatgtcaagttccaaaatgttcgcagcctgactgtatttattgaggacaatcaatctggaagtgatgtctcgaaaattcaaaaggttgctctttatggcacaactgtggacacgacaaatatgaaggatctgagaaagacagaagagcactgagaccatttaaaggctgagcttaatccagtgggtgtatgacatactagaaacagttagatgttgaattgagcaatttctagttgaccctggcaaactttttccccaatttttatacacgaggagttaaaagacggtctggtgatgccgaagctattacctcttggcatcttgtaatcctgcaatttatgtcttggggatccgaattcatttcatgaatttaccaaaattagtccatgcgtcgatggtctcgcaaactttgccagcagagcttagttcgttcatggcgctgtgatatgcgtaagatttaatcaagtcgtggctgtacttgccgtatggctgctggcctggccaatctgtg

SEQ ID NO: 207411 - DNA, 666 bp, Zea Mays
gtcaggttcgcccattggccgttggccctaaaacagtaaaactcttttccaacaaagagcatatgggtttcagcaatgtcaatgactatccaccaatggacacccttgagctatcctccgatcatttgatagagaataaacctttgccgctaaagtatgtcaagttccaaaatgttcgcagcctgactgtatttattgaggacaatcaatctggaagtgatgtctcgaaaattcaaaaggttgctctttatggcacaactgtggacacgacaaatatgaaggatctgagaaagacagaagagcactgagaccatttaaaggctgagcttaatccagtgggtgtatgacatactagaaacagttagatgttgaattgagcaatttctagttgaccctggcaaactttttccccaatttttatacacgaggagttaaaagacggtctggtgatgccgaagctattacctcttggcatcttgtaatcctgcaatttatgtcttggggatccgaattcatttcatgaatttaccaaaattagtccatgcgtcgatggtctcgcaaactttgccagcagagcttagttcgttcatggcgctgtgatatgcgtaagatttaatcaagtcgtggctgtacttgccgtatggctgctggcctggccaatctgtg

SEQ ID NO: 207412 - DNA, 3712 bp, Zea Mays
cgctgtcgtcccaaaatccaattccgacctcgccatcgacggaggcggcgtcgcggcgcggcgcgggatcgggcggcgcctccagaagcctctcggacggccgagaccaacaggccggaggaggaggcgatcaggacgagcccaatcgctctcagtcccagctacctccccgtttctttgggaccgaattcggttcgtcgtcaacccccattttcctcgagtcgatgaaggaattgctcgaatcgaggcctggattgacgggtgtttgaggctcggtgaccgaggagcgccgcttcagatatgaacgtggtgggaagggttgggtcggtgatctcgcagggggtgtactccgttgcaacacccttccacccatttggcggtgcggttgacattatcgcggttgagcagcctgatggttcgtaccgcaccacaccatggtacgtccgttttgggaagttccagggcgtgctcaagggtgctgagaaggtcgtcaccatcagagtcaatggcgtcgaagccaacttccacatgcagcttgacaattccggccaagcctatttcatgcgtgagcttgtgcccggcggtgaagattctggaacaggttcagacgacgaaactgtcaatgagcctgaacctccagcgcgtagtaagagtgatggggaactttacattggtcctagcgacagactgggtagccaagagctcaatgtggagcatcaagagaagcaaactagggatgagtttgagtcatatgatggttatggtaggttagaggaatcagaagatttgtcaacccaagcggatgggggaaattcggaggtggttctagttagtgtggacggacatgtgctcactgcacctatttcttcaacagaggagggtatggaggatgtgcagttatgcgaccctcagtttcatttgggacctgggcagagctctagtggggagttcacccgaagtggcgaggtctgggatgctgacattttagatggtttatacatatcacaggaaaaggtaaagattaattctggacatcagtcagaggttttaacagagaatggagaggtaccggttgaaaaggatgggtcacatcacatctcagtggacaaagatgaagtacatgtgtcaatcaatgatgatgaagctcatgctgtttctacaaatgaagttgaggttcaggatgtgtcaaggtcagggaatggtgatgtggtttatcaaaccatgaccagtgaaggtgagtcccatagtattttaggggacatagatgttggccatcaaacattgaccagggaggatgactctcctggtgtttcaggggagaatgttgtgggttatcaacccttgaccaatgaacataaagctcatgatatattagagaacaatgatgaggatcaaccacccctgaacaatgaagatgaatcttgtgatgtgccagtgcttgaaaaagacaaggattgcaactccccagctaataaggatgaggtttgtgatctcaacaatgaggatactgaggataccagtgctagttttggtaaaaacgacgctttccagagctgtttggatctgacgtcacaaatagatgacggggattcaggaaacgaactattttcacctggatctgattctcagagggatgctgagcataatttgggtaactgttctgttgctgaaacagatttggaggaaggtgaaagtaaaactgcttactgtggtcagtatggtcctttacaggagggagtgaatgtttcattatttaccttagaagttgataagactcaaaacaaagagagttctcctgctggaggttctcatgatagggacaaggaaattgcctctgaaattgaggctgccgcatctgatggtttacagtcatccatggcgaccagtggtaaagacaaactggggagcattccagagcactcagaagttgaagatgaacagaataaagaagaacattctcagtcacagaatggcttgggtgttgagatttctctttgtgggaacatgttacgaccaggaatgggccgagaatctgctgaggaagtgtttcaacagaatcttgtccatgaggaggatttcaaatcatctggatcaacaatgataaaaaatgcaaaccttattgtcaaagttgacaataattatttcccctggaataaagtttctcatgttattcttgggaaggctgtatatggctcaaagtttcccttagaacccactgatgctgttccggttgaacaacaggaaacacccaaatcaagagaggactctcttagaatgtctccctcaagccggagatggaggctttggctcaatccctttcggataacaagatcccttcaacgtagtaacagtgattcttccgaagacattttccttgactcagagtctgttttgagtccaatggatgatcaaactctggagaacaacaaaaaccagtcacctagaaagcaattcgtacggactttgattcccacaagtgaacaggtagcatctttaaatctgaaggagggccaaaacttggtgacctttagcttctccaccagagttcttgggaagcaacaggttgatgcacatatttacttgtggaaatggaatgctaaaattgtgatatctgatgtggatggcaccataacaaggtctgacgtgctgggtcaggtcatgcctttggttggacgtgattggagtcactcaggtgttgctcgccttttttctgcaattaaggaaaacggttatcaactactattccttagtgctagagcaattgtccaggcatatctcacgaagaacttcctctttaatctcaaacaggatgggaaagcactacccaatgggcctgttgtaatttcacctgatggcttgtttccttcactctaccgagaagttatacggagagccccacatgaattcaagattgcttgcctggaggacattaaggcgctctttccttctgattacaatccattttatgctgggtttggtaacagagatactgatgagctcagttacaagaagatgggaatacctaaaggcaagatttttatcatcaacccaaagggtgaagtggctgtcaacagttctgttgatgtgaagtcttatacgtccctacatacccttgtcaatgacatgtttccaccaacaactctggttgagcaggaagactacaacaactggaattactggaaggtgccattaccagatgttgatttgtagtgtagttttgacagaaacagccgtagataccagtagatcctgcaaaagcctagcagtagagcttcctgtaccctaatattcagccaccacgacggttttaggtccaatttgtgaaggtctcaagaattccgggatgtatggttttctgaaagccaatggcccaaggaaacgttgccactttatttccttcgacggagctttcacgtgatcatacggcttttgggtagtcatctgattgtcttcgtcgaacttgttgtacccagaggtctgagccctagaccctcgattcattagagaactcgtgatctggtcattgtccaagctactttgttctgattgcaggaaatctttaggtgccaaaagcagctgtacattttttttttcgtgatccaaaaacagctgtacatcgtatatcagcgcatagaagagaattgctaagcatatctgcatcttgaaacccttctttcttgtgctctaaaagttggatttgataattgttgag

SEQ ID NO: 207413 - DNA, 3621 bp, Zea Mays
caacggccggcccccgctgtcgtcccaaaatccaattccgacctcgccatcgacggaggcggcgtcgcggcgcggcgcgggatcgggcggcgcctccagaagcctctcggacggccgagaccaacaggccggaggaggaggcgatcaggacgagcccaatcgctctcagtcccagctacctccccgtttctttgggaccgaattcgagtcgatgaaggaattgctcgaatcgaggcctggattgacgggtgtttgaggctcggtgaccgaggagcgccgcttcagatatgaacgtggtgggaagggttgggtcggtgatctcgcagggggtgtactccgttgcaacacccttccacccatttggcggtgcggttgacattatcgcggttgagcagcctgatggttcgtaccgcaccacaccatggtacgtccgttttgggaagttccagggcgtgctcaagggtgctgagaaggtcgtcaccatcagagtcaatggcgtcgaagccaacttccacatgcagcttgacaattccggccaagcctatttcatgcgtgagcttgtgcccggcggtgaagattctggaacaggttcagacgacgaaactgtcaatgagcctgaacctccagcgcgtagtaagagtgatggggaactttacattggtcctagcgacagactgggtagccaagagctcaatgtggagcatcaagagaagcaaactagggatgagtttgagtcatatgatggttatggtaggttagaggaatcagaagatttgtcaacccaagcggatgggggaaattcggaggtggttctagttagtgtggacggacatgtgctcactgcacctatttcttcaacagaggagggtatggaggatgtgcagttatgcgaccctcagtttcatttgggacctgggcagagctctagtggggagttcacccgaagtggcgaggtctgggatgctgacattttagatggtttatacatatcacaggaaaaggtaaagattaattctggacatcagtcagaggttttaacagagaatggagaggtaccggttgaaaaggatgggtcacatcacatctcagtggacaaagatgaagtacatgtgtcaatcaatgatgatgaagctcatgctgtttctacaaatgaagttgaggttcaggatgtgtcaaggtcagggaatggtgatgtggtttatcaaaccatgaccagtgaaggtgagtcccatagtattttaggggacatagatgttggccatcaaacattgaccagggaggatgactctcctggtgtttcaggggagaatgttgtgggttatcaacccttgaccaatgaacataaagctcatgatatattagagaacaatgatgaggatcaaccacccctgaacaatgaagatgaatcttgtgatgtgccagtgcttgaaaaagacaaggattgcaactccccagctaataaggatgaggtttgtgatctcaacaatgaggatactgaggataccagtgctagttttggtaaaaacgacgctttccagagctgtttggatctgacgtcacaaatagatgacggggattcaggaaacgaactattttcacctggatctgattctcagagggatgctgagcataatttgggtaactgttctgttgctgaaacagatttggaggaaggtgaaagtaaaactgcttactgtggtcagtatggtcctttacaggagggagtgaatgtttcattatttaccttagaagttgataagactcaaaacaaagagagttctcctgctggaggttctcatgatagggacaaggaaattgcctctgaaattgaggctgccgcatctgatggtttacagtcatccatggcgaccagtggtaaagacaaactggggagcattccagagcactcagaagttgaagatgaacagaataaagaagaacattctcagtcacagaatggcttgggtgttgagatttctctttgtgggaacatgttacgaccaggaatgggccgagaatctgctgaggaagtgtttcaacagaatcttgtccatgaggaggatttcaaatcatctggatcaacaatgataaaaaatgcaaaccttattgtcaaagttgacaataattatttcccctggaataaagtttctcatgttattcttgggaaggctgtatatggctcaaagtttcccttagaacccactgatgctgttccggttgaacaacaggaaacacccaaatcaagagaggactctcttagaatgtctccctcaagccggagatggaggctttggctcaatccctttcggataacaagatcccttcaacgtagtaacagtgattcttccgaagacattttccttgactcagagtctgttttgagtccaatggatgatcaaactctggagaacaacaaaaaccagtcacctagaaagcaattcgtacggactttgattcccacaagtgaacaggttgatgcacatatttacttgtggaaatggaatgctaaaattgtgatatctgatgtggatggcaccataacaaggtctgacgtgctgggtcaggtcatgcctttggttggacgtgattggagtcactcaggtgttgctcgccttttttctgcaattaaggaaaacggttatcaactactattccttagtgctagagcaattgtccaggcatatctcacgaagaacttcctctttaatctcaaacaggatgggaaagcactacccaatgggcctgttgtaatttcacctgatggcttgtttccttcactctaccgagaagttatacggagagccccacatgaattcaagattgcttgcctggaggacattaaggcgctctttccttctgattacaatccattttatgctgggtttggtaacagagatactgatgagctcagttacaagaagatgggaatacctaaaggcaagatttttatcatcaacccaaagggtgaagtggctgtcaacagttctgttgatgtgaagtcttatacgtccctacatacccttgtcaatgacatgtttccaccaacaactctggttgagcaggaagactacaacaactggaattactggaaggtgccattaccagatgttgatttgtagtgtagttttgacagaaacagccgtagataccagtagatcctgcaaaagcctagcagtagagcttcctgtaccctaatattcagccaccacgacggttttaggtccaatttgtgaaggtctcaagaattccgggatgtatggttttctgaaagccaatggcccaaggaaacgttgccactttatttccttcgacggagctttcacgtgatcatacggcttttgggtagtcatctgattgtcttcgtcgaacttgttgtacccagaggtctgagccctagaccctcgattcattagagaactcgtgatctggtcattgtccaagctactttgttctgattgcaggaaatctttaggtgccaaaagcagctgtacattttttttttcgtgatccaaaaacagctgtacatcgtatatcagcgcatagaagagaattgctaagcatatctgcatcttgaaacccttctttcttgtgctctaaaagttggatttgataattgttgag

SEQ ID NO: 207414 - DNA, 2622 bp, Zea Mays
cttgaccaagttccaggcctaatccacatgatgcttgtgccgttgcgcgtactgatcgcaatcgaagaagggccgcgtcgtaaaagctcccacgcaagtacacaacacagtacttcagaaacaggacgcgggctcgacgacacaccgatcaggcgcgccgaagcagcgtccgcagccgacggtcatctcccggcgccggtcgcggccatgtcgaagaagaaggcggtcacgacgatgacgctcaaagacttccacggcggctccatcccctccgagctcccgctcccctccgcccccggcgtcaccccgcgccccgcggatcgcaccgtcgcctccgcatcccccgtcgcagccgcggtcgcacggccacgcgtaccggtcgcttcgcctgccgccgctgcggcggcagccgcgatgccttccttcctcacaaacccgtcccgaatcggccgtcacttcgacgaggacgagcgcacccccttcgagcccaccacgccacgccgtcccgcgccgtccccaacgtcgttcgcacccgctcccgtggtggcgcccaccagatcaggtccggggaacgcatggggcccgaagaaggaggcctcttcggcgccttcccctgtgggtcatgctcctgcctccgccggcgaccagatctggtccgcgacacgcatcgcccaggcgagcgcagtggagaaggtaatctccggaagatggcacccgccgaagcccacgtctccgccggcgccggtgtcagttccggtgttggagactcccgtggccccgccagagattgagaggcctaggtccgttggggtgagagagctggatagtggggtggagaggggcgccgcaccagtgagacccgcgtcacatgaaggaaggattggggaagggagagctggggaggtgccagagagacccaagttgaagctgcttcctcggtccaagccaattgaggatcctgaacagcgtcctacctatgtcgaagcgaagcaggtgcaccaggtccaggttactgctggcctcatgaaggctgaggataaccatgatctgcaccagaatgcaagggctactgaaacaggagttttgggagcagatgctgagagcagggtagcagagcgaccacggctgaatctgaagcctcgttcctatgtaacaggacagtctgatgaaattgctgtcaaggaaaggccatctctctttggtggtgctcgccccagggaacaagttctcaaagaacgtggagtggatgttttggccagtgatctcgagaagacttcaccagttggcaggttgttatatgttgtgatgcatcatgttaacattgatagatgcatttcagttgtggcagggcataagttctgatttatttattggatcttgatatcaaagggtgttagagcatcttcaagagttcctaaaaagacaattggcctaaaggcgaatttgcaaaggttgagcagaaggttgaagctatgtccattaacccttctgttgaaagacatgagagttttgcagctggtcatagaggcccaaggaatggtgataagaaagatcataagtggaatactgacagggctgatgcatataggcttactcgtcgagaggacaacaggagggttgctagagatatggagaagccacaggagcaaccacgcccagagcctgagacctggcgtaagccggtggagcctccaaagctagaggttgcaacacctcgttttgggaaagcagcaaccgcgttggagctcgcccaggccttctcaacgtctatgtctgatactgcaccacagagccggttgaccagtgctcccagtccaagagttcctcctagcccaggggctagtagggatcagtctggcttttcaaggctcactgacagcaggacgttacactcgggcccttcccagcgaaagataaatggctactgatcgcttggcacacatattacatgtgccacgatgatagcccaggcatcatggcctcgatgaagcgcccagctgtatcttcatactcaactgtccctgcgtggagaagtccagttgttgctctgtccaatggtggtacgcgagggtctctaatctcattgctggcaagcaaaaggctcctctcccataagtttctggtcagtgatttataactgacggttcgtttcctctcttgataacgagagatgtgaatttgtgaactgtttctgcttatgttcgccagccactatttattgctggggaataattgcagctgcctgcgcaccgtagttggttgcacttgcagacgccgcaaaattgggattttatcgtgctagttttgttttttttttttgccagaagaaactattgatactttgtagtcttgtttactttacggtgatattatgattagaggataggaccttcgttcttggttgtctatttggtacaatcctcgattggatcactgaaatttcgctggattacgactggaacagagaaattatgtttgaaaatcctgtgcaattggtgccatccaaatgggactctgaagacttgtttttcggttttttgtttggtatcgcgtaggcctgtaatgggttcagttcgacctgtttgtgaatacgctccgcccctcaaatctagtgacaggtag

SEQ ID NO: 207415 - DNA, 2517 bp, Zea Mays
cgcgtactgatcgcaatcgaagaagggccgcgtcgtaaaagctcccacgcaagtacacaacacagtacttcagaaacaggacgcgggctcgacgacacaccgatcaggcgcgccgaagcagcgtccgcagccgacggtcatctcccggcgccggtcgcggccatgtcgaagaagaaggcggtcacgacgatgacgctcaaagacttccacggcggctccatcccctccgagctcccgctcccctccgcccccggcgtgtgcaccaggtccaggttactgctggcctcatgaaggctgaggataaccatgatctgcaccagaatgcaagggctactgaaacaggagttttgggagcagatgctgagagcagggtagcagagcgaccacggctgaatctgaagcctcgttcctatgtaacaggacagtctgatgaaattgctgtcaaggaaaggtatgtgctgtaatctactgaccgtcgtatgtacagtaagtgcaaacatgtccaaactcatattgcctgacattctaatcccaacttgtgtataagtctctggtatgtgacctttggttactccatgctcattcagtttcatgaccctgaatgcatctgttacgcaatttagcatgcttgctgcattgctttggagtctggaaccatatatgttcaaagataaaaacaacaccaactatgccctccagggtcagtgtttctgcatacctttttccttatgcttctacataggtaacatttaattgactgttgtaggggtggttttgttgtctttatgattagatggtgctgttcaccttaaattttgtcaaatgttgcatcactgcagtcaccaaccatacatggaaaagttttagtgaagtctatggagcaaacaatttaatatttcattctatcaattaaaaaagtatggttttgcttcggatgagatctccataaacaatggacaagtgtaaaggagaatattgatggttggaatgagtggtggtagcagaatgatgtctacattcattgaatgtaggtaacggcacctcaatttttttttgaatatgcgggaacttggatctttgtttccacaatttattagtgatgcttatgtttgacaagaattaggtttgggaccgatatatttaagtattgtgtatgatatatgtagtgtcaaataaaatttactattattttgacttctttttgttacttcaaatgccctaggccatctctctttggtggtgctcgccccagggaacaagttctcaaagaacgtggagtggatgttttggccagtgatctcgagaagacttcaccagttggcaggcctaaaggcgaatttgcaaaggttgagcagaaggttgaagctatgtccattaacccttctgttgaaagacatgagagttttgcagctggtcatagaggcccaaggaatggtgataagaaagatcataagtggaatactgacagggctgatgcatataggcttactcgtcgagaggacaacaggagggttgctagagatatggagaagccacaggagcaaccacgcccagagcctgagacctggcgtaagccggtggagcctccaaagctagaggttgcaacacctcgttttgggaaagcagcaaccgcgttggagctcgcccaggccttctcaacgtctatgtctgatactgcaccacagagccggttgaccagtgctcccagtccaagagttcctcctagcccaggggctagtagggatcagtctggcttttcaaggctcactgacagcaggacgttacactcgggcccttcccagcgaaagataaatggctactgatcgcttggcacacatattacatgtgccacgatgatagcccaggcatcatggcctcgatgaagcgcccagctgtatcttcatactcaactgtccctgcgtggagaagtccagttgttgctctgtccaatggtggtacgcgagggtctctaatctcattgctggcaagcaaaaggctcctctcccataagtttctggtcagtgatttataactgacggttcgtttcctctcttgataacgagagatgtgaatttgtgaactgtttctgcttatgttcgccagccactatttattgctggggaataattgcagctgcctgcgcaccgtagttggttgcacttgcagacgccgcaaaattgggattttatcgtgctagttttgttttttttttttgccagaagaaactattgatactttgtagtcttgtttactttacggtgatattatgattagaggataggaccttcgttcttggttgtctatttggtacaatcctcgattggatcactgaaatttcgctggattacgactggaacagagaaattatgtttgaaaatcctgtgcaattggtgccatccaaatgggactctgaagacttgtttttcggttttttgtttggtatcgcgtaggcctgtaatgggttcagttcgacctgtttgtgaatacgctccgcccctcaaatctagtgacaggtag

SEQ ID NO: 207416 - DNA, 1794 bp, Zea Mays
tctaacatggggcgagagagatgcctatgtacttagtgtgtgtgagagagagggcgacacagaaggttgaaaagtctccaaaagcgccgagtaaaaagatctcgccccaacaaagggtacgaatacgatcacgcaatataagcatctctctctgctgcttaaagcaacccaggactctgctgcttagagctagagaggacacggaggtagagagagacgaagctagagggacgcaaaacaagctagctaagctaggaggaagatgggtcgcggcaaggtggagctgaagcggatcgagaacaagatcagccgccaggtgacgttcgccaagcgccgcaacggactgctcaagaaggcgtacgagctgtcgctgttgtgcgacgcggaggtcgcgctcatcatcttctccggccgcggccgcctctttgagttctccagctcctcatgcatgtacaaaacactcgagagataccgcagctccaactactcacaagaagtaaaaactccactggacactgaaattaaataccaggattatctcaagttgaggacaagggttgaattcctccaaactacacaaagaaatattcttggggaggatctgggtccacttagcatgaaggagctcgagcagctggaggaccaaatagagatatctctgaagcatatcagctcaagaaagaatcaaatgctacttgatcagctctttgacctcaaaagcaaggaacaagaattgctggatctcaataaagacctaaggaagcaggtaatgcaatggcctccaaacatctctgtgtatacatacctgcaagaaacaaggccagagaacgcgctccgtgtctcctgggaggaaggtgggcacagtggcgcaagtgggaatgttcttgatccttatcaggggctccttcagcacctggacaacgatccttccctgcagttcgggtaccatcatcaagcctacatggatcagctgaacaacgaggacctggtggacccgaatgagcatggtcgatctggatggatatgaaatgctctgatgacccaaaataaagttgatgcacagcagggattcaccctgcaggacgcgagactatgtattgaagctaagacctcgtgtgtgttgtgttgtgtgcgaagcttggaactttataaatcgttgtcatgcccatggctttctatttctttctcggagctgcgcaaaaccgtctccatttctgggcttctcaggacagctggacgcgggaagccggaaccaaaaactctgttccgcactcatctcctctgctccaggcttcaacatccgcgcaggagcgaaaacgcgtcccaaatccttttttatttgccagaaatttctgagccctaacccgcgtgcgcgtggtgcctgggccgaattattaggagatccataggctgtctcactccctctggccagcagcctgactgtgaactccagactccgatcgtctggtcctctagctctcatgtcatggactcatggaggctactactcggcatgttcctggcccaggaaggagtgagcgagctcgccagcccaataccaaatgcgccggcctacaaatccaaaagccccaatttagcgctgagtcctccaggcttcgagtcatcgctgccacgtgtgtatccctacccatcgcacatgggtcacttgccacatgtttggttcagttttttctgattcttttaataagaatttggctgtaaaaagaatcttgctgtgtaaaaatccaaaagcctcaatttagcgctgagtccttcgggcttggcccttgcgtg

SEQ ID NO: 207417 - DNA, 831 bp, Zea Mays
ccatcccgtcccgattccaatccaatcccccgcaagcgcgaagagaggagacgagaagggggagggatccacagttcacacacaccccgcttcccatggcgctagcgctgcgctgccctcccgccgccacctcgtcccggagccccttcctaccgtcgacctccccagcccctgcggggaaggtcccgaggaggccgcccgccagctggaggtgcctcgcctactacggcgacggcggattccgcaagaactacgaccacatccccaagcagttccgcgaggagaacctcaaggatggactgatggataattacaagcatgttcctcaattcctttatggattaagtgatgctcagatggaaatgtttatgaatgacgataacccttataatcggcagtcccagaaagttacagaggaaagcgtttctgctgcgaggagctacgatgagtttggtatgtacaccttgtcaggcatgcatgagggccctgcaagttacagcatgggtatgggcatggggggcagcatgagcatgagcatgggcagaggagggagaggatatagaagaatgagaagctctgctccagatcttccgtcattgctactggactctcgaattatatttcttggaatgcctattgttccagcagtaactgagcttattgctgctcaatttctatggctagactatgacgaccgcacaaaacccatttatctgtatataaactccactggaactatggacgaaaataacgagcttgttgcatctgaaactgatgcttatgcaattgctgattttatcaatgtctctcattttcaagaactatgctgga

SEQ ID NO: 207418 - DNA, 1979 bp, Zea Mays
cccagtccagacgtcgccgtcgtcgccgcccgaacccgatggacatccgccgcgggccgccgccgccgcgcaccgcgtcgggcggggtggagccgcggttccgccaggtgggattcgtcacggccgccgagcccgcgcggggggccgccacgccggcgcccgcgtcgcccgccgcgtccgacggcctctcccccgtcatgatcccgcccccgctcatccccgtccccgtccccgtccctgtcgcgcccgcttccgagtccctcgcgccttcttccccgcccccggactcctcgtctcgccccgacgccgtctccgaccttgacgacgacgacgacatcgacgtgtcctgggcgcgcccacccccgcccgccttcccagaaccaaacaagagacaccttactgaaagaaagaatgagcatgctcctccgactccagtttcgcagaaaccaaagctttctaaagcagagagacgtgccattcaggagtcccagcgtgctgccaaagccgctgccaaggaggcaggtttgaaatcaacagccatggcttctgatgctaacaccaagcaacccaaaacagcaaagatatctctgaagaaagatgtcaaccaagttaactctccagttgcttctgataagaagactggtgaacgaccgcctgacaaagatagaaaaaaagatgctcctcaaccccgcatgcaatttgacgatacacatcgggtggtgaaagcaaagaagcgttcagttgttagacaatcagaagctcaaaacagggtcgaactgttcagacatctgcctcaatatgcacatggcactcaactacctgaccttgagtcaaaattttttcaacctgatctgatgcatccttctgtgtacaaggttggacttcaatatttgtctggtgacatatctggtggcaatgctcgctgtatagcaatgcttcttgcattcagagaggcaataaatgattactccatgccttctgaaaaaattctgaatagagatcttactgctaaaatcagtagctatgtgtcatttctcatcgagtgcagaccactttcaatcagcatgggcaacgcaattagatttttgaagaacaggattaccaagctaccacttgcattttcagagtcagaagctaaagttagtcttcaatctgatattgatcgctttataaatgagaagataatagttgcggataaggtcattgttagtcatgctgtcacaaaaatcagagatggtgatgttctattgacatttgggtcagcctctgtcgttgaaatgatttttgataatgctcatgaacttggaaagaaatttcgtgttgtggtggtcgactctcgtccaaaccatgagggacaaggattgttgcgccgattagttgcaaagggtatcagttgcacatatacacacataaatgctgtatcttacatcatgcatgaggttacaagagtgtttttgggtgcctcttcagtactatcgaatggtactgtctactccagagttgggacagctttggttgcgatggttgcacatgcttttggagttcctgttctagtgtgttgtgaagcgtacaagtttcatgagagggttcaactcgattctatatgctttaatgaacttggtgacccagatgctatttcaagagttcctagggatgaaagtttgagcaatctcaaaaactgggctgagaatgaaaatcttcatcttctgaatcttaagtatgatatcaccccttccgattatgtttcaatgctcataacagattatggaatgctcccacctactagtgtaccagtcattgtaagagagtaccggagggagcacgtttggatatagaagccaccgttttcctttctggttttgtttgaggaggatttgtctgcgatgaacactgatccttgtattcggtatataactactcccaaccacgtcttgtagaaaagctgcaagttcttgaagatttagacacaaaaaaatgac

SEQ ID NO: 207419 - DNA, 2223 bp, Zea Mays
cccagtccagacgtcgccgtcgtcgccgcccgaacccgatggacatccgccgcgggccgccgccgccgcgcaccgcgtcgggcggggtggagccgcggttccgccaggtgggattcgtcacggccgccgagcccgcgcggggggccgccacgccggcgcccgcgtcgcccgccgcgtccgacggcctctcccccgtcatgatcccgcccccgctcatccccgtccccgtccccgtccctgtcgcgcccgcttccgagtccctcgcgccttcttccccgcccccggactcctcgtctcgccccgacgccgtctccgaccttgacgacgacgacgacatcgacgtgtcctgggcgcgcccacccccgcccgccttcccagaaccaaacaagagacaccttactgaaagaaagaatgagcatgctcctccgactccagtttcgcagaaaccaaagctttctaaagcagagagacgtgccattcaggagtcccagcgtgctgccaaagccgctgccaaggaggcaggtttgaaatcaacagccatggcttctgatgctaacaccaagcaacccaaaacagcaaagatatctctgaagaaagatgtcaaccaagttaactctccagttgcttctgataagaagactggtgaacgaccgcctgacaaagatagaaaaaaagatgctcctcaaccccgcatgcaatttgacgatacacatcgggtggtgaaagcaaagaagcgttcagttgttagacaatcagaagctcaaaacagggtcgaactgttcagacatctgcctcaatatgcacatggcactcaactacctgaccttgagtcaaaattttttcaacctgatctgatgcatccttctgtgtacaaggttggacttcaatatttgtctggtgacatatctggtggcaatgctcgctgtatagcaatgcttcttgcattcagagaggcaataaatgattactccatgccttctgaaaaaattctgaatagagatcttactgctaaaatcagtagctatgtgtcatttctcatcgagtgcagaccactttcaatcagcatgggcaacgcaattagatttttgaagaacaggattaccaagctaccacttgcattttcagagtcagaagctaaagttagtcttcaatctgatattgatcgctttataaatgagaagataatagttgcggataaggtcattgttagtcatgctgtcacaaaaatcagagatggtgatgttctattgacatttgggtcagcctctgtcgttgaaatgatttttgataatgctcatgaacttggaaagaaatttcgtgttgtggtggtcgactctcgtccaaaccatgagggacaaggattgttgcgccgattagttgcaaagggtatcagttgcacatatacacacataaatgctgtatcttacatcatgcatgaggttacaagagtgtttttgggtgcctcttcagtactatcgaatggtactgtctactccagagttgggacagctttggttgcgatggttgcacatgcttttggagttcctgttctagtgtgttgtgaagcgtacaagtttcatgagagggttcaactcgattctatatgctttaatgaacttggtgacccagatgctatttcaagagttcctagggatgaaagtttgagcaatctcaaaaactgggctgagaatgaaaatcttcatcttctgaatcttaagtatgatatcaccccttccgattatgtttcaatgctcataacagattatggaatgctcccacctactagtgtaccagtcattgtaagagagtaccggagggagcacgtttggatatagaagccaccgttttcctttctggttttgtttgagctccagcggaacagttttcgtcagcgatctacctcatgtcatctggtgatgattttatttccttgtagtttgtaatttgttggagttcatcaccggcacagctgatcggtttggactttggaccacttgaacattatggccggtttcaagatcctgccaacaagtattactgttttgactgttcataggacaggatatggagcacaagctcacaagtgcacatatgctaaatccaaggctttatagcaacaatggtatttttttttgcagcccaagtgaaaatagcattttgggtatccaaggaccggttggttggtagtaaccatataatcgttatcctacctcgaacaaggtg

SEQ ID NO: 207420 - DNA, 2155 bp, Zea Mays
cccagtccagacgtcgccgtcgtcgccgcccgaacccgatggacatccgccgcgggccgccgccgccgcgcaccgcgtcgggcggggtggagccgcggttccgccaggtgggattcgtcacggccgccgagcccgcgcggggggccgccacgccggcgcccgcgtcgcccgccgcgtccgacggcctctcccccgtcatgatcccgcccccgctcatccccgtccccgtccccgtccctgtcgcgcccgcttccgagtccctcgcgccttcttccccgcccccggactcctcgtctcgccccgacgccgtctccgaccttgacgacgacgacgacatcgacgtgtcctgggcgcgcccacccccgcccgccttcccagaaccaaacaagagacaccttactgaaagaaagaatgagcatgctcctccgactccagtttcgcagaaaccaaagctttctaaagcagagagacgtgccattcaggagtcccagcgtgctgccaaagccgctgccaaggaggcaggtttgaaatcaacagccatggcttctgatgctaacaccaagcaacccaaaacagcaaagatatctctgaagaaagatgtcaaccaagttaactctccagttgcttctgataagaagactggtgaacgaccgcctgacaaagatagaaaaaaagatgctcctcaaccccgcatgcaatttgacgatacacatcgggtggtgaaagcaaagaagcgttcagttgttagacaatcagaagctcaaaacagggtcgaactgttcagacatctgcctcaatatgcacatggcactcaactacctgaccttgagtcaaaattttttcaacctgatctgatgcatccttctgtgtacaaggttggacttcaatatttgtctggtgacatatctggtggcaatgctcgctgtatagcaatgcttcttgcattcagagaggcaataaatgattactccatgccttctgaaaaaattctgaatagagatcttactgctaaaatcagtagctatgtgtcatttctcatcgagtgcagaccactttcaatcagcatgggcaacgcaattagatttttgaagaacaggattaccaagctaccacttgcattttcagagtcagaagctaaagttagtcttcaatctgatattgatcgctttataaatgagaagataatagttgcggataaggtcattgttagtcatgctgtcacaaaaatcagagatggtgatgttctattgacatttgggtcagcctctgtcgttgaaatgatttttgataatgctcatgaacttggaaagaaatttcgtgttgtggtggtcgactctcgtccaaaccatgagggacaaggattgttgcgccgattagttgcaaagggtatcagttgcacatatacacacataaatgctgtatcttacatcatgcatgaggttacaagagtgtttttgggtgcctcttcagtactatcgaatggtactgtctactccagagttgggacagctttggttgcgatggttgcacatgcttttggagttcctgttctagtgtgttgtgaagcgtacaagtttcatgagagggttcaactcgattctatatgctttaatgaacttggtgacccagatgctatttcaagagttcctagggatgaaagtttgagcaatctcaaaaactgggctgagaatgaaaatcttcatcttctgaatcttaagtatgatatcaccccttccgattatgtttcaatgctcataacagattatggaatgctcccacctactagtgtaccagtcattgtaagagagtaccggagggagcacgtttggatatagaagccaccgttttcctttctggttttgtttgagtttgtaatttgttggagttcatcaccggcacagctgatcggtttggactttggaccacttgaacattatggccggtttcaagatcctgccaacaagtattactgttttgactgttcataggacaggatatggagcacaagctcacaagtgcacatatgctaaatccaaggctttatagcaacaatggtatttttttttgcagcccaagtgaaaatagcattttgggtatccaaggaccggttggttggtagtaaccatataatcgttatcctacctcgaacaaggtg

SEQ ID NO: 207421 - DNA, 2688 bp, Zea Mays
tgacaagcggccctacggaactccatgacccacatgtcggtgggtgtttcaagacagcggaaccgacgaagcagaacgtggtgcccaaggaataagacagttaactccacgtctccacctcaccactgccagtaaacagcgagtcctcccttgctccgtcctcctcgtccctgccgttccccaaacccaaagcagagcagcctcggcttctcttatccggagaggagggcggccgccggcgtcgaccttcgcgaggaaggagaggaggccgttggatctcgctggattcgattgggctaggacgggatctccgcgggcagtgcacgatggtcgatcttgctgatctcgagggtgcgggcgaggcggcgcgctcgcatcccgccgcttccggccagcgggacaggctggcggcgctgctggagctcgctgcggcggacgacgccgcggggttccgcgaggcgctcgcgggaggaggcggccagggcgacgcagcggagctggcggacggggtcgggctgtggtacggccgaagcaaggcgtacgagccgcgcacgccgctgatggttgcggcgacgtacggcagcgtcgaagtggtgtcgttgctgctcggcctcggatgcgtcgacgtcaaccggcgccccggcgtcgacggcgccaccccgctgcactgcgccgcttccggcggctcgcgaaacgccgtggccgtggtcaagctgctcctggctgccggtgcctgcccggtaacccccgactccgccggtcgcttgcctgccgacgtcatcttgcctcctgcttcgcccgacgccttgggcgatctggatatgctccttggccgccgccgagggctcgctgtcgcgacctcggtaccatcgctctcgtcgtccccgccgctctcgacctcgccggatgaaggtaacaggtcgccatcctcgcggtcgtcttcgttgtcaccgattaccgtggaccgcgccaagaaggagtacccggtggatccgacgctgcccgacatcaaaagcagcgtgtatgcctcggacgaattccgcatgttcgcgttcaaggtgcggccgtgctctagggcctactcgcatgactggacagagtgtccgttcgtgcaccctgccccaacttccgccgccctggaggttgtcccagtggtgatagctgcgagttctcccatggtgttttcgagagctggctccacccatcgcagtaccgcacaaggccctgcaaggagggcgcagcttgtgcccgccgcatctgcttcttcgcccatgatgaagatgagctccgccatgtgcctcacaatagtggtgcaggcctgctgtctccccgagcctcttcatccattgacatgaccgctgctgctgctgctcttgggcttctacctggatctcctaccagacactttgtgccaccacctctgtcaccatctgccgccaacaatggtggaggtgctgctgctcattggcttcaaggtagcaggctacgatcttctttcaatgcaagggatgcacaggttgatgaccttggcgtgctcctggaatgggaatcacaataccttggagctctcagcctcccacaaagcagccgatcccagctgagtattcgtccaaccgcaattgctccatccaatcttgaagagatgtatgcttcagacatggctatgtcgccaagattctccaatgatcaagttcactcagtctactcaccagcacacaaatctgcacttctaaacaagtttcatcatcagcaaaagggccttctgtcgcctgtcaatactaacaggatatactcgcctaggggtcttgatccatcagttctccattctccatttggtggtatgtgtcctcggtcccctcggactatggagccagcatctcccttaactgtctgtgtcggggctactgctacacagcgtgatatgttggatcagttctcttccctgaacaagcatcaggtgccatctgcgggatcgccacggaatcttaatgtctcatggggcaacattggtaccccaaaaagtaaggtggattggggtgttgacaaagatgaactagtccgcttgaggcaccctgtgcaacctggaaatacagaagaggagccagatgtgtcttgggtgcagtcaatggtgaaccatgctgagctgagtggcaagaggggtgaaatggcaggcatggcttctcgaccaactaataggcctgaactgagcagtcaggatgactcactggatgagagtgttattgcttcttggcttgagcagcagatgcacttggagccgaagtaactgtgaaagaggtcttttgctctcaaggaaagcagtcgctcacagattggtagctgaaagcagctgtcaagaattggtaaacagcctcgttaccttggaggtcctaactagtattcttttgattagttcagatgaggtaaaattcatatattccaccgtgagagtcaatagtatctgtgttggtctctgtaacaagagaggttatagatatttttttttccatttatcattgaacgatttcatgaatacattgataattcccatttattcttctgaatacattttccaatgtttttcctattttctgccatggaaattgcgtatgtgtcaatgctattataattctgttatgaagtccccagtctggagacaattctcgctatgcaggactggaaacaaactgc

SEQ ID NO: 207422 - DNA, 2603 bp, Zea Mays
cagcgagtcctcccttgctccgtcctcctcgtccctgccgttccccaaacccaaagcagagcagcctcggcttctcttatccggagaggagggcggccgccggcgtcgaccttcgcgaggaaggagaggaggccgttggatctcgctggattcgattgggctaggacgggatctccgcgggcagatgcgctgagctcttggcgtgtgcagtgcacgatggtcgatcttgctgatctcgagggtgcgggcgaggcggcgcgctcgcatcccgccgcttccggccagcgggacaggctggcggcgctgctggagctcgctgcggcggacgacgccgcggggttccgcgaggcgctcgcgggaggaggcggccagggcgacgcagcggagctggcggacggggtcgggctgtggtacggccgaagcaaggcgtacgagccgcgcacgccgctgatggttgcggcgacgtacggcagcgtcgaagtggtgtcgttgctgctcggcctcggatgcgtcgacgtcaaccggcgccccggcgtcgacggcgccaccccgctgcactgcgccgcttccggcggctcgcgaaacgccgtggccgtggtcaagctgctcctggctgccggtgcctgcccggtaacccccgactccgccggtcgcttgcctgccgacgtcatcttgcctcctgcttcgcccgacgccttgggcgatctggatatgctccttggccgccgccgagggctcgctgtcgcgacctcggtaccatcgctctcgtcgtccccgccgctctcgacctcgccggatgaaggtaacaggtcgccatcctcgcggtcgtcttcgttgtcaccgattaccgtggaccgcgccaagaaggagtacccggtggatccgacgctgcccgacatcaaaagcagcgtgtatgcctcggacgaattccgcatgttcgcgttcaaggtgcggccgtgctctagggcctactcgcatgactggacagagtgtccgttcgtgcaccctgccccaacttccgccgccctggaggttgtcccagtggtgatagctgcgagttctcccatggtgttttcgagagctggctccacccatcgcagtaccgcacaaggccctgcaaggagggcgcagcttgtgcccgccgcatctgcttcttcgcccatgatgaagatgagctccgccatgtgcctcacaatagtggtgcaggcctgctgtctccccgagcctcttcatccattgacatgaccgctgctgctgctgctcttgggcttctacctggatctcctaccagacactttgtgccaccacctctgtcaccatctgccgccaacaatggtggaggtgctgctgctcattggcttcaaggtagcaggctacgatcttctttcaatgcaagggatgcacaggttgatgaccttggcgtgctcctggaatgggaatcacaataccttggagctctcagcctcccacaaagcagccgatcccagctgagtattcgtccaaccgcaattgctccatccaatcttgaagagatgtatgcttcagacatggctatgtcgccaagattctccaatgatcaagttcactcagtctactcaccagcacacaaatctgcacttctaaacaagtttcatcatcagcaaaagggccttctgtcgcctgtcaatactaacaggatatactcgcctaggggtcttgatccatcagttctccattctccatttggtggtatgtgtcctcggtcccctcggactatggagccagcatctcccttaactgtctgtgtcggggctactgctacacagcgtgatatgttggatcagttctcttccctgaacaagcatcaggtgccatctgcgggatcgccacggaatcttaatgtctcatggggcaacattggtaccccaaaaagtaaggtggattggggtgttgacaaagatgaactagtccgcttgaggcaccctgtgcaacctggaaatacagaagaggagccagatgtgtcttgggtgcagtcaatggtgaaccatgctgagctgagtggcaagaggggtgaaatggcaggcatggcttctcgaccaactaataggcctgaactgagcagtcaggatgactcactggatgagagtgttattgcttcttggcttgagcagcagatgcacttggagccgaagtaactgtgaaagaggtcttttgctctcaaggtggatgaaaccatctttttgccgggaaagcagtcgctcacagattggtagctgaaagcagctgtcaagaattggtaaacagcctcgttaccttggaggtcctaactagtattcttttgattagttcagatgaggtaaaattcatatattccaccgtgagagtcaatagtatctgtgttggtctctgtaacaagagaggttatagatatttttttttccatttatcattgaacgatttcatgaatacattgataattcccatttattcttctgaatacattttccaatgtttttcctattttctgccatggaaattgcgtatgtgtcaatgctattataattctgttatgaagtccccagtctggagacaattctcgctatgcaggactggaaacaaactgc

SEQ ID NO: 207423 - DNA, 3780 bp, Zea Mays
gagacggaagcccaacccgcccgcctgcccgcacacacgcgcgtggccatcgcccctccttccccttcccccgcacacacgcgcctcacctttcgtcccttcgcccctacagatcgaaccaaggaggcagcaaccagcgcacgccactgcggcgctaggagctcgcagaagcgccgccccacgagagggagtccagagcaaggaagagatccggtggcagagcaggtcggtcggagatgggagtaccggcgttctaccggtggctggcggaccgctacccgctgacggtgtctgacgcggaggaggaggagcccgtggagctcgagcccggcgccttcgtccccgttgacctccgccgccccaatcccaacggcctcgagtttgacaacctctacctcgacatgaatggtatcatccacccatgcttccaccccgagggccggccggcgcccaccacctacgacgaggtgttcaagtcgatttttgattacatcgaccacctcttcggcctcatccgccccaggaagcttctctacatggccattgatggtgttgctccaagggcaaaaatgaaccagcagaggtccaggcgattccgggctgctaaggacgcggctgatgcggcagcggaggaagagaggctgaggaaggagtttgaggcagagggtaggactctagcccagaaagagaagtcggaggcaattgactccaatgtcattactccagggacggagttcatgtttgtactatctacggcgcttcagtactacatacagctgaggctgaatcacacgcttggatggcagtctgtaaagataatactgtctgattccaatgtccctggagagggagagcacaaaattatgtcatacatccgcctgcagcgcaatcttcctggctttgatcccaatacacgccattgcttatatggcctggacgctgatttgattatgcttgctctagcgactcacgaggttcacttctcaattttaagagagggcaacatgaaaaatgttttctttgtggtcaagttgggcatttggctgctgaatgcagaggtcctagtcagcctgataattctgtggagctacctcctattcataaaaagaaataccagtttcttaacatatgggtgttgcgtgaatacctggcaaaggatttggaaattatagatgctcccttcaagataaactttgaacgtcttattgatgattttgtgtttatgtgtttctttgttggcaatgactttcttcctcatatgccaactttggaaattcgtgagggtgccattaatcttctcatgagtatctacaggtcggagttcacatcaatgggtggttacctaactgatgtgggtgaggttatattggaccgagtggaacatttcatccagtctgttgcggtcaatgaagaacagattttccagaaacgggcacgcattcaacaggcacgtgagaataatgaagagaaacataaaatgcagagagagaattctgaggaggatcaatatgtggataaggtgaagttaggagagccaggatacagggagcgttattatgctgataagtttaaagaagaggcagaatcaaaacccattgttcaagttcggagagatgttgtccagaaatacgtggaaggtctttgttgggttatgagatactactatcaaggtgtttgttcatggcagtggttttatccctatcattatgcgcctttcgcatctgatctaaaaggcttggctgaattggaaataaccttttttttgggtcaacctttcaagccatttgatcaactaatgggaaccctaccagctgcaagctccaatgcactgccaaaatactatggggatttgatgagtgatccagattcaccgttgaagtctttctacccaaaagattttgagatagacatgaatgggaaacgttttgcatggcagggtgttgcaaaattgccttttattgatgaaaggcgtctgcttgcggaaacaagaaaacttgaagatactttgacagaagaagagaaattcaggaataggactatgcttgacataatttacgttagagatactcatccattgatcactcagattatcttcctgtatcagaactattaccatctatcaagaacagacccttatgttattcccattgagcctgctgctagtggtggaatgaatggattcctatgtttatctgaaaggaactggtatagtgtcactgtcacttctccagttaaggggttcaatggcattgctcagaacagagttttgaatgctgcctatctcaatcctcagtatcacaaacacatcccagagcctccagcgggggtcatcatacctgcgaagatactgaagcctagtgatttcaaaccctttcctgtgttgtggcatcaagataatagtcgtcgacaagtaagagaaaggcctcaggtttctggagccctgtccggttctctcttaggagaagctgcacaccgactggtgaaaaactccctccagatcagatctggcaatgctgctgggttactttatatgccatacagaggtgcaccctatggccctggaaacagaccaaggcctgctgggccattggggtatgagaggggttttgtggataatccataccatgcacacatgtctagaagtgttccaaaccctcacgctcaattctttggtgattctcaagctaacagacagcccatgcggatactagaacggccagactcccgaagtcatgatgctggtatccgtgcatcaatgtctaaactgacaatccaagaagggccaaggcctcatcaaaataacaggatgcagaattccgggtactggcccaatcaaccacatcctactcactttactggacccccagcccagcggcctatgcagaacatcagttttacacctcagcgacctttccaaaccgggggatttccgcagcagagacctgtaaatggggctccaccaccattacctcccagtaactggattggtaagcaaccaagtggatgccacatgagtgtatcacctgcaaaactcgatccaaggacagctccagacagacagcccaagcaggataacccaagatctcaacaggataagaggcagcaggcgaccaaggtataccgtgtcaaaactcaagctactaatgttaatggtttgtcagagccaggtaaacaggaagaacctgaagggtaactgggttgctgcaaatccacacgccaagtttaatgtgcgtggagagaatacgctggctcttggtgatagcagcagagggtttccatgtatccctcccacaatttacctttcgatgttgaattgtttgttgtattacccggaaaggagtcggctaaattttaggtcaggggatttagacacagcttttgtttagttgataggacatggtatgggcattcactgcttgttgtaaagctgttagttggatagctgaaactgttttgtgctggctgactgctgcatattcaacatagacccgtgcggaggctggctcaactgccctgctcctgctctatctcatggaagttgggggcagatgtgcttgtggtcttcaaactgagcagtttgtgtctctgagaaaggaggaagcattccgaatttttcattgtaccgttgaaccaagttgagtctttaacactgaaaagaacatgttcctctcgagcttaacgagtgccataattaggacatggaataatatatatatttttcttttctgggatgcaaacatggtgttcaaattcccattacgcactgtttgaattcgattt

SEQ ID NO: 207424 - DNA, 2205 bp, Zea Mays
cttatcatgtaacattatggtggctgatgtccataacgatcttcgagatctgaaattcattgctgatccagcagaagaggatgctggaaaagtaattctggagatgcttcggcattctgaagtatccgaacaaacggagcttcagactttccttgaagcagcttccaaactgaacattacatcacctaaagctgtcctaattgaaagaagagcaatcaagaaactacttgccaagatcaatggcactgatcataaaaaggaaggaatccttaagtacctcctatatcttgttaggaaatatgggaagaatgtcaagccagagactgatgaaaagaatcaaaatctgaatgtggcaactgaagttttgagtttagactctgttgttaatgtcatcaatactgcagaaatatgcatttcagctacagagtctgccaatatgatatatgatggtcagagtagtttatctggagcaaccacaccacctcaagagctctgctgcccattgtctttgaagctgatgcgagatcctgtgataataacatctgggcaaacatatgaaagagaaaatatcgagagatggttcagtgagggatatgatacttgtcctaggacaaatatgaagttaaagaacttcacggtaactccaaatacatgcatgaaggctgttattcataactggctcaaagatcatgagcttgaatctactgatttgcctaagcaatttcagaattattattctgtatcaagtttgcacaatatctctgcacctctaattatagaaaagaatagagactacacagttgattatagcagctcatcttttggactatcaggtgctagttatatatcatcccccatgagggaaacagagcagtcaaagactagttttgaccagttttattctaatgccaatttccagttgtatttgtccttctgcaactttgacaaggcaatgttcttgggtttctttcatgagctatccgagcttccctttgaactgcaaagaaaagctgtcagagatttgaagacttctctgagcggtgaaaatgaaatttggcattctatggtctacaatgggttttttgaagcattccatgaattcctcaagaatgacagtggaattcacacactgcaagctcgaagggctgggattcagttttttcttgctttcctttctagtggcagggctcgaattccttcagtttgtgaagatgtggtacttctgattgcatcactacatgattccgagttcaaacaggaggctcttctgattgtacatgaactgcttcaggaaccaagctgtccaaaatctagtctcatggcctccattctttctccttcagtgtttggagctttggacagtggagaaaccaagtgcctggacctcgctctgcagatcatctgcaagatttcatctgataatgatataaaatcttaccttctttcgtccggaatagtgtcgaggttatctccgctccttggtgaaggaaagatgacagaatgctctttgaagattctacggaacttgagtgacgtgaaagagaccgcagggtttataatcagaacaggtaattgcgtcagctccatttcagatcatctggacactggaagccacagcgaacgtgaacatgcggtggtcatccttctaggggtatgctcccacagtcctgaggtttgttcactttccatgaaggaaggcgtcatcccagcccttgtagacttatcagtgagtggaaccaaggtggcaagggattgctcggtcaagttgcttcagcttctgaggaacttcaggcgatgtgaccagttcagcagttcatgctcaagagagcttgctgtcgatcatgtttcagagaacactcgcaatggttcaatttgcatgcagccgatatcaaagtcagcccggtatatttcaagaaagctcaaccttttctcaaaacctcggtcgctgaccctggcttgagaaatggaaggggtcggttggatcgagccctattccgcagcgctaactgccagatgtacagatagtagcaggtagcgttcgtcgagatgaaatgtttgtgggaggctttttaaaactcaccatgtatttcaagagtttttattagttttttttggattttctttactggcgctacaaacagtagatgtatgactgttcgagctggaaacctgtgcgctttttatcgtagcattgtcttgtttact

SEQ ID NO: 207425 - DNA, 2338 bp, Zea Mays
cccagatctagcgcagtccactccgacactgccctccgtccgtcgtcctctccgctctggggctctgagcctctgacctaggccgccgtccccgccgcgcatgccaccgtctccgccatgcaggccgttgtccttgccgtcatccacgccatgtggctgatgtccataacgatcttcgagatctgaaattcattgctgatccagcagaagaggatgctggaaaagtaattctggagatgcttcggcattctgaagtatccgaacaaacggagcttcagactttccttgaagcagcttccaaactgaacattacatcacctaaagctgtcctaattgaaagaagagcaatcaagaaactacttgccaagatcaatggcactgatcataaaaaggaaggaatccttaagtacctcctatatcttgttaggaaatatgggaagaatgtcaagccagagactgatgaaaagaatcaaaatctgaatgtggcaactgaagttttgagtttagactctgttgttaatgtcatcaatactgcagaaatatgcatttcagctacagagtctgccaatatgatatatgatggtcagagtagtttatctggagcaaccacaccacctcaagagctctgctgcccattgtctttgaagctgatgcgagatcctgtgataataacatctgggcaaacatatgaaagagaaaatatcgagagatggttcagtgagggatatgatacttgtcctaggacaaatatgaagttaaagaacttcacggtaactccaaatacatgcatgaaggctgttattcataactggctcaaagatcatgagcttgaatctactgatttgcctaagcaatttcagaattattattctgtatcaagtttgcacaatatctctgcacctctaattatagaaaagaatagagactacacagttgattatagcagctcatcttttggactatcaggtgctagttatatatcatcccccatgagggaaacagagcagtcaaagactagttttgaccagttttattctaatgccaatttccagttgtatttgtccttctgcaactttgacaaggcaatgttcttgggtttctttcatgagctatccgagcttccctttgaactgcaaagaaaagctgtcagagatttgaagacttctctgagcggtgaaaatgaaatttggcattctatggtctacaatgggttttttgaagcattccatgaattcctcaagaatgacagtggaattcacacactgcaagctcgaagggctgggattcagttttttcttgctttcctttctagtggcagggctcgaattccttcagtttgtgaagatgtggtacttctgattgcatcactacatgattccgagttcaaacaggaggctcttctgattgtacatgaactgcttcaggaaccaagctgtccaaaatctagtctcatggcctccattctttctccttcagtgtttggagctttggacagtggagaaaccaagtgcctggacctcgctctgcagatcatctgcaagatttcatctgataatgatataaaatcttaccttctttcgtccggaatagtgtcgaggttatctccgctccttggtgaaggaaagatgacagaatgctctttgaagattctacggaacttgagtgacgtgaaagagaccgcagggtttataatcagaacaggtaattgcgtcagctccatttcagatcatctggacactggaagccacagcgaacgtgaacatgcggtggtcatccttctaggggtatgctcccacagtcctgaggtttgttcactttccatgaaggaaggcgtcatcccagcccttgtagacttatcagtgagtggaaccaaggtggcaagggattgctcggtcaagttgcttcagcttctgaggaacttcaggcgatgtgaccagttcagcagttcatgctcaagagagcttgctgtcgatcatgtttcagagaacactcgcaatggttcaatttgcatgcagccgatatcaaagtcagcccggtatatttcaagaaagctcaaccttttctcaaaacctcggtcgctgaccctggcttgagaaatggaaggggtcggttggatcgagccctattccgcagcgctaactgccagatgtacagatagtagcaggtagcgttcgtcgagatgaaatgtttgtgggaggctttttaaaactcaccatgtatttcaagagtttttattagttttttttggattttctttactggcgctacaaacagtagatgtatgactgttcgagctggaaacctgtgcgctttttatcgtagcattgtcttgtttact

SEQ ID NO: 207426 - DNA, 893 bp, Zea Mays
caacggcccaataggccagaacgcatcactacgtctctgcagaagcttcctagggttttttaggcgtcgcagataagagatcccctcactgcattccctctgagcgccgccactccctgacatcgagaccggctgcccgcccctacggccagcgtgctgtcctcaagttcgcgcagtacactggcgcccatgccatcgctgggaggcacacccctggtaccttcaccaatcagctccagacctctttcagcgagcctcgcctgctcatccttactgacccaaggactgaccatcagccaatcaaggagtctgctctggggaacatcccgaccattgccttctgcgacactgactctcccatgcggtatgtcgatatcggcatcccagccaacaacaaggggaggaacagcattggatgcctgttctggcttttggccaggatggttctgcagatgaggggcactatcctccctgggcacaagtgggaagtcatggttgatctgttcttctacagagacccagaggaagcaaaggagcaggaggaggaagctgctgcggcccctgagtttgctgcagtcactgattaccaaggagctgatcagtggggcggtgaccagtggacctctgatgtggctgcaccacctgttgctcctactggtgctgattggggtgctgcaccagctccggttcctaccggtgatggctgggatcaaactgtggcccctgttcctgtggatggcactgttcctccagtggtcgctcctactggttgggaatcagcagcccagcccactgcccaaggctgggaataggcgttgaggcatcactttgagacgtcttgtgcgggattattccaaagttggatccaatgggagcggtattgcccacctttc

SEQ ID NO: 207427 - DNA, 1937 bp, Zea Mays
ccctctgagccgccgagaagcagaccagggcaccaggcgactgggcgagaggcgaccaccgaacaggtccagccgtccaggcacgtcggcgacgtcatagactcgttgtccagttcttaaggaaagatgagtttgatatcccagaacgcggtccagaagcgctgcctcagaaaaagtgaagctgataatggcaatgatgaggacattggctctccgacctctatagatgcagaagttgggaaggaagcaaaattgaagaatcacaataaggaaaggaagaagaaaaagactaagttgttggaatcccagcagaacaaagaggaagaggagatgcggcagctggagagctcattgtttggttccctttatgctccactagagtttggcactgaggtaggggctgcagtagctcctgaccgggatgcgcctttgtttttcacagataggtctgctggtggtggcatggattattttcctacatatgaggaggatatggcccatgaagatgaggaagacatggtgggtatcaagaggaggaagcctgtatgggtggatgaggaggaagaaatgacagaggtggacattgtgaaggttccaaggttgaggaagctgagaaaagaggaagatgagcatttgatttcagggaaagagtatgaggccaggttgcgtggtcagcatgcgaaattgaacccctttactggctgggctgatatggaccagaaaacttctcttcctgctgcgtcagatggtgagtctgatgatgagggttgtgtcgatgatattcttcggaataatgatgagcttgttgccaaggatactgtcaagctcttaccggggatgctggaattctcaaggctcgttgatgccaatatccaggatccatcaagtggtcctatcaattcagtgcagtttcataggaatgggcaactgatgcttgctgcaggtttggacaagcatctgaggtttttccagattgatggaaagagaaaccccaagatccagagcatatttattggggactgtccagtacacaaggcttcttttctacccgatggctctgaggtgatcctatcaggcaggaggaagttcttctactcatttgacctggtgaatgctgctgttagcaagattggacctttgacgggacgcgaggagaaaagcctggagagctttgagatatcacctgattcgagaaccattgcttttgttggcaatgaagggtacatccttcttatttctgccaagacaaagcagctcatcacaaccctcaagatgaacggaagcgtgcgttcactggcttttgcggatggtgggaaccagctactgagcagcggtggagatggccatgtttaccactgggaccttggaacaaggaaatgcatccacaaggcaacagatgacggttccctggctggcctctcgctctgcacctcgcgggatagctctttgtttgccacaggctccagcagcggcatcgtgaatgtgtacaagagggacgattttctcggcgggaagaggaagccgatgaagactatcgagaacctgaccactgatatcggtgagatgaagttcaaccatgacgcccagatcctggcgatcagctcgaggaaagagaggaacggcatgaggctcgtgcacgtcccgtcgttcagcgtgttccagaactggccggggcctcggtttagtctccactatccacggtgcctggatttcagccccggcagcggcttcctgtccgtcggacatgcaggtggaaaggtcctgctgtacaagctccaccattacgagaatgcatgatgagactaggatggttgcttggcgaaaacccatttttgacattatatttgtactcatgaatactccattaatcgagtgagtgtatgctggtccgttccagtcattgtgcctttctatttggtgccgctggtgtcaatgct

SEQ ID NO: 207428 - DNA, 2175 bp, Zea Mays
cgcgatcgtgccgccgccttctcttcaacagcactcatctatcgcgctagctccacttcacacggtcaattcccctcgcgtaagccaagcgttggggtgatcctgaagaaaccggccggcctgcaggcgccatataatcccaaccacaccgcatcgtttggatgtgcagttcttcgtatccacaccgcatctagctagcttgtggccaagtgttcgagatagcattgccggccggggggagcaagagatatgggtagcttgggagaggtcggtgatggcaaggagatattccatggccatggccattctgaccctgtcgtcgacgagctcaaccgtctgcagaatctcctcagagaaaaggaaagagagctaggacatgcatacagtgaaatcaaaggcttgaaggtgacggaagctctgaaggacaaggctattgctgagctgagcaaggaactaaagagacaggacgagaggatgagaagtatggagaaacaacttgagcagaagaatctagaagtgaaaagactaaataacgagcgtaaagaagcattgtctgcgcagttcgctgcagaggcgacacttagaaggatccactcttctcaaaaagatgaggaatcagttccattcgacgccatcatagcgcccttggagtcagacataagaaaatacagacatgagattgcagtgctacaagatgacaagaaggcactagaacgacatctaaagttgaaggaggtggcgcttgttgaagcaggcaacattttgcacaccgcgcttgaaagggcactcatagtagaggatgttcagaatcagaacattgaattgaagaagcatatggagatataccatgaagagaataaattgttagagaaggctaacagacagaaggtgctagaggttgagaagctcacacaaacaattaatgagcttgaagagtccattctcgcaaccggtgaggttgccaatgtggtccacttctaccagaatcaagctacaaagttgaataggacccttgagagggagctagctcgagcaaaggtttatgtcaatcgtgttgcatccacagcagcaaatgaatggaaagatgactctgacaagctcatgccagtcaagagatggctagaagaacgaaggctcctgcagggagaaatacagcgattgcgtgacaggataacagtagcagagaaatctgcaaagattgaagcccaacttaatgataaactcaaaaggaggctcaagtcgcttgaagaggatatgagaaataaaacatccaattcgtctacaaaagaaattaataaacaagccactcctaaaagatcattgtctcaaccaaaacaacctaaaacaatgagagtgttacctcaactatattcacctgaagtcgttgacaagagaaggcctatatctcaaccaagggcatcaatggtagggaaagtattgaagcaacctaattcagaaatcgagcctacaaagaaaagtacagttgttaagcgatttgatagccctggaaggagaacaatttctagtaaagaagagtgtcccatgaaaaatcaactatgggcatcaaaaaccaaaacagatgttattgttgggaaagagaacaaagtacaaaagccaaattccaaggcacgtttaaatgcttcacattcacaaggccatgtggacacaaaagtatttgatggaaatgatgaatatggacttcaaaatagtgaacatcatgaagccatggcaaatgagagaaatgggaatagctcgagtgatgaaagtagcccttagaacaacaagacaagttggagtgttggggtttacttttgcatgaagacacaaaatggaagcacaaataacattattatgtacagatgtagcatgacttattttaaaggaagcgtgtgcccatctacatctattttattctgcccgggagattgcttgaacaacaaaactagttgtggtgtcatcattttgttttgtctctttgttctctcatgtacatacaaactatacctcaaactttacaaatgtaattttgtgcgactattgaaaaaatcaatatgtgcttttttgaggaattggttactttataaaataaaaaggtgtctaatgtaatagaagcaacagagaaaaaagtgaagggtgtgaatcaataaaaccatggatgttgaatgttgatgtttc

SEQ ID NO: 207429 - DNA, 2643 bp, Zea Mays
cagcgcagcactcgcactcgagcaccgagagggaggaaaaaagaattctccacttccccactctccctctcccgctcgtggctcgtcagtgggtgggagtgtgcggggctagccgctagggtttccgcgagcccatcgccggccggccacggacgatccgggactccatccggcgcctgccctgaatcggcttcgcggggcgcaaggagcgagagaatgaagtcgtcgctgcggaagctgcggggcttcgcgctgcagcgccaggagcagcgggtggaccgggaccgcggccggggccacgccaccgccgccgccaccgcggcggacgagctcctcgcggctgcccaggatatggcagatatgagaagctgttacgataacttgctttctgttgctgcagcaattgcaaatagtgcatatgagttctctgaagcacttcaagaaatgggaacttgtttgcttaaaagagttacgccaaataaggatggaataaatgataaagttttgctgttgcttgggaaatcacaatttgaacttcggaaacttttagatagttatcgtgtgcatgttcttaacaccatcaccactccatcgctgtcgcttcttaatgaacttcaaactgtggaggaaatgaagcaccaatgcgatgaaaaaaaagaattgtatgaattcatggtaaacacgcagaaagaaaagggaaggtctaagaatgctaaaggtgataatggagcatcagagcaattgaaacaagctcaggaagattatcaagaggaagcaactctttttctattccggttgaagtcattgaagcaaggacagttccgaagtctttttacacaagctgctcggcatcatgctgcacagctaaatttgttccgaaagggagtcaagtcccttgaggctgtagagccacatgttaggctcgctgctgagcagcaacacattgatcatcagttcagcgcacttgaggaagaggattaccttgttgaggatgaaaatgatgacgattacaatggcagtcatgatggagagttatcttttgattatggagaaaataaggaagttgaggaatctgggtttttttaacagaagcaaagaagagtattcttctgttccacatgaaagacaaagaatcgtaagtcagtcagcaccactttttcctgagaaaaagctcaatacagaagagagaataaaagatttgcggcgttctgcaacaaggaagttgaatacttatgttttgcctactccaaatgacgttggagctacttctcagagagcatcaggaaatcctacttctgaacctctcgagagtaaaggtgccttccattcatctccactccactcatctgcagacataagagatttgggagacagtaatctacctagtcctacaagattgtctaacgtacagtctgtgctgaaagatagcaataccaataaaacagaaacaaggaaagtactcccagtgggtgatctggctttacctagctatcatgacctgaagacttctgataacaaaaaagtgaaaagagggtcattttctggcccaatagcttccagaccacggtcaacagagaacattgatgttatttctgcagcgcctaggcatagctcagcacatcagccagtgcacatgagagtatcccccggcaactcgccgccacccatttcctcaccgaagatcaaggaacttcatgagcttcctcgaccacctgttaatacatcaaaaaatatagcattccccagtttagttgcccactccgccccattggcaccaaatcctgcatctttgactcccaaagttcaagatcattttaggacaaaacaaacgctccaaagaactgcttcacctttaccaactccaccacctggatctatagcccgcagtttttctataccttctaggggtatttcagacagtaaagagacagaagatcaacacaagggagctgccagaatgagtctttcttctcttccttcagcacaaacattcttggaagatcgtcagccattgtcatcagctgctggatcggtcagcaaaacataggagtattctctattatcattatcaagcagctcgccgagccctcttcctgaaagaatgttgtacatattagcatttgaactctggccagtatcgcggaagaagttgggtgctgtttggttcacgaaatgtaacgtaaagggtaatggtaacggtttacactcgattacggacggtaacaagtttgaatagtccggtatcaaattttagtatggtatctgattacggttggactaaaacaaacatgatttaacgttatcacttacccattacgttacaaatatttgaaccaaacggtaccttggtgtttcgcgtgccctttggttggttaagatgtagcctgtgcaaataatgggttctgcggaaataaaatccccatttttctcacccatttgattgattgacgcgagatttgctgttgcgccgttgagcttgtttgccttgaagcgagttcagagtgccatctgtttcctgcagcttatgtaattatcacctggtttcctgtgcttatgtaatcatcatctatgtgtttgattgcctgtactggtgcttgcatcgcgagatgcaatgagctggtgtttggttgttgtcaatcaggc

SEQ ID NO: 207430 - DNA, 2149 bp, Zea Mays
gcgctctgtccaaatccgcgggcggaatccccctcgtgcaaattcgcagtcgtcttgtgcgccggccggccatgatccaccgtccacgccgccaacctcgtcggccgcggcattgttagttctagttgttgttgttgtttagatagcattattccgtcgtcggacagatctgccgccattgccgcgcgcgcgttacgttacgttgttcttgagctgatcgatcagatcggagtcggaggagaggagggagctagctgtgctagcatggggccaggagcgcgcgacggcggagcccaatgccctccctgaagctgaggcccatcctgttccccttccagatggagccccggcgcgaggagctgctgcatgagctgggggacatgtgggacgagatcggggaggcggaggaggaccggcggggggcgctgtcggcgctggaggaggagtgcctcagtctgtaccgcgccaaggtggagcaggtccggcagcaccgggcgcagctcaagcgggagatctccgactccgtcgccgaggtcgccgccatctgcgccaccatcggcgagcctccctccaccgtgcacacggcctgctcctcgctccaggaaagtcgcaccaagaaggtggcggagctcgtggctcagctgcactcgtcatccttggttctcggcatggatcccacagaggcgaacagtgtcgtccatgttggcgccgacggcgcgcaggtgcagcccggcgacatcagcgacggcgccatcgcggggctggctgcgggcatcgagaggctgagggagatcaaacggagccggatggagaagctgcaagacctgctgggcagcatgctggagctgtggaacctgatggacacgccggcggaggagcagcggcagttccagggcgtggcctgcaacatcgccgcgtccgaggacgagatcacggagcccggcgccctctccatggccttcataagcaacgtagaggcggaggtggtgaggctggagaacctcaaggagtgccggatgaaagacctcgtcgtgaagaagcacgaggagctcaaggagatccgccgccgcgcgcgcctgcccgaggacgacgacgctaccgtcgtcatggtgttcgacgccatggacagcgatgccgaccgggctgcgatcctggagtggctggaggtgcagatctcggaggccaaggacctggagttcaaccggaaggacgtgctggagaagatggacaggtggcaggcggcgctggaggaggagtcctggctcgaggagtacagcagaaacgagaacagatacaacgttggcaaagggacgcatctcgtgctaaagcgcgccgagaaagcccgcgccctggtcagcaaaatgccggtgatggcggaagctctgatggcgaaggtagtcgcgtgggagaaggagagaggcgccaagttcgagtacgacggtgaggtgctgctggacgtgctggatgactacggaaacgcgaggaaggagaaggagcaggagcggaagcggcagcgggaccagcggcggctgctgcagcaggtgcagggcgccgcggcggcggcggacagggacgtgtcgtcgccggtggcgcacccgccgcccaagaacatcaagaacgtcacgaggacgctgtccatggggggcaacaacacctccggcggcggcagcgccaggaaggccgcgccggcggcggccaggcccggcactcccagcttcctcaagtcgcccttgtcggcgcgccgcggcgggagcgacgaggggcatatgatggcgtcggagtccttcgagtgacgatcttttgcttgtagccagagctgggatgcccatgaatgtcgtcgtcgatctgcaactgcaatgccaaatctgtttgaagtcttttttgtcaaagtcgaatgtgcatcactgcatgcagacctcgtatgcagtgctaatgctttactagaagagaaaattatatgtctgattagacagctccacgcctccacctcttggagtaattttgatctggcattggttcatttggttggcaccgtggcctggagttgcctgcctgccagccagctagatccagcaccaggaatccaaaatcggacgcctgagattgctgcatggatcagactggtttttcagggtgtgaaccaaacaag

SEQ ID NO: 207431 - DNA, 2440 bp, Zea Mays
tcccctcatttccgccctttccgcgcgcgctctgtccaaatccgcgggcggaatccccctcgtgcaaattcgcagtcgtcttgtgcgccggccggccatgatccaccgtccacgccgccaacctcgtcggccgcggcattgttagttctagttgttgttgttgtttagatagcattattccgtcgtcggacagatctgccgccattgccgcgcgcgcgttacgttacgttgttcttgagctgatcgatcagatcggagtcggaggagaggagggagctagctgtgctagcatggggccaggagcgcgcgacggcggagcccaatgccctccctgaagctgaggcccatcctgttccccttccagatggagccccggcgcgaggagctgctgcatgagctgggggacatgtgggacgagatcggggaggcggaggaggaccggcggggggcgctgtcggcgctggaggaggagtgcctcagtctgtaccgcgccaaggtggagcaggtccggcagcaccgggcgcagctcaagcgggagatctccgactccgtcgccgaggtcgccgccatctgcgccaccatcggcgagcctccctccaccgtgcacacggcctgctcctcgctccagggcacagggagcctgaaggaggagttgggcatgatcgcgccggagctggcggagatgaggcggaggagggacgagaggcggcgcgagttcgcagacgtcacccagcgggtcgccaggatccaggaggagttggacctgcagctaggtggcgggcaaggccagtctgaagctcacgccgccgccgtcatcgtcgacgtcgacggctccgacctgacgacgaccaagctcgacgagctccgagcctatctgcagcacctgcagctggaaaagtcgcaccaagaaggtggcggagctcgtggctcagctgcactcgtcatccttggttctcggcatggatcccacagaggcgaacagtgtcgtccatgttggcgccgacggcgcgcaggtgcagcccggcgacatcagcgacggcgccatcgcggggctggctgcgggcatcgagaggctgagggagatcaaacggagccggatggagaagctgcaagacctgctgggcagcatgctggagctgtggaacctgatggacacgccggcggaggagcagcggcagttccagggcgtggcctgcaacatcgccgcgtccgaggacgagatcacggagcccggcgccctctccatggccttcataagcaacgtagaggcggaggtggtgaggctggagaacctcaaggagtgccggatgaaagacctcgtcgtgaagaagcacgaggagctcaaggagatccgccgccgcgcgcgcctgcccgaggacgacgacgctaccgtcgtcatggtgttcgacgccatggacagcgatgccgaccgggctgcgatcctggagtggctggaggtgcagatctcggaggccaaggacctggagttcaaccggaaggacgtgctggagaagatggacaggtggcaggcggcgctggaggaggagtcctggctcgaggagtacagcagaaacgagaacagatacaacgttggcaaagggacgcatctcgtgctaaagcgcgccgagaaagcccgcgccctggtcagcaaaatgccggtgatggcggaagctctgatggcgaaggtagtcgcgtgggagaaggagagaggcgccaagttcgagtacgacggtgaggtgctgctggacgtgctggatgactacggaaacgcgaggaaggagaaggagcaggagcggaagcggcagcgggaccagcggcggctgctgcagcaggtgcagggcgccgcggcggcggcggacagggacgtgtcgtcgccggtggcgcacccgccgcccaagaacatcaagaacgtcacgaggacgctgtccatggggggcaacaacacctccggcggcggcagcgccaggaaggccgcgccggcggcggccaggcccggcactcccagcttcctcaagtcgcccttgtcggcgcgccgcggcgggagcgacgaggggcatatgatggcgtcggagtccttcgagtgacgatcttttgcttgtagccagagctgggatgcccatgaatgtcgtcgtcgatctgcaactgcaatgccaaatctgtttgaagtcttttttgtcaaagtcgaatgtgcatcactgcatgcagacctcgtatgcagtgctaatgctttactagaagagaaaattatatgtctgattagacagctccacgcctccacctcttggagtaattttgatctggcattggttcatttggttggcaccgtggcctggagttgcctgcctgccagccagctagatccagcaccaggaatccaaaatcggacgcctgagattgctgcatggatcagactggtttttcagggtgtgaaccaaacaag

SEQ ID NO: 207432 - DNA, 2448 bp, Zea Mays
ttttatttagcgacgactttcccctcatttccgccctttccgcgcgcgctctgtccaaatccgcgggcggaatccccctcgtgcaaattcgcagtcgtcttgtgcgccggccggccatgatccaccgtccacgccgccaacctcgtcggccgcggcattgttagttctagttgttgttgttgtttagatagcattattccgtcgtcggacagatctgccgccattgccgcgcgcgcgttacgttacgttgttcttgagctgatcgatcagatcggagtcggaggagaggagggagctagctgtgctagcatggggccaggagcgcgcgacggcggagcccaatgccctccctgaagctgaggcccatcctgttccccttccagatggagccccggcgcgaggagctgctgcatgagctgggggacatgtgggacgagatcggggaggcggaggaggaccggcggggggcgctgtcggcgctggaggaggagtgcctcagtctgtaccgcgccaaggtggagcaggtccggcagcaccgggcgcagctcaagcgggagatctccgactccgtcgccgaggtcgccgccatctgcgccaccatcggcgagcctccctccaccgtgcacacggcctgctcctcgctccagggcacagggagcctgaaggaggagttgggcatgatcgcgccggagctggcggagatgaggcggaggagggacgagaggcggcgcgagttcgcagacgtcacccagcgggtcgccaggatccaggaggagttggacctgcagctaggtggcgggcaaggccagtctgaagctcacgccgccgccgtcatcgtcgacgtcgacggctccgacctgacgacgaccaagctcgacgagctccgagcctatctgcagcacctgcagctggaaaaggaaagtcgcaccaagaaggtggcggagctcgtggctcagctgcactcgtcatccttggttctcggcatggatcccacagaggcgaacagtgtcgtccatgttggcgccgacggcgcgcaggtgcagcccggcgacatcagcgacggcgccatcgcggggctggctgcgggcatcgagaggctgagggagatcaaacggagccggatggagaagctgcaagacctgctgggcagcatgctggagctgtggaacctgatggacacgccggcggaggagcagcggcagttccagggcgtggcctgcaacatcgccgcgtccgaggacgagatcacggagcccggcgccctctccatggccttcataagcaacgtagaggcggaggtggtgaggctggagaacctcaaggagtgccggatgaaagacctcgtcgtgaagaagcacgaggagctcaaggagatccgccgccgcgcgcgcctgcccgaggacgacgacgctaccgtcgtcatggtgttcgacgccatggacagcgatgccgaccgggctgcgatcctggagtggctggaggtgcagatctcggaggccaaggacctggagttcaaccggaaggacgtgctggagaagatggacaggtggcaggcggcgctggaggaggagtcctggctcgaggagtacagcagaaacgagaacagatacaacgttggcaaagggacgcatctcgtgctaaagcgcgccgagaaagcccgcgccctgtgatggcggaagctctgatggcgaaggtagtcgcgtgggagaaggagagaggcgccaagttcgagtacgacggtgaggtgctgctggacgtgctggatgactacggaaacgcgaggaaggagaaggagcaggagcggaagcggcagcgggaccagcggcggctgctgcagcaggtgcagggcgccgcggcggcggcggacagggacgtgtcgtcgccggtggcgcacccgccgcccaagaacatcaagaacgtcacgaggacgctgtccatggggggcaacaacacctccggcggcggcagcgccaggaaggccgcgccggcggcggccaggcccggcactcccagcttcctcaagtcgcccttgtcggcgcgccgcggcgggagcgacgaggggcatatgatggcgtcggagtccttcgagtgacgatcttttgcttgtagccagagctgggatgcccatgaatgtcgtcgtcgatctgcaactgcaatgccaaatctgtttgaagtcttttttgtcaaagtcgaatgtgcatcactgcatgcagacctcgtatgcagtgctaatgctttactagaagagaaaattatatgtctgattagacagctccacgcctccacctcttggagtaattttgatctggcattggttcatttggttggcaccgtggcctggagttgcctgcctgccagccagctagatccagcaccaggaatccaaaatcggacgcctgagattgctgcatggatcagactggtttttcagggtgtgaaccaaacaag

SEQ ID NO: 207433 - DNA, 3693 bp, Zea Mays
ccgacgcacacacgccggtaaatttcctccccagttgattccagcggcactgcacttgtgctgcctgcgttcttctcccctgagagctgcggaaagatccaagcgcaaggccacctaaccagaaccaaacaaggccgcctccggatcgccgagcaaattccatattattttcctcccgtttcttgtttttctcctctcgcttatccgtctcccagaaggagagggagagggagagccgaaccggggtgatcgttgccgtccctgtcacccccacaccccgctgtcgtggtgtcctatgcgactcgtttgttgccgtcggtcgcctggttgattaatccaaggccaaggatctcccctccacgaggacctccggagaggccagggtggctgcttgttgagtccagtgtgtcagtgtgtgccacttctctcacaaacactgcgagcttgtccctatcctgcaagaaacagcggaccaaagcatccgctccatttctccgctagttcgtgcgtcgatccaaacgccaatcttggatttctgccgcaaggactgtgcttcttgtagcaaaagcccccaaagatttgatccaagccagctcggaatcggatccctgcgaggaccaggcggcctgccatggcgtcccgctcctactccaacctcctcgacctggcaaccggagcagcggaccaggcgccggcggtcgcggcgcttggcgcgctccggcggcggctgccgcgcgtggtcaccacccccgggctcatcgacgactcgccggcgtcgccgtccacgccgccgcggccgcgcaccatcatcgtggccaaccagctcccgatccggtcccaccgcccggagtcgccggaggagccctggaccttcgagtgggacgaggactccctcctccgccacctccaccactcgtcgtcccccctgatggagttcatctacatcggctgcctgcgcgacgacatcccgcaggccgagcaggacgccgtcgcgcaggcgctcctcgagacccacaactgcgtgccggccttcctgcccacggacatcgccgagcgctactaccacggcttctgcaagcagcacctgtggcccctcttccactacatgctgccgctgtcccccgacctcggcggccgcttcgaccgcgcgctgtggcaggcctacgtctcggccaacaagatcttcgcggacaaggtgctggaggtgatcaacccggacgacgacttcgtgtgggtgcacgactaccacctcatggtgctcccaaccttcctgcgcaagcgcttcaaccgcatcaagctcggcttcttcctgcactcgccgttcccctcgtccgagatctacaagacgctccccgtgcgcgaggagcttctgcgcgccctgctcaactccgacctcatcggcttccacaccttcgactacgcgcgccacttcctctcctgctgcggccggatgctcgggctctcgtacgagtccaagcgggggcacatttgcctcgagtactacggccgtacggtgagcatcaagatcctgcctgtgggggtgcacatggagcagctcaagacggtgctcgggttgccggagaccgaggccaaggtgtccgagctgatggagatgtactctggaaaggggagagtggtcatgctaggcgtcgacgacatggacatcttcaaggggatcagcctcaagctccttgccatggaggagcttctgcggcagcaccccgagtggcgggggaagctggtgctggtgcaggtggccaacccggcgcgagggagggggaaggacgtcgccgaggtgcagaccgagacgtacgccatggtgcggcgcatcaacgaggtgtacggtgagccggggtacgagccggtggtcctgatcgatgagcctctgcagttctacgagcgcgtggcctactacgtcatagccgaggtgtgcctggtgaccgcggtcagggacggcatgaacctgattccctatgagtacatcgtctcccggcaggggaacgagaagctggacaggatgctgcggcaggggaagccagaggagaagaagagcatgctggtggtgtccgagttcatcgggtgctcgccgtctctgagcggcgccatcagggtgaacccgtggaacatcgaggccgtggctgacgccatggagaccgcccttgtgctgcctgagaacgagaagaggctgcgccacgataagcacttccgctacgtgagcacccacgacgtcgggtactgggctaacagcttcctcctggaccttgagaggacctgcaagtatcattctcagaagaggtgctggggcattggcttcggcctgcggttcagagtggtctcgctcgacctgaccttcaggaagctttccttggagaacatccttatggcataccggagagccaagacacgggcaattctgctggactacgatggcacgctgatgccacaggcgattaacaagagcccgtcaactgaatctgtgcggatcctcaacagcctgtgccgagacaaggacaatgtggtgtacctatgcagcgggtatgaccggcgcacccttcatgagtggttcccttgtgagaaccttggcatagccgcggagcatggctacttcctgaggtgtaagagggacgcggaatggaagacctgtgtcgctgccacagactgcagctggaagcagatcgcggagccggtgatgtgcctgtacagggagacgacggacggctcaaccatcgaggacagggagacggtgctcgtgtggaactacgaggacgcggaccccgacttcgggtcgtgccaggccaaggagctcgtcgaccaccttgagagcgtgctcgcgaacgagcctgtgtcggtgaagaccacgcctcactcagttgaagtgaaaccgcagggcgtgagcaagggcttggtggcccggcgcatgcttgtgtcgatgaaggagcggggccagtgcccggacttcgtcctgtgcatcggcgacgacaagtccgacgaggacatgttccagctgatcgccaccgctgcctgcggggactcgctggcgtccaaggcggaggtgttcgcgtgcaccgtcggccgcaagcccagcaaggccaagtactacctcgacgacgcggcggaggtggtgaggctgatgcaggggctctcctacgtctccgaggagctggcgctggcgaaccagcgggatgaagacgaggactcctctctggacgacgtgtgggagtaggaaggagcgttcccttcccgtgctgctcctgcggtaatgtctgtttgtgttggctcggctggagctttcgccgagtagtttaggtgtgtaaatgaggtatgctttccagcgtaatgtattgccagtggtctagtctcgagagctggcttgaatctagtgatgctctagtactttggtttgtggtgctatttacctgatccgtggaaggcagtactatgagctatacaagatgcagacctgaaatctcattcatctgaagaccatgacctttctcctaggcgtgtgtatacgtctttggattttggaactaaccatcatgtgccagtattagaggagctcgtttttacgtgatgatcagtttttttggaactagcgcgaacaaaagctgcaagttcccaagttgcaggctttgcgaaggtctttgggcagagtgaaactttaggctgtgtccagcagtccgctaccgaaaa

SEQ ID NO: 207434 - DNA, 2386 bp, Zea Mays
cagatcttttctccttttcctctccttttcattttcctttcagtttttccgtggcgaagatactgttgcatttgtgggggcagtgctctgtgcctctgtctgagctgatcccagctgtgattgattgcttgctcatgggtcacggccatgaccatggcatcccctcctctgcaaaagcccgtgcctttggtgtcttgtcacgggcaaaagtggcgcatgttcattattatcccccctgcctttttgctttcgcaagccctgtatgtgtcctggccataaagatgcaatctttatcctctatgcacatacttcacccgaaaaaaagctaaaggggtcactgattggtgctgcttccttaaatcttgcatgtgtgggaactaggaggccattggtcacggggttgggtctgtgctcaggtgccagcaagatgcagggtgtgttgtcgagggtgaggaggcccttcactccgacgcagtggatggagctggagcaccaggccctgatctacaagcacttcgctgtgaatgcccctgtgccgtccagcttgctcctccctatcaaaagaagcctcaatccatggagcagccttggctccagctcattgggatgggcaccatttcgttccggctctgctgatgcagaaccaggaagatgccgccgcacagatggcaagaagtggcggtgctctagagatgctgtcggggaccaaaaatactgtgagcgacacataaaacgtggttgccaccgttcaagaaagcatgtggaaggccgaaaggcaacaccgaccactgcagatccaaccatggctgtttctggtggttcattgttgcacagccatgctgttgcttggcagcagcagggcaaaagctcagctgctaatgtgactgatccattctcactagggtccaacaggagaactgtgcatcatatattaaaagaagtaaaaaagtctaaagaagaccaaaatctgccataagaggcagaaagagataggaagtgggaggggcaccagcacactatattttctcaacataaatgacaatctatggttgatacatgtgccagtctagcagtcagggttcaggacgtaccaaaacattgaaaatgttatatcctttagacattgaaattttgtccatagccattcatagttgaaaattttgttcttgatttctttcaactggtcagtgatttcttcatgtaacctgtcattgatgcattccatcttttgccccgtgcccattcctatatataagattttattattatgtttgtttgttcaaacaattatggtaagcatgtgcaaagaaaggcagtaggaagcactataaataactgaaatgatatggtacttatgtcagtacaaactttagagataggtgaattctgttcatgatgaccctttcaaattttgacgacttactatagtcagcagtgaaagaaaaacaggacagtgtttccttttccttccatgaacttgaaatgttgactctggtttgcaggaatttgctggataagcagaatctaggtgaccagttctctgtatccacttccatggactcctttgacttctcatcatcacattcttccccaaaccaagccaaagttgcattttcaccggtggccatgcagcacgaacatgatcagctgtatcttgtgcatggagccggcagctcagcagaaaacgttaacaagtctcaggatggtcagctgctagtctcgagggaaacaattgacgacggacctctgggcgaggtgttcaagggcaagagttgccagtcagcatccgcagacatcttaactgaccattggacttcgactcgtgacttgcgtcctccaaccggagtcctacaaatgtctagcagcaacacagtgccagcagagaatcacacgagtaacagtagctatctcatggcgaggatggcgaattctcagaccgtcccaacactccactgagtgttcatcaggctggtctttgttgggaccacaaaataactgaagccatgttgatgtcctgagtttgctgatactaggttttcagtcgagtcttgtaactcctgttttagagctgttatatgttcacgtcatgtcgcctttcattttcggttcattcagatgggtgttctaataatttctttccttcttacctgtgaaggatttgagttccaatctgagacgtgggtttgttctaacttggaggtatttatgaatattaggcacttctgatttccattgaagcgagatttctttaaattgtcgaggctgtatttttttcaggcttttcaagtgctatactcttgaatgcttgatactgcctccgttctcgaatatttgtcgcctgttagttcatttttgaactaaaccgcaatagataaataaaaaagaa

SEQ ID NO: 207435 - DNA, 339 bp, Zea Mays
gccaaccccaacgaccaccgggcctcaattgttgacagtagcgtggacgcatcgtcatcattcgagcagaggggagagagagagagagagagagagagatgaaggagggcacggcgaactgcatcgacatcctcatcgccatcatcctcccgcctctcggcgtcttcctcaagttcggctgcaaggtcgaattctggctctgcctcctgctcaccttcctcgcctatctccccgggatcatctacgcgatatacgttatcaccaaggactagccagctagcgccgtaaaccgggacaaggtgagagagctagctgatcagccagcggagcggtgaggtc

SEQ ID NO: 207436 - DNA, 4109 bp, Zea Mays
ctctgaaccacgttgccacagccacatctactagctctccccaatccgaaccgaagccacacacccacaccatatctgcaccagccatcctcgtgatctctctgtctcccatcgccagccgccaccgcgccctcctcccaccggatttagaggcgattcatgggagtggtgcgcaggctgctactgcggtatcaatggaggctgactgccatggaggatctgagcatcgaggcgaaggaggccgcggtacgcataccccatcctccgtgtggcggcctccctccgagcacccacccgccccaccccctttcttctccctccatcgcgtcgtcatcatactacagaaagtacaaggaggacatgttgatggtctccatgatggaaggaccacgccgcacggagaagcccaccggtgtcatcttccgcaaggtccgctcggtcgtccatgtccgttcgtcctcttcctgggcggttggcgcgtgatctggcgagacctcccaatgggtcaaaatctattttgtgcttggcgatgtattccttaaggaccgccatgctcttctcctttggcgcggtcagctgcttcgacaaaggataccatactcattgttgatagcaaatgattgggttccctaaaccaggtttgcttttactcttggatcaagactcacctggctagccgagtagtcgtccatcgcgttttgaaggcagacaggaagttatggttagctgcaggttaaagcgaatgaaatgaaccatcatctgtaacaaggtgctatatcaatgacaagcagcaacaaagcgtaacacactaaaggcaagtttttttaacaacctttggtctaatatttgccattataatagcatatagttgtacttgtagaatataaatagcagatacaaaacataacaaagcatacctttagtatatcttgaaactatttagtgtataaataaaagtaccaattattcaaaacatatatcaaagtttcattccaacatctggcttgaatatgtagacaaaatgatttaaatagactaaccaatgatcaatgttagtggttctacttcagcaattgtaaagggatgcttattttttggtcacgatgcggtgtcgtgctttcagccgtggaattatgtttaatggagtggtcaaaatttatgccgccatgtcagtccactagatcagaagcatctgtgtcctgcggcagcatgatgggctcacctataaacaaatggataagccttccctgacccagaacagaagaggttcaatggctttggctcaagtctacgacatcttaaaccattttgtttgcagtcatgcacggagaagacagaggaattgcacccaacaagcccttgatatccaaggaccacgagcgtacctaatttgattctacagactgggtcgatctctctatgattaacaaacacaataaaaaaactatatgtactaatcgatttataatgtttgtatgtactaatcgatttataaggcttgtatatactaatcgattttataatgtagctgctaggaaaaattcagaactgaaataaaggacacaacaatttttgccacttcagcaacttcatagcatgttttccaacaaggatacaactccaagaagaacgatctcaaggtcgtgtgaatgttgccgctgagtactacaaacaacaggtagagatgttagagggttttagtgagatgggcgcatttacagatcatgctttcctacctgtaatgtccaaggaagaacacgaaaaagttatcaggagtgaaccattagccatatggttgtctaatattgcaaatatggttctctttgctgcaaaagtgtatgctttagtaaggagtggttcacttgctattatcgcatcaactttggattctcttctagactttttgtcacgatatatcttgtggtttactgccttttcaatgcaaacgccaaatccctatagaaacccaattggaaaaagcgtatgcagccgctggtgagttcttttttgccataacctgtacttccaaaaatgatggttgatgttgacatctagatctattgtccagaatgttttgtactcttttctgcgaaaatgatttacttatcttttacgtaatctgaattattgtctctgcattttgaatagaatgagcattgctttccatgtttctttctgaggcaaacaataaagatctgaattgacaggaaatcaataaacttactcaacactgtgtgctcactactcagtaattcttacttactggaatataaattacctgtctataaatactaattgttgagttcatgattgaagtcatagaaccatggaccctttttatccagtcacctctgtttgaattttctttaagttaatgatgaacttgttatgacttccaatttgacatttgcttttgagatgcgttgtcacttgttggggcaacttccatgtgtcaaacttttgtttgtcatgcctttttttcatattcttttttctttcaactttactgggattttctaatagatcgcctcttagttatattgttgatttgtgatccttccaaaaccatactatcacctaaaaatgatcagttcatccagcaatgttttgtttgtctatttcttgtcatggtgcacttattagaattgttgcccacttttactttttacatctgataatatgtttaagaaactatttttacttgattcttgacttgtagatacctttttatttctgtattgtatcccacaaactttcctgctagatattcagttgatgttttgtacttgtatataccttgtccacataaaacttgtgtgatatacttttatgaaattgatacatatgataggttgtttaatgttttagagaaatgctcttgataaccatagttggtcatatattatagttcatctacttaaacatattgtaccttttttacatctctcatttgagtacaactgtagtatttgttcataacatattgtagcttaaccagaacactaaagttcaaattccttacctttcaatgctcaaggtttttatgtcttgtacagtaaatgcggccatttttgtttggtttgagaaaaaaagatttttttgttttgtttgaggcaaattctcaactgtgctgcagtgtagtactgtagtggcaacattttacttctgtcacgttgcagcaggtggccccaaagatctgagcagcaattgtgatttagtgaattaatggtaaccctgcaataataatatctgttttatgacaacaactattgctaaagaattagatattgatgaatatcgtattgatatactatcaaattttagaaatatatttcgtttttcagaattattgttgaatgcaaacaaaacaatgagatatctatatatgtaacacaatttttcgtcatacttatttggttcagttgtgctctacgtttcaaagcagggctgtgatgattggttgttaaatgatgtaggttaagaccatataaacagttgtaattaaattctttgctatatagaaatcatagcaacgcacgggcacttaagaaacggagagggggaggccgttgtggctttgtgaagcgcttcgtcccgagcgggcgtgggcgggtatggcaccacacgtatcagccggctctgttgtggtattttaaaaaatattttaatttaatcaataacattcttaatttcttacgtacccattttaacctatatatctatactatattaaagcatcagtttcaacggtcgttctgcgtcatatttttacagataatccctcacatctatttcaaattaatacgctgcacgtctgtctgctctgcgcaaccaacctccacgttacaaaacacaactccatatatagatggctaaacagcggttcggcacggtcctgacgcccacgggccacaactctggcctaggcatggcgtgccggcctgctgactgtatcaggtcatttggttaaatcagtgtaaaatgttaaaaaagtagtgaggaggtggggttcgaacccacacattgatggaagaagggcggaagacactgagtgaagctatctaagcattagaacatcatgctcagatgtttttattattaaatataaa

SEQ ID NO: 207437 - DNA, 4261 bp, Zea Mays
ttgccctcatcgctgactctgaaccacgttgccacagccacatctactagctctccccaatccgaaccgaagccacacacccacaccatatctgcaccagccatcctcgtgatctctctgtctcccatcgccagccgccaccgcgccctcctcccaccggatttagaggcgattcatgggagtggtgcgcaggctgctactgcggtatcaatggaggctgactgccatggaggatctgagcatcgaggcgaaggaggccgcggtacgcataccccatcctccgtgtggcggcctccctccgagcacccacccgccccaccccctttcttctccctccatcgcgtcgtcatcatactacagaaagtacaaggaggacatgttgatggtctccatgatggaaggaccacgccgcacggagaagcccaccggtgtcatcttccgcaaggtccgctcggtcgtccatgtccgttcgtcctcttcctgggcggttggcgcgtgatctggcgagacctcccaatgggtcaaaatctattttgtgcttggcgatgtattccttaaggaccgccatgctcttctcctttggcgcggtcagctgcttcgacaaaggataccatactcattgttgatagcaaatgattgggttccctaaaccaggtttgcttttactcttggatcaagactcacctggctagccgagtagtcgtccatcgcgttttgaaggcagacaggaagttatggttagctgcaggttaaagcgaatgaaatgaaccatcatctgtaacaaggtgctatatcaatgacaagcagcaacaaagcgtaacacactaaaggcaagtttttttaacaacctttggtctaatatttgccattataatagcatatagttgtacttgtagaatataaatagcagatacaaaacataacaaagcatacctttagtatatcttgaaactatttagtgtataaataaaagtaccaattattcaaaacatatatcaaagtttcattccaacatctggcttgaatatgtagacaaaatgatttaaatagactaaccaatgatcaatgttagtggttctacttcagcaattgtaaagggatgcttattttttggtcacgatgcggtgtcgtgctttcagccgtggaattatgtttaatggagtggtcaaaatttatgccgccatgtcagtccactagatcagaagcatctgtgtcctgcggcagcatgatgggctcacctataaacaaatggataagccttccctgacccagaacagaagaggctttggctcaagtctacgacatcttaaaccattttgtttgcagtcatgcacggagaagacagaggaattgcacccaacaagcccttgatatccaaggaccacgagcgtacctaatttgattctacagactgggtcgatctctctatgattaacaaacacaataaaaaaactatatgtactaatcgatttataatgtttgtatgtactaatcgatttataaggcttgtatatactaatcgattttataatgtagctgctaggaaaaattcagaactgaaataaaggacacaacaatttttgccacttcagcaacttcatagcatgttttccaacaaggatacaactccaagaagaacgatctcaaggtcgtgtgaatgttgccgctgagtactacaaacaacaggtagagatgttagagggttttagtgagatgggcgcatttacagatcatgctttcctacctgtaatgtccaaggtatgttatatatggactttctgtttgaacattagggaaggtaacttatgtggatgttaataatcaaattttcttcactatattttttcttctttttaatagtgacgacatcaatagatatctggccactttattgacctgcaggaagaacacgaaaaagttatcaggagtgaaccattagccatatggttgtctaatattgcaaatatggttctctttgctgcaaaagtgtatgctttagtaaggagtggttcacttgctattatcgcatcaactttggattctcttctagactttttgtcacgatatatcttgtggtttactgccttttcaatgcaaacgccaaatccctatagaaacccaattggaaaaagcgtatgcagccgctggtgagttcttttttgccataacctgtacttccaaaaatgatggttgatgttgacatctagatctattgtccagaatgttttgtactcttttctgcgaaaatgatttacttatcttttacgtaatctgaattattgtctctgcattttgaatagaatgagcattgctttccatgtttctttctgaggcaaacaataaagatctgaattgacaggaaatcaataaacttactcaacactgtgtgctcactactcagtaattcttacttactggaatataaattacctgtctataaatactaattgttgagttcatgattgaagtcatagaaccatggaccctttttatccagtcacctctgtttgaattttctttaagttaatgatgaacttgttatgacttccaatttgacatttgcttttgagatgcgttgtcacttgttggggcaacttccatgtgtcaaacttttgtttgtcatgcctttttttcatattcttttttctttcaactttactgggattttctaatagatcgcctcttagttatattgttgatttgtgatccttccaaaaccatactatcacctaaaaatgatcagttcatccagcaatgttttgtttgtctatttcttgtcatggtgcacttattagaattgttgcccacttttactttttacatctgataatatgtttaagaaactatttttacttgattcttgacttgtagatacctttttatttctgtattgtatcccacaaactttcctgctagatattcagttgatgttttgtacttgtatataccttgtccacataaaacttgtgtgatatacttttatgaaattgatacatatgataggttgtttaatgttttagagaaatgctcttgataaccatagttggtcatatattatagttcatctacttaaacatattgtaccttttttacatctctcatttgagtacaactgtagtatttgttcataacatattgtagcttaaccagaacactaaagttcaaattccttacctttcaatgctcaaggtttttatgtcttgtacagtaaatgcggccatttttgtttggtttgagaaaaaaagatttttttgttttgtttgaggcaaattctcaactgtgctgcagtgtagtactgtagtggcaacattttacttctgtcacgttgcagcaggtggccccaaagatctgagcagcaattgtgatttagtgaattaatggtaaccctgcaataataatatctgttttatgacaacaactattgctaaagaattagatattgatgaatatcgtattgatatactatcaaattttagaaatatatttcgtttttcagaattattgttgaatgcaaacaaaacaatgagatatctatatatgtaacacaatttttcgtcatacttatttggttcagttgtgctctacgtttcaaagcagggctgtgatgattggttgttaaatgatgtaggttaagaccatataaacagttgtaattaaattctttgctatatagaaatcatagcaacgcacgggcacttaagaaacggagagggggaggccgttgtggctttgtgaagcgcttcgtcccgagcgggcgtgggcgggtatggcaccacacgtatcagccggctctgttgtggtattttaaaaaatattttaatttaatcaataacattcttaatttcttacgtacccattttaacctatatatctatactatattaaagcatcagtttcaacggtcgttctgcgtcatatttttacagataatccctcacatctatttcaaattaatacgctgcacgtctgtctgctctgcgcaaccaacctccacgttacaaaacacaactccatatatagatggctaaacagcggttcggcacggtcctgacgcccacgggccacaactctggcctaggcatggcgtgccggcctgctgactgtatcaggtcatttggttaaatcagtgtaaaatgttaaaaaagtagtgaggaggtggggttcgaacccacacattgatggaagaagggcggaagacactgagtgaagctatctaagcattagaacatcatgctcagatgtttttattattaaatataaa

SEQ ID NO: 207438 - DNA, 4808 bp, Zea Mays
cgcagacaagattgccctcatcgctgactctgaaccacgttgccacagccacatctactagctctccccaatccgaaccgaagccacacacccacaccatatctgcaccagccatcctcgtgatctctctgtctcccatcgccagccgccaccgcgccctcctcccaccggatttagaggcgattcatgggagtggtgcgcaggctgctactgcggtatcaatggaggctgactgccatggaggatctgagcatcgaggcgaaggaggccgcgaggacatgttgatggtctccatgatggaaggaccacgccgcacggagaagcccaccggtgtcatcttccgcaaggtccgctcggtcgtccatgtccgttcgtcctcttcctgggcggttggcgcgtgatctggcgagacctcccaatgggtcaaaatctattttgtgcttggcgatgtattccttaaggaccgccatgctcttctcctttggcgcggtcagctgcttcgacaaaggataccatactcattgttgatagcaaatgattgggttccctaaaccaggtttgcttttactcttggatcaagactcacctggctagccgagtagtcgtccatcgcgttttgaaggcagacaggaagttatggttagctgcaggttaaagcgaatgaaatgaaccatcatctgtaacaaggtgctatatcaatgacaagcagcaacaaagcgtaacacactaaagccgtggaattatgtttaatggagtggtcaaaatttatgccgccatgtcagtccactagatcagaagcatctgtgtcctgcggcagcatgatgggctcacctataaacaaatggataagccttccctgacccagaacagaagaggttcaatggttcggcatataacattagaagtcgattgttttttcctttattttttggagggcagattcatatttgggcgtttggcacaggctttggctcaagtctacgacatcttaaaccattttgtttgcagtcatgcacggagaagacagaggaattgcacccaacaagcccttgatatccaaggaccacgagcgtacctaatttgattctacagactgggtcgatctctctatgattaacaaacacaataaaaaaactatatctgctaggaaaaattcagaactgaaataaaggacacaacaatttttgccacttcagcaacttcatagcatgttttccaacaaggatacaactccaagaagaacgatgttggtctgttatgaccggtcgccactacaggcgccgggcaacagcataggcatgcagataaggattataagatgataatgattagaagattaaggagataagatttgttagagagaaaagagggaatttatctcattagataaggacaagaagggagtataaataattgtaagcaccactctatagggattaagcagaaacaagattgttctggcttcctagagggagccgggagattactgtgacctagccgcccctttcctcgcgtctctcatctcgcgcgcggtgaacacggcgccccgccgttgtgcatcgcgcctcaaaccccggccaccaatcacccaccactacaacctgagatcgatcagggaatccgccccgattcctatcatggtcattgtggatgagatggactatttaataacaagagattgtgttgtgctacatgatcttttaatgcttacaatttgttctatctctagatgcatattcataggtgaagtttattttctgtactgtttaatttctaaaaactagatgaactatcttgttcggttaattttctgtactattaaatttctgaaaactggagtttttgcatgtactaatttctatgtgatggtttctatgtgtgctatctgcatgtctctttaattatctctatatatctggttagacgacaaccttctatctatgaattatatgtcatgtctctttaattatctctatatcaatgtctacctatgtgatataagataccgtagcaacgcgcgtgcacctaattagtgaatttggaagtgtgactttataaaaacaaatgagttatatgttcaagataatgttaatagtcatactatttaaagtccttttactttcttatttggatgagtcttttttcacatatcttccttcttaatgtaccattcatggttctattgatagctcaaggtcgtgtgaatgttgccgctgagtactacaaacaacaggtagagatgttagagggttttagtgagatgggcgcatttacagatcatgctttcctacctgtaatgtccaaggtatgttatatatggactttctgtttgaacattagggaaggtaacttatgtggatgttaataatcaaattttcttcactatattttttcttctttttaatagtgacgacatcaatagatatctggccactttattgacctgcaggaagaacacgaaaaagttatcaggagtgaaccattagccatatggttgtctaatattgcaaatatggttctctttgctgcaaaagtgtatgctttagtaaggagtggttcacttgctattatcgcatcaactttggattctcttctagactttttgtcacgatatatcttgtggtttactgccttttcaatgcaaacgccaaatccctatagaaacccaattggaaaaagcgtatgcagccgctggtgagttcttttttgccataacctgtacttccaaaaatgatggttgatgttgacatctagatctattgtccagaatgttttgtactcttttctgcgaaaatgatttacttatcttttacgtaatctgaattattgtctctgcattttgaatagaatgagcattgctttccatgtttctttctgaggcaaacaataaagatctgaattgacaggaaatcaataaacttactcaacactgtgtgctcactactcagtaattcttacttactggaatataaattacctgtctataaatactaattgttgagttcatgattgaagtcatagaaccatggaccctttttatccagtcacctctgtttgaattttctttaagttaatgatgaacttgttatgacttccaatttgacatttgcttttgagatgcgttgtcacttgttggggcaacttccatgtgtcaaacttttgtttgtcatgcctttttttcatattcttttttctttcaactttactgggattttctaatagatcgcctcttagttatattgttgatttgtgatccttccaaaaccatactatcacctaaaaatgatcagttcatccagcaatgttttgtttgtctatttcttgtcatggtgcacttattagaattgttgcccacttttactttttacatctgataatatgtttaagaaactatttttacttgattcttgacttgtagatacctttttatttctgtattgtatcccacaaactttcctgctagatattcagttgatgttttgtacttgtatataccttgtccacataaaacttgtgtgatatacttttatgaaattgatacatatgataggttgtttaatgttttagagaaatgctcttgataaccatagttggtcatatattatagttcatctacttaaacatattgtaccttttttacatctctcatttgagtacaactgtagtatttgttcataacatattgtagcttaaccagaacactaaagttcaaattccttacctttcaatgctcaaggtttttatgtcttgtacagtaaatgcggccatttttgtttggtttgagaaaaaaagatttttttgttttgtttgaggcaaattctcaactgtgctgcagtgtagtactgtagtggcaacattttacttctgtcacgttgcagcaggtggccccaaagatctgagcagcaattgtgatttagtgaattaatggtaaccctgcaataataatatctgttttatgacaacaactattgctaaagaattagatattgatgaatatcgtattgatatactatcaaattttagaaatatatttcgtttttcagaattattgttgaatgcaaacaaaacaatgagatatctatatatgtaacacaatttttcgtcatacttatttggttcagttgtgctctacgtttcaaagcagggctgtgatgattggttgttaaatgatgtaggttaagaccatataaacagttgtaattaaattctttgctatatagaaatcatagcaacgcacgggcacttaagaaacggagagggggaggccgttgtggctttgtgaagcgcttcgtcccgagcgggcgtgggcgggtatggcaccacacgtatcagccggctctgttgtggtattttaaaaaatattttaatttaatcaataacattcttaatttcttacgtacccattttaacctatatatctatactatattaaagcatcagtttcaacggtcgttctgcgtcatatttttacagataatccctcacatctatttcaaattaatacgctgcacgtctgtctgctctgcgcaaccaacctccacgttacaaaacacaactccatatatagatggctaaacagcggttcggcacggtcctgacgcccacgggccacaactctggcctaggcatggcgtgccggcctgctgactgtatcaggtcatttggttaaatcagtgtaaaatgttaaaaaagtagtgaggaggtggggttcgaacccacacattgatggaagaagggcggaagacactgagtgaagctatctaagcattagaacatcatgctcagatgtttttattattaaatataaa

SEQ ID NO: 207439 - DNA, 3978 bp, Zea Mays
cctgtcttcgcctccacgccgcaccgcagacaagattgccctcatcgctgactctgaaccacgttgccacagccacatctactagctctccccaatccgaaccgaagccacacacccacaccatatctgcaccagccatcctcgtgatctctctgtctcccatcgccagccgccaccgcgccctcctcccaccggatttagaggcgattcatgggagtggtgcgcaggctgctactgcggtatcaatggaggctgactgccatggaggatctgagcatcgaggcgaaggaggccgcggtacgcataccccatcctccgtgtggcggcctccctccgagcacccacccgccccaccccctttcttctccctccatcgcgtcgtcatcatactacagaaagtacaaggaggacatgttgatggtctccatgatggaaggaccacgccgcacggagaagcccaccggtgtcatcttccgcaaggtccgctcggtcgtccatgtccgttcgtcctcttcctgggcggttggcgcgtgatctggcgagacctcccaatgggtcaaaatctattttgtgcttggcgatgtattccttaaggaccgccatgctcttctcctttggcgcggtcagctgcttcgacaaaggataccatactcattgttgatagcaaatgattgggttccctaaaccaggtttgcttttactcttggatcaagactcacctggctagccgagtagtcgtccatcgcgttttgaaggcagacaggaagttatggttagctgcaggttaaagcgaatgaaatgaaccatcatctgtaacaaggtgctatatcaatgacaagcagcaacaaagcgtaacacactaaaggcaagtttttttaacaacctttggtctaatatttgccattataatagcatatagttgtacttgtagaatataaatagcagatacaaaacataacaaagcatacctttagtatatcttgaaactatttagtgtataaataaaagtaccaattattcaaaacatatatcaaagtttcattccaacatctggcttgaatatgtagacaaaatgatttaaatagactaaccaatgatcaatgttagtggttctacttcagcaattgtaaagggatgcttattttttggtcacgatgcggtgtcgtgctttcagccgtggaattatgtttaatggagtggtcaaaatttatgccgccatgtcagtccactagatcagaagcatctgtgtcctgcggcagcatgatgggctcacctataaacaaatggataagccttccctgacccagaacagaagaggttcaatggttcggcatataacattagaagtcgattgttttttcctttattttttggagggcagattcatatttgggcgtttggcacaggctttggctcaagtctacgacatcttaaaccattttgtttgcagtcatgcacggagaagacagaggaattgcacccaacaagcccttgatatccaagctcaaggtcgtgtgaatgttgccgctgagtactacaaacaacaggtagagatgttagagggttttagtgagatgggcgcatttacagatcatgctttcctacctgtaatgtccaaggaagaacacgaaaaagttatcaggagtgaaccattagccatatggttgtctaatattgcaaatatggttctctttgctgcaaaagtgtatgctttagtaaggagtggttcacttgctattatcgcatcaactttggattctcttctagactttttgtcacgatatatcttgtggtttactgccttttcaatgcaaacgccaaatccctatagaaacccaattggaaaaagcgtatgcagccgctggtgagttcttttttgccataacctgtacttccaaaaatgatggttgatgttgacatctagatctattgtccagaatgttttgtactcttttctgcgaaaatgatttacttatcttttacgtaatctgaattattgtctctgcattttgaatagaatgagcattgctttccatgtttctttctgaggcaaacaataaagatctgaattgacaggaaatcaataaacttactcaacactgtgtgctcactactcagtaattcttacttactggaatataaattacctgtctataaatactaattgttgagttcatgattgaagtcatagaaccatggaccctttttatccagtcacctctgtttgaattttctttaagttaatgatgaacttgttatgacttccaatttgacatttgcttttgagatgcgttgtcacttgttggggcaacttccatgtgtcaaacttttgtttgtcatgcctttttttcatattcttttttctttcaactttactgggattttctaatagatcgcctcttagttatattgttgatttgtgatccttccaaaaccatactatcacctaaaaatgatcagttcatccagcaatgttttgtttgtctatttcttgtcatggtgcacttattagaattgttgcccacttttactttttacatctgataatatgtttaagaaactatttttacttgattcttgacttgtagatacctttttatttctgtattgtatcccacaaactttcctgctagatattcagttgatgttttgtacttgtatataccttgtccacataaaacttgtgtgatatacttttatgaaattgatacatatgataggttgtttaatgttttagagaaatgctcttgataaccatagttggtcatatattatagttcatctacttaaacatattgtaccttttttacatctctcatttgagtacaactgtagtatttgttcataacatattgtagcttaaccagaacactaaagttcaaattccttacctttcaatgctcaaggtttttatgtcttgtacagtaaatgcggccatttttgtttggtttgagaaaaaaagatttttttgttttgtttgaggcaaattctcaactgtgctgcagtgtagtactgtagtggcaacattttacttctgtcacgttgcagcaggtggccccaaagatctgagcagcaattgtgatttagtgaattaatggtaaccctgcaataataatatctgttttatgacaacaactattgctaaagaattagatattgatgaatatcgtattgatatactatcaaattttagaaatatatttcgtttttcagaattattgttgaatgcaaacaaaacaatgagatatctatatatgtaacacaatttttcgtcatacttatttggttcagttgtgctctacgtttcaaagcagggctgtgatgattggttgttaaatgatgtaggttaagaccatataaacagttgtaattaaattctttgctatatagaaatcatagcaacgcacgggcacttaagaaacggagagggggaggccgttgtggctttgtgaagcgcttcgtcccgagcgggcgtgggcgggtatggcaccacacgtatcagccggctctgttgtggtattttaaaaaatattttaatttaatcaataacattcttaatttcttacgtacccattttaacctatatatctatactatattaaagcatcagtttcaacggtcgttctgcgtcatatttttacagataatccctcacatctatttcaaattaatacgctgcacgtctgtctgctctgcgcaaccaacctccacgttacaaaacacaactccatatatagatggctaaacagcggttcggcacggtcctgacgcccacgggccacaactctggcctaggcatggcgtgccggcctgctgactgtatcaggtcatttggttaaatcagtgtaaaatgttaaaaaagtagtgaggaggtggggttcgaacccacacattgatggaagaagggcggaagacactgagtgaagctatctaagcattagaacatcatgctcagatgtttttattattaaatataaa

SEQ ID NO: 207440 - DNA, 3626 bp, Zea Mays
ctcatctcctgtcttcgcctccacgccgcaccgcagacaagattgccctcatcgctgactctgaaccacgttgccacagccacatctactagctctccccaatccgaaccgaagccacacacccacaccatatctgcaccagccatcctcgtgatctctctgtctcccatcgccagccgccaccgcgccctcctcccaccggatttagaggcgattcatgggagtggtgcgcaggctgctactgcggtatcaatggaggctgactgccatggaggatctgagcatcgaggcgaaggaggccgcggtacgcataccccatcctccgtgtggcggcctccctccgagcacccacccgccccaccccctttcttctccctccatcgcgtcgtcatcatactacagaaagtacaaggaggacatgttgatggtctccatgatggaaggaccacgccgcacggagaagcccaccggtgtcatcttccgcaaggtccgctcggtcgtccatgtccgttcgtcctcttcctgggcggttggcgcgtgatctggcgagacctcccaatgggtcaaaatctattttgtgcttggcgatgtattccttaaggaccgccatgctcttctcctttggcgcggtcagctgcttcgacaaaggataccatactcattgttgatagcaaatgattgggttccctaaaccaggtttgcttttactcttggatcaagactcacctggctagccgagtagtcgtccatcgcgttttgaaggcagacaggaagttatggttagctgcaggttaaagcgaatgaaatgaaccatcatctgtaacaaggtgctatatcaatgacaagcagcaacaaagcgtaacacactaaaggcaagtttttttaacaacctttggtctaatatttgccattataatagcatatagttgtacttgtagaatataaatagcagatacaaaacataacaaagcatacctttagtatatcttgaaactatttagtgtataaataaaagtaccaattattcaaaacatatatcaaagtttcattccaacatctggcttgaatatgtagacaaaatgatttaaatagactaaccaatgatcaatgttagtggttctacttcagcaattgtaaagggatgcttattttttggtcacgatgcggtgtcgtgctttcagccgtggaattatgtttaatggagtggtcaaaatttatgccgccatgtcagtccactagatcagaagcatctgtgtcctgcggcagcatgatgggctcacctataaacaaatggataagccttccctgacccagaacagaagaggttcaatggctttggctcaagtctacgacatcttaaaccattttgtttgcagtcatgcacggagaagacagaggaattgcacccaacaagcccttgatatccaaggaccacgagcgtacctaatttgattctacagactgggtcgatctctctatgattaacaaacacaataaaaaaactatatgtactaatcgatttataatgtttgtatgtactaatcgatttataaggcttgtatatactaatcgattttataatgtagctgctaggaaaaattcagaactgaaataaaggacacaacaatttttgccacttcagcaacttcatagcatgttttccaacaaggatacaactccaagaagaacgatgttggtctgttatgaccggtcgccactacaggcgccgggcaacagcataggcatgcagataaggattataagatgataatgattagaagattaaggagataagatttgttagagagaaaagagggaatttatctcattagataaggacaagaagggagtataaataattgtaagcaccactctatagggattaagcagaaacaagattgttctggcttcctagagggagccgggagattactgtgacctagccgcccctttcctcgcgtctctcatctcgcgcgcggtgaacacggcgccccgccgttgtgcatcgcgcctcaaaccccggccaccaatcacccaccactacaacctgagatcgatcagggaatccgccccgattcctatcatggtcattgtggatgagatggactatttaataacaagagattgtgttgtgctacatgatcttttaatgcttacaatttgttctatctctagatgcatattcataggtgaagtttattttctgtactgtttaatttctaaaaactagatgaactatcttgttcggttaattttctgtactattaaatttctgaaaactggagtttttgcatgtactaatttctatgtgatggtttctatgtgtgctatctgcatgtctctttaattatctctatatatctggttagacgacaaccttctatctatgaattatatgtcatgtctctttaattatctctatatcaatgtctacctatgtgatataagataccgtagcaacgcgcgtgcacctaattagtgaatttggaagtgtgactttataaaaacaaatgagttatatgttcaagataatgttaatagtcatactatttaaagtccttttactttcttatttggatgagtcttttttcacatatcttccttcttaatgtaccattcatggttctattgatagctcaaggtcgtgtgaatgttgccgctgagtactacaaacaacaggtagagatgttagagggttttagtgagatgggcgcatttacagatcatgctttcctacctgtaatgtccaagtgacgacatcaatagatatctggccactttattgacctgcaggaagaacacgaaaaagttatcaggagtgaaccattagccatatggttgtctaatattgcaaatatggttctctttgctgcaaaagtgtatgctttagtaaggagtggttcacttgctattatcgcatcaactttggattctcttctagactttttgtcacgatatatcttgtggtttactgccttttcaatgcaaacgccaaatccctatagaaacccaattggaaaaagcgtatgcagccgctgaaatcatagcaacgcacgggcacttaagaaacggagagggggaggccgttgtggctttgtgaagcgcttcgtcccgagcgggcgtgggcgggtatggcaccacacgtatcagccggctctgttgtggtattttaaaaaatattttaatttaatcaataacattcttaatttcttacgtacccattttaacctatatatctatactatattaaagcatcagtttcaacggtcgttctgcgtcatatttttacagataatccctcacatctatttcaaattaatacgctgcacgtctgtctgctctgcgcaaccaacctccacgttacaaaacacaactccatatatagatggctaaacagcggttcggcacggtcctgacgcccacgggccacaactctggcctaggcatggcgtgccggcctgctgactgtatcaggtcatttggttaaatcagtgtaaaatgttaaaaaagtagtgaggaggtggggttcgaacccacacattgatggaagaagggcggaagacactgagtgaagctatctaagcattagaacatcatgctcagatgtttttattattaaatataaa

SEQ ID NO: 207441 - DNA, 4642 bp, Zea Mays
ctcatctcctgtcttcgcctccacgccgcaccgcagacaagattgccctcatcgctgactctgaaccacgttgccacagccacatctactagctctccccaatccgaaccgaagccacacacccacaccatatctgcaccagccatcctcgtgatctctctgtctcccatcgccagccgccaccgcgccctcctcccaccggatttagaggcgattcatgggagtggtgcgcaggctgctactgcggtatcaatggaggctgactgccatggaggatctgagcatcgaggcgaaggaggccgcggtacgcataccccatcctccgtgtggcggcctccctccgagcacccacccgccccaccccctttcttctccctccatcgcgtcgtcatcatactacagaaagtacaaggaggacatgttgatggtctccatgatggaaggaccacgccgcacggagaagcccaccggtgtcatcttccgcaaggttaaagcgaatgaaatgaaccatcatctgtaacaaggtgctatatcaatgacaagcagcaacaaagcgtaacacactaaagccgtggaattatgtttaatggagtggtcaaaatttatgccgccatgtcagtccactagatcagaagcatctgtgtcctgcggcagcatgatgggctcacctataaacaaatggataagccttccctgacccagaacagaagaggttcaatggctttggctcaagtctacgacatcttaaaccattttgtttgcagtcatgcacggagaagacagaggaattgcacccaacaagcccttgatatccaaggaccacgagcgtacctaatttgattctacagactgggtcgatctctctatgattaacaaacacaataaaaaaactatatgtactaatcgatttataatgtttgtatgtactaatcgatttataaggcttgtatatactaatcgattttataatgtagctgctaggaaaaattcagaactgaaataaaggacacaacaatttttgccacttcagcaacttcatagcatgttttccaacaaggatacaactccaagaagaacgatgttggtctgttatgaccggtcgccactacaggcgccgggcaacagcataggcatgcagataaggattataagatgataatgattagaagattaaggagataagatttgttagagagaaaagagggaatttatctcattagataaggacaagaagggagtataaataattgtaagcaccactctatagggattaagcagaaacaagattgttctggcttcctagagggagccgggagattactgtgacctagccgcccctttcctcgcgtctctcatctcgcgcgcggtgaacacggcgccccgccgttgtgcatcgcgcctcaaaccccggccaccaatcacccaccactacaacctgagatcgatcagggaatccgccccgattcctatcatggtcattgtggatgagatggactatttaataacaagagattgtgttgtgctacatgatcttttaatgcttacaatttgttctatctctagatgcatattcataggtgaagtttattttctgtactgtttaatttctaaaaactagatgaactatcttgttcggttaattttctgtactattaaatttctgaaaactggagtttttgcatgtactaatttctatgtgatggtttctatgtgtgctatctgcatgtctctttaattatctctatatatctggttagacgacaaccttctatctatgaattatatgtcatgtctctttaattatctctatatcaatgtctacctatgtgatataagataccgtagcaacgcgcgtgcacctaattagtgaatttggaagtgtgactttataaaaacaaatgagttatatgttcaagataatgttaatagtcatactatttaaagtccttttactttcttatttggatgagtcttttttcacatatcttccttcttaatgtaccattcatggttctattgatagctcaaggtcgtgtgaatgttgccgctgagtactacaaacaacaggtagagatgttagagggttttagtgagatgggcgcatttacagatcatgctttcctacctgtaatgtccaaggtatgttatatatggactttctgtttgaacattagggaaggtaacttatgtggatgttaataatcaaattttcttcactatattttttcttctttttaatagtgacgacatcaatagatatctggccactttattgacctgcaggaagaacacgaaaaagttatcaggagtgaaccattagccatatggttgtctaatattgcaaatatggttctctttgctgcaaaagtgtatgctttagtaaggagtggttcacttgctattatcgcatcaactttggattctcttctagactttttgtcacgatatatcttgtggtttactgccttttcaatgcaaacgccaaatccctatagaaacccaattggaaaaagcgtatgcagccgctggtgagttcttttttgccataacctgtacttccaaaaatgatggttgatgttgacatctagatctattgtccagaatgttttgtactcttttctgcgaaaatgatttacttatcttttacgtaatctgaattattgtctctgcattttgaatagaatgagcattgctttccatgtttctttctgaggcaaacaataaagatctgaattgacaggaaatcaataaacttactcaacactgtgtgctcactactcagtaattcttacttactggaatataaattacctgtctataaatactaattgttgagttcatgattgaagtcatagaaccatggaccctttttatccagtcacctctgtttgaattttctttaagttaatgatgaacttgttatgacttccaatttgacatttgcttttgagatgcgttgtcacttgttggggcaacttccatgtgtcaaacttttgtttgtcatgcctttttttcatattcttttttctttcaactttactgggattttctaatagatcgcctcttagttatattgttgatttgtgatccttccaaaaccatactatcacctaaaaatgatcagttcatccagcaatgttttgtttgtctatttcttgtcatggtgcacttattagaattgttgcccacttttactttttacatctgataatatgtttaagaaactatttttacttgattcttgacttgtagatacctttttatttctgtattgtatcccacaaactttcctgctagatattcagttgatgttttgtacttgtatataccttgtccacataaaacttgtgtgatatacttttatgaaattgatacatatgataggttgtttaatgttttagagaaatgctcttgataaccatagttggtcatatattatagttcatctacttaaacatattgtaccttttttacatctctcatttgagtacaactgtagtatttgttcataacatattgtagcttaaccagaacactaaagttcaaattccttacctttcaatgctcaaggtttttatgtcttgtacagtaaatgcggccatttttgtttggtttgagaaaaaaagatttttttgttttgtttgaggcaaattctcaactgtgctgcagtgtagtactgtagtggcaacattttacttctgtcacgttgcagcaggtggccccaaagatctgagcagcaattgtgatttagtgaattaatggtaaccctgcaataataatatctgttttatgacaacaactattgctaaagaattagatattgatgaatatcgtattgatatactatcaaattttagaaatatatttcgtttttcagaattattgttgaatgcaaacaaaacaatgagatatctatatatgtaacacaatttttcgtcatacttatttggttcagttgtgctctacgtttcaaagcagggctgtgatgattggttgttaaatgatgtaggttaagaccatataaacagttgtaattaaattctttgctatatagaaatcatagcaacgcacgggcacttaagaaacggagagggggaggccgttgtggctttgtgaagcgcttcgtcccgagcgggcgtgggcgggtatggcaccacacgtatcagccggctctgttgtggtattttaaaaaatattttaatttaatcaataacattcttaatttcttacgtacccattttaacctatatatctatactatattaaagcatcagtttcaacggtcgttctgcgtcatatttttacagataatccctcacatctatttcaaattaatacgctgcacgtctgtctgctctgcgcaaccaacctccacgttacaaaacacaactccatatatagatggctaaacagcggttcggcacggtcctgacgcccacgggccacaactctggcctaggcatggcgtgccggcctgctgactgtatcaggtcatttggttaaatcagtgtaaaatgttaaaaaagtagtgaggaggtggggttcgaacccacacattgatggaagaagggcggaagacactgagtgaagctatctaagcattagaacatcatgctcagatgtttttattattaaatataaa

SEQ ID NO: 207442 - DNA, 4463 bp, Zea Mays
ctctcatctcctgtcttcgcctccacgccgcaccgcagacaagattgccctcatcgctgactctgaaccacgttgccacagccacatctactagctctccccaatccgaaccgaagccacacacccacaccatatctgcaccagccatcctcgtgatctctctgtctcccatcgccagccgccaccgcgccctcctcccaccggatttagaggcgattcatgggagtggtgcgcaggctgctactgcggtatcaatggaggctgactgccatggaggatctgagcatcgaggcgaaggaggccgcgaggacatgttgatggtctccatgatggaaggaccacgccgcacggagaagcccaccggtgtcatcttccgcaaggtccgctcggtcgtccatgtccgttcgtcctcttcctgggcggttggcgcgtgatctggcgagacctcccaatgggtcaaaatctattttgtgcttggcgatgtattccttaaggaccgccatgctcttctcctttggcgcggtcagctgcttcgacaaaggataccatactcattgttgatagcaaatgattgggttccctaaaccaggtttgcttttactcttggatcaagactcacctggctagccgagtagtcgtccatcgcgttttgaaggcagacaggaagttatggttagctgcaggttaaagcgaatgaaatgaaccatcatctgtaacaaggtgctatatcaatgacaagcagcaacaaagcgtaacacactaaagtcatgcacggagaagacagaggaattgcacccaacaagcccttgatatccaaggaccacgagcgtacctaatttgattctacagactgggtcgatctctctatgattaacaaacacaataaaaaaactatatctgctaggaaaaattcagaactgaaataaaggacacaacaatttttgccacttcagcaacttcatagcatgttttccaacaaggatacaactccaagaagaacgatgttggtctgttatgaccggtcgccactacaggcgccgggcaacagcataggcatgcagataaggattataagatgataatgattagaagattaaggagataagatttgttagagagaaaagagggaatttatctcattagataaggacaagaagggagtataaataattgtaagcaccactctatagggattaagcagaaacaagattgttctggcttcctagagggagccgggagattactgtgacctagccgcccctttcctcgcgtctctcatctcgcgcgcggtgaacacggcgccccgccgttgtgcatcgcgcctcaaaccccggccaccaatcacccaccactacaacctgagatcgatcagggaatccgccccgattcctatcatggtcattgtggatgagatggactatttaataacaagagattgtgttgtgctacatgatcttttaatgcttacaatttgttctatctctagatgcatattcataggtgaagtttattttctgtactgtttaatttctaaaaactagatgaactatcttgttcggttaattttctgtactattaaatttctgaaaactggagtttttgcatgtactaatttctatgtgatggtttctatgtgtgctatctgcatgtctctttaattatctctatatatctggttagacgacaaccttctatctatgaattatatgtcatgtctctttaattatctctatatcaatgtctacctatgtgatataagataccgtagcaacgcgcgtgcacctaattagtgaatttggaagtgtgactttataaaaacaaatgagttatatgttcaagataatgttaatagtcatactatttaaagtccttttactttcttatttggatgagtcttttttcacatatcttccttcttaatgtaccattcatggttctattgatagctcaaggtcgtgtgaatgttgccgctgagtactacaaacaacaggtagagatgttagagggttttagtgagatgggcgcatttacagatcatgctttcctacctgtaatgtccaagtgacgacatcaatagatatctggccactttattgacctgcaggaagaacacgaaaaagttatcaggagtgaaccattagccatatggttgtctaatattgcaaatatggttctctttgctgcaaaagtgtatgctttagtaaggagtggttcacttgctattatcgcatcaactttggattctcttctagactttttgtcacgatatatcttgtggtttactgccttttcaatgcaaacgccaaatccctatagaaacccaattggaaaaagcgtatgcagccgctggtgagttcttttttgccataacctgtacttccaaaaatgatggttgatgttgacatctagatctattgtccagaatgttttgtactcttttctgcgaaaatgatttacttatcttttacgtaatctgaattattgtctctgcattttgaatagaatgagcattgctttccatgtttctttctgaggcaaacaataaagatctgaattgacaggaaatcaataaacttactcaacactgtgtgctcactactcagtaattcttacttactggaatataaattacctgtctataaatactaattgttgagttcatgattgaagtcatagaaccatggaccctttttatccagtcacctctgtttgaattttctttaagttaatgatgaacttgttatgacttccaatttgacatttgcttttgagatgcgttgtcacttgttggggcaacttccatgtgtcaaacttttgtttgtcatgcctttttttcatattcttttttctttcaactttactgggattttctaatagatcgcctcttagttatattgttgatttgtgatccttccaaaaccatactatcacctaaaaatgatcagttcatccagcaatgttttgtttgtctatttcttgtcatggtgcacttattagaattgttgcccacttttactttttacatctgataatatgtttaagaaactatttttacttgattcttgacttgtagatacctttttatttctgtattgtatcccacaaactttcctgctagatattcagttgatgttttgtacttgtatataccttgtccacataaaacttgtgtgatatacttttatgaaattgatacatatgataggttgtttaatgttttagagaaatgctcttgataaccatagttggtcatatattatagttcatctacttaaacatattgtaccttttttacatctctcatttgagtacaactgtagtatttgttcataacatattgtagcttaaccagaacactaaagttcaaattccttacctttcaatgctcaaggtttttatgtcttgtacagtaaatgcggccatttttgtttggtttgagaaaaaaagatttttttgttttgtttgaggcaaattctcaactgtgctgcagtgtagtactgtagtggcaacattttacttctgtcacgttgcagcaggtggccccaaagatctgagcagcaattgtgatttagtgaattaatggtaaccctgcaataataatatctgttttatgacaacaactattgctaaagaattagatattgatgaatatcgtattgatatactatcaaattttagaaatatatttcgtttttcagaattattgttgaatgcaaacaaaacaatgagatatctatatatgtaacacaatttttcgtcatacttatttggttcagttgtgctctacgtttcaaagcagggctgtgatgattggttgttaaatgatgtaggttaagaccatataaacagttgtaattaaattctttgctatatagaaatcatagcaacgcacgggcacttaagaaacggagagggggaggccgttgtggctttgtgaagcgcttcgtcccgagcgggcgtgggcgggtatggcaccacacgtatcagccggctctgttgtggtattttaaaaaatattttaatttaatcaataacattcttaatttcttacgtacccattttaacctatatatctatactatattaaagcatcagtttcaacggtcgttctgcgtcatatttttacagataatccctcacatctatttcaaattaatacgctgcacgtctgtctgctctgcgcaaccaacctccacgttacaaaacacaactccatatatagatggctaaacagcggttcggcacggtcctgacgcccacgggccacaactctggcctaggcatggcgtgccggcctgctgactgtatcaggtcatttggttaaatcagtgtaaaatgttaaaaaagtagtgaggaggtggggttcgaacccacacattgatggaagaagggcggaagacactgagtgaagctatctaagcattagaacatcatgctcagatgtttttattattaaatataaa

SEQ ID NO: 207443 - DNA, 4665 bp, Zea Mays
ctctcatctcctgtcttcgcctccacgccgcaccgcagacaagattgccctcatcgctgactctgaaccacgttgccacagccacatctactagctctccccaatccgaaccgaagccacacacccacaccatatctgcaccagccatcctcgtgatctctctgtctcccatcgccagccgccaccgcgccctcctcccaccggatttagaggcgattcatgggagtggtgcgcaggctgctactgcggtatcaatggaggctgactgccatggaggatctgagcatcgaggcgaaggaggccgcggtacgcataccccatcctccgtgtggcggcctccctccgagcacccacccgccccaccccctttcttctccctccatcgcgtcgtcatcatactacagaaagtacaaggaggacatgttgatggtctccatgatggaaggaccacgccgcacggagaagcccaccggtgtcatcttccgcaaggtccgctcggtcgtccatgtccgttcgtcctcttcctgggcggttggcgcgtgatctggcgagacctcccaatgggtcaaaatctattttgtgcttggcgatgtattccttaaggaccgccatgctcttctcctttggcgcggtcagctgcttcgacaaaggataccatactcattgttgatagcaaatgattgggttccctaaaccaggttaaagcgaatgaaatgaaccatcatctgtaacaaggtgctatatcaatgacaagcagcaacaaagcgtaacacactaaagccgtggaattatgtttaatggagtggtcaaaatttatgccgccatgtcagtccactagatcagaagcatctgtgtcctgcggcagcatgatgggctcacctataaacaaatggataagccttccctgacccagaacagaagaggctttggctcaagtctacgacatcttaaaccattttgtttgcagtcatgcacggagaagacagaggaattgcacccaacaagcccttgatatccaaggaccacgagcgtacctaatttgattctacagactgggtcgatctctctatgattaacaaacacaataaaaaaactatatctgctaggaaaaattcagaactgaaataaaggacacaacaatttttgccacttcagcaacttcatagcatgttttccaacaaggatacaactccaagaagaacgatgttggtctgttatgaccggtcgccactacaggcgccgggcaacagcataggcatgcagataaggattataagatgataatgattagaagattaaggagataagatttgttagagagaaaagagggaatttatctcattagataaggacaagaagggagtataaataattgtaagcaccactctatagggattaagcagaaacaagattgttctggcttcctagagggagccgggagattactgtgacctagccgcccctttcctcgcgtctctcatctcgcgcgcggtgaacacggcgccccgccgttgtgcatcgcgcctcaaaccccggccaccaatcacccaccactacaacctgagatcgatcagggaatccgccccgattcctatcatggtcattgtggatgagatggactatttaataacaagagattgtgttgtgctacatgatcttttaatgcttacaatttgttctatctctagatgcatattcataggtgaagtttattttctgtactgtttaatttctaaaaactagatgaactatcttgttcggttaattttctgtactattaaatttctgaaaactggagtttttgcatgtactaatttctatgtgatggtttctatgtgtgctatctgcatgtctctttaattatctctatatatctggttagacgacaaccttctatctatgaattatatgtcatgtctctttaattatctctatatcaatgtctacctatgtgatataagataccgtagcaacgcgcgtgcacctaattagtgaatttggaagtgtgactttataaaaacaaatgagttatatgttcaagataatgttaatagtcatactatttaaagtccttttactttcttatttggatgagtcttttttcacatatcttccttcttaatgtaccattcatggttctattgatagctcaaggtcgtgtgaatgttgccgctgagtactacaaacaacaggtagagatgttagagggttttagtgagatgggcgcatttacagatcatgctttcctacctgtaatgtccaagtgacgacatcaatagatatctggccactttattgacctgcaggaagaacacgaaaaagttatcaggagtgaaccattagccatatggttgtctaatattgcaaatatggttctctttgctgcaaaagtgtatgctttagtaaggagtggttcacttgctattatcgcatcaactttggattctcttctagactttttgtcacgatatatcttgtggtttactgccttttcaatgcaaacgccaaatccctatagaaacccaattggaaaaagcgtatgcagccgctggtgagttcttttttgccataacctgtacttccaaaaatgatggttgatgttgacatctagatctattgtccagaatgttttgtactcttttctgcgaaaatgatttacttatcttttacgtaatctgaattattgtctctgcattttgaatagaatgagcattgctttccatgtttctttctgaggcaaacaataaagatctgaattgacaggaaatcaataaacttactcaacactgtgtgctcactactcagtaattcttacttactggaatataaattacctgtctataaatactaattgttgagttcatgattgaagtcatagaaccatggaccctttttatccagtcacctctgtttgaattttctttaagttaatgatgaacttgttatgacttccaatttgacatttgcttttgagatgcgttgtcacttgttggggcaacttccatgtgtcaaacttttgtttgtcatgcctttttttcatattcttttttctttcaactttactgggattttctaatagatcgcctcttagttatattgttgatttgtgatccttccaaaaccatactatcacctaaaaatgatcagttcatccagcaatgttttgtttgtctatttcttgtcatggtgcacttattagaattgttgcccacttttactttttacatctgataatatgtttaagaaactatttttacttgattcttgacttgtagatacctttttatttctgtattgtatcccacaaactttcctgctagatattcagttgatgttttgtacttgtatataccttgtccacataaaacttgtgtgatatacttttatgaaattgatacatatgataggttgtttaatgttttagagaaatgctcttgataaccatagttggtcatatattatagttcatctacttaaacatattgtaccttttttacatctctcatttgagtacaactgtagtatttgttcataacatattgtagcttaaccagaacactaaagttcaaattccttacctttcaatgctcaaggtttttatgtcttgtacagtaaatgcggccatttttgtttggtttgagaaaaaaagatttttttgttttgtttgaggcaaattctcaactgtgctgcagtgtagtactgtagtggcaacattttacttctgtcacgttgcagcaggtggccccaaagatctgagcagcaattgtgatttagtgaattaatggtaaccctgcaataataatatctgttttatgacaacaactattgctaaagaattagatattgatgaatatcgtattgatatactatcaaattttagaaatatatttcgtttttcagaattattgttgaatgcaaacaaaacaatgagatatctatatatgtaacacaatttttcgtcatacttatttggttcagttgtgctctacgtttcaaagcagggctgtgatgattggttgttaaatgatgtaggttaagaccatataaacagttgtaattaaattctttgctatatagaaatcatagcaacgcacgggcacttaagaaacggagagggggaggccgttgtggctttgtgaagcgcttcgtcccgagcgggcgtgggcgggtatggcaccacacgtatcagccggctctgttgtggtattttaaaaaatattttaatttaatcaataacattcttaatttcttacgtacccattttaacctatatatctatactatattaaagcatcagtttcaacggtcgttctgcgtcatatttttacagataatccctcacatctatttcaaattaatacgctgcacgtctgtctgctctgcgcaaccaacctccacgttacaaaacacaactccatatatagatggctaaacagcggttcggcacggtcctgacgcccacgggccacaactctggcctaggcatggcgtgccggcctgctgactgtatcaggtcatttggttaaatcagtgtaaaatgttaaaaaagtagtgaggaggtggggttcgaacccacacattgatggaagaagggcggaagacactgagtgaagctatctaagcattagaacatcatgctcagatgtttttattattaaatataaa

SEQ ID NO: 207444 - DNA, 3815 bp, Zea Mays
ctttctctcatctcctgtcttcgcctccacgccgcaccgcagacaagattgccctcatcgctgactctgaaccacgttgccacagccacatctactagctctccccaatccgaaccgaagccacacacccacaccatatctgcaccagccatcctcgtgatctctctgtctcccatcgccagccgccaccgcgccctcctcccaccggatttagaggcgattcatgggagtggtgcgcaggctgctactgcggtatcaatggaggctgactgccatggaggatctgagcatcgaggcgaaggaggccgcggtacgcataccccatcctccgtgtggcggcctccctccgagcacccacccgccccaccccctttcttctccctccatcgcgtcgtcatcatactacagaaagtacaaggaggacatgttgatggtctccatgatggaaggaccacgccgcacggagaagcccaccggtgtcatcttccgcaaggtccgctcggtcgtccatgtccgttcgtcctcttcctgggcggttggcgcgtgatctggcgagacctcccaatgggtcaaaatctattttgtgcttggcgatgtattccttaaggaccgccatgctcttctcctttggcgcggtcagctgcttcgacaaaggataccatactcattgttgatagcaaatgattgggttccctaaaccaggttaaagcgaatgaaatgaaccatcatctgtaacaaggtgctatatcaatgacaagcagcaacaaagcgtaacacactaaagccgtggaattatgtttaatggagtggtcaaaatttatgccgccatgtcagtccactagatcagaagcatctgtgtcctgcggcagcatgatgggctcacctataaacaaatggataagccttccctgacccagaacagaagaggttcaatggttcggcatataacattagaagtcgattgttttttcctttattttttggagggcagattcatatttgggcgtttggcacaggctttggctcaagtctacgacatcttaaaccattttgtttgcagtcatgcacggagaagacagaggaattgcacccaacaagcccttgatatccaaggaccacgagcgtacctaatttgattctacagactgggtcgatctctctatgattaacaaacacaataaaaaaactatatctgctaggaaaaattcagaactgaaataaaggacacaacaatttttgccacttcagcaacttcatagcatgttttccaacaaggatacaactccaagaagaacgatctcaaggtcgtgtgaatgttgccgctgagtactacaaacaacaggtagagatgttagagggttttagtgagatgggcgcatttacagatcatgctttcctacctgtaatgtccaagtgacgacatcaatagatatctggccactttattgacctgcaggaagaacacgaaaaagttatcaggagtgaaccattagccatatggttgtctaatattgcaaatatggttctctttgctgcaaaagtgtatgctttagtaaggagtggttcacttgctattatcgcatcaactttggattctcttctagactttttgtcacgatatatcttgtggtttactgccttttcaatgcaaacgccaaatccctatagaaacccaattggaaaaagcgtatgcagccgctggtgagttcttttttgccataacctgtacttccaaaaatgatggttgatgttgacatctagatctattgtccagaatgttttgtactcttttctgcgaaaatgatttacttatcttttacgtaatctgaattattgtctctgcattttgaatagaatgagcattgctttccatgtttctttctgaggcaaacaataaagatctgaattgacaggaaatcaataaacttactcaacactgtgtgctcactactcagtaattcttacttactggaatataaattacctgtctataaatactaattgttgagttcatgattgaagtcatagaaccatggaccctttttatccagtcacctctgtttgaattttctttaagttaatgatgaacttgttatgacttccaatttgacatttgcttttgagatgcgttgtcacttgttggggcaacttccatgtgtcaaacttttgtttgtcatgcctttttttcatattcttttttctttcaactttactgggattttctaatagatcgcctcttagttatattgttgatttgtgatccttccaaaaccatactatcacctaaaaatgatcagttcatccagcaatgttttgtttgtctatttcttgtcatggtgcacttattagaattgttgcccacttttactttttacatctgataatatgtttaagaaactatttttacttgattcttgacttgtagatacctttttatttctgtattgtatcccacaaactttcctgctagatattcagttgatgttttgtacttgtatataccttgtccacataaaacttgtgtgatatacttttatgaaattgatacatatgataggttgtttaatgttttagagaaatgctcttgataaccatagttggtcatatattatagttcatctacttaaacatattgtaccttttttacatctctcatttgagtacaactgtagtatttgttcataacatattgtagcttaaccagaacactaaagttcaaattccttacctttcaatgctcaaggtttttatgtcttgtacagtaaatgcggccatttttgtttggtttgagaaaaaaagatttttttgttttgtttgaggcaaattctcaactgtgctgcagtgtagtactgtagtggcaacattttacttctgtcacgttgcagcaggtggccccaaagatctgagcagcaattgtgatttagtgaattaatggtaaccctgcaataataatatctgttttatgacaacaactattgctaaagaattagatattgatgaatatcgtattgatatactatcaaattttagaaatatatttcgtttttcagaattattgttgaatgcaaacaaaacaatgagatatctatatatgtaacacaatttttcgtcatacttatttggttcagttgtgctctacgtttcaaagcagggctgtgatgattggttgttaaatgatgtaggttaagaccatataaacagttgtaattaaattctttgctatatagaaatcatagcaacgcacgggcacttaagaaacggagagggggaggccgttgtggctttgtgaagcgcttcgtcccgagcgggcgtgggcgggtatggcaccacacgtatcagccggctctgttgtggtattttaaaaaatattttaatttaatcaataacattcttaatttcttacgtacccattttaacctatatatctatactatattaaagcatcagtttcaacggtcgttctgcgtcatatttttacagataatccctcacatctatttcaaattaatacgctgcacgtctgtctgctctgcgcaaccaacctccacgttacaaaacacaactccatatatagatggctaaacagcggttcggcacggtcctgacgcccacgggccacaactctggcctaggcatggcgtgccggcctgctgactgtatcaggtcatttggttaaatcagtgtaaaatgttaaaaaagtagtgaggaggtggggttcgaacccacacattgatggaagaagggcggaagacactgagtgaagctatctaagcattagaacatcatgctcagatgtttttattattaaatataaa

SEQ ID NO: 207445 - DNA, 4908 bp, Zea Mays
cctctttctctcatctcctgtcttcgcctccacgccgcaccgcagacaagattgccctcatcgctgactctgaaccacgttgccacagccacatctactagctctccccaatccgaaccgaagccacacacccacaccatatctgcaccagccatcctcgtgatctctctgtctcccatcgccagccgccaccgcgccctcctcccaccggatttagaggcgattcatgggagtggtgcgcaggctgctactgcggtatcaatggaggctgactgccatggaggatctgagcatcgaggcgaaggaggccgcgaggacatgttgatggtctccatgatggaaggaccacgccgcacggagaagcccaccggtgtcatcttccgcaaggtccgctcggtcgtccatgtccgttcgtcctcttcctgggcggttggcgcgtgatctggcgagacctcccaatgggtcaaaatctattttgtgcttggcgatgtattccttaaggaccgccatgctcttctcctttggcgcggtcagctgcttcgacaaaggataccatactcattgttgatagcaaatgattgggttccctaaaccaggttaaagcgaatgaaatgaaccatcatctgtaacaaggtgctatatcaatgacaagcagcaacaaagcgtaacacactaaaggcaagtttttttaacaacctttggtctaatatttgccattataatagcatatagttgtacttgtagaatataaatagcagatacaaaacataacaaagcatacctttagtatatcttgaaactatttagtgtataaataaaagtaccaattattcaaaacatatatcaaagtttcattccaacatctggcttgaatatgtagacaaaatgatttaaatagactaaccaatgatcaatgttagtggttctacttcagcaattgtaaagggatgcttattttttggtcacgatgcggtgtcgtgctttcagccgtggaattatgtttaatggagtggtcaaaatttatgccgccatgtcagtccactagatcagaagcatctgtgtcctgcggcagcatgatgggctcacctataaacaaatggataagccttccctgacccagaacagaagaggctttggctcaagtctacgacatcttaaaccattttgtttgcagtcatgcacggagaagacagaggaattgcacccaacaagcccttgatatccaaggaccacgagcgtacctaatttgattctacagactgggtcgatctctctatgattaacaaacacaataaaaaaactatatgtactaatcgatttataatgtttgtatgtactaatcgatttataaggcttgtatatactaatcgattttataatgtagctgctaggaaaaattcagaactgaaataaaggacacaacaatttttgccacttcagcaacttcatagcatgttttccaacaaggatacaactccaagaagaacgatgttggtctgttatgaccggtcgccactacaggcgccgggcaacagcataggcatgcagataaggattataagatgataatgattagaagattaaggagataagatttgttagagagaaaagagggaatttatctcattagataaggacaagaagggagtataaataattgtaagcaccactctatagggattaagcagaaacaagattgttctggcttcctagagggagccgggagattactgtgacctagccgcccctttcctcgcgtctctcatctcgcgcgcggtgaacacggcgccccgccgttgtgcatcgcgcctcaaaccccggccaccaatcacccaccactacaacctgagatcgatcagggaatccgccccgattcctatcatggtcattgtggatgagatggactatttaataacaagagattgtgttgtgctacatgatcttttaatgcttacaatttgttctatctctagatgcatattcataggtgaagtttattttctgtactgtttaatttctaaaaactagatgaactatcttgttcggttaattttctgtactattaaatttctgaaaactggagtttttgcatgtactaatttctatgtgatggtttctatgtgtgctatctgcatgtctctttaattatctctatatatctggttagacgacaaccttctatctatgaattatatgtcatgtctctttaattatctctatatcaatgtctacctatgtgatataagataccgtagcaacgcgcgtgcacctaattagtgaatttggaagtgtgactttataaaaacaaatgagttatatgttcaagataatgttaatagtcatactatttaaagtccttttactttcttatttggatgagtcttttttcacatatcttccttcttaatgtaccattcatggttctattgatagctcaaggtcgtgtgaatgttgccgctgagtactacaaacaacaggtagagatgttagagggttttagtgagatgggcgcatttacagatcatgctttcctacctgtaatgtccaaggaagaacacgaaaaagttatcaggagtgaaccattagccatatggttgtctaatattgcaaatatggttctctttgctgcaaaagtgtatgctttagtaaggagtggttcacttgctattatcgcatcaactttggattctcttctagactttttgtcacgatatatcttgtggtttactgccttttcaatgcaaacgccaaatccctatagaaacccaattggaaaaagcgtatgcagccgctggtgagttcttttttgccataacctgtacttccaaaaatgatggttgatgttgacatctagatctattgtccagaatgttttgtactcttttctgcgaaaatgatttacttatcttttacgtaatctgaattattgtctctgcattttgaatagaatgagcattgctttccatgtttctttctgaggcaaacaataaagatctgaattgacaggaaatcaataaacttactcaacactgtgtgctcactactcagtaattcttacttactggaatataaattacctgtctataaatactaattgttgagttcatgattgaagtcatagaaccatggaccctttttatccagtcacctctgtttgaattttctttaagttaatgatgaacttgttatgacttccaatttgacatttgcttttgagatgcgttgtcacttgttggggcaacttccatgtgtcaaacttttgtttgtcatgcctttttttcatattcttttttctttcaactttactgggattttctaatagatcgcctcttagttatattgttgatttgtgatccttccaaaaccatactatcacctaaaaatgatcagttcatccagcaatgttttgtttgtctatttcttgtcatggtgcacttattagaattgttgcccacttttactttttacatctgataatatgtttaagaaactatttttacttgattcttgacttgtagatacctttttatttctgtattgtatcccacaaactttcctgctagatattcagttgatgttttgtacttgtatataccttgtccacataaaacttgtgtgatatacttttatgaaattgatacatatgataggttgtttaatgttttagagaaatgctcttgataaccatagttggtcatatattatagttcatctacttaaacatattgtaccttttttacatctctcatttgagtacaactgtagtatttgttcataacatattgtagcttaaccagaacactaaagttcaaattccttacctttcaatgctcaaggtttttatgtcttgtacagtaaatgcggccatttttgtttggtttgagaaaaaaagatttttttgttttgtttgaggcaaattctcaactgtgctgcagtgtagtactgtagtggcaacattttacttctgtcacgttgcagcaggtggccccaaagatctgagcagcaattgtgatttagtgaattaatggtaaccctgcaataataatatctgttttatgacaacaactattgctaaagaattagatattgatgaatatcgtattgatatactatcaaattttagaaatatatttcgtttttcagaattattgttgaatgcaaacaaaacaatgagatatctatatatgtaacacaatttttcgtcatacttatttggttcagttgtgctctacgtttcaaagcagggctgtgatgattggttgttaaatgatgtaggttaagaccatataaacagttgtaattaaattctttgctatatagaaatcatagcaacgcacgggcacttaagaaacggagagggggaggccgttgtggctttgtgaagcgcttcgtcccgagcgggcgtgggcgggtatggcaccacacgtatcagccggctctgttgtggtattttaaaaaatattttaatttaatcaataacattcttaatttcttacgtacccattttaacctatatatctatactatattaaagcatcagtttcaacggtcgttctgcgtcatatttttacagataatccctcacatctatttcaaattaatacgctgcacgtctgtctgctctgcgcaaccaacctccacgttacaaaacacaactccatatatagatggctaaacagcggttcggcacggtcctgacgcccacgggccacaactctggcctaggcatggcgtgccggcctgctgactgtatcaggtcatttggttaaatcagtgtaaaatgttaaaaaagtagtgaggaggtggggttcgaacccacacattgatggaagaagggcggaagacactgagtgaagctatctaagcattagaacatcatgctcagatgtttttattattaaatataaa

SEQ ID NO: 207446 - DNA, 4236 bp, Zea Mays
cctctttctctcatctcctgtcttcgcctccacgccgcaccgcagacaagattgccctcatcgctgactctgaaccacgttgccacagccacatctactagctctccccaatccgaaccgaagccacacacccacaccatatctgcaccagccatcctcgtgatctctctgtctcccatcgccagccgccaccgcgccctcctcccaccggatttagaggcgattcatgggagtggtgcgcaggctgctactgcggtatcaatggaggctgactgccatggaggatctgagcatcgaggcgaaggaggccgcgaggacatgttgatggtctccatgatggaaggaccacgccgcacggagaagcccaccggtgtcatcttccgcaaggtccgctcggtcgtccatgtccgttcgtcctcttcctgggcggttggcgcgtgatctggcgagacctcccaatgggtcaaaatctattttgtgcttggcgatgtattccttaaggaccgccatgctcttctcctttggcgcggtcagctgcttcgacaaaggataccatactcattgttgatagcaaatgattgggttccctaaaccaggtttgcttttactcttggatcaagactcacctggctagccgagtagtcgtccatcgcgttttgaaggcagacaggaagttatggttagctgcaggttaaagcgaatgaaatgaaccatcatctgtaacaaggtgctatatcaatgacaagcagcaacaaagcgtaacacactaaaggcaagtttttttaacaacctttggtctaatatttgccattataatagcatatagttgtacttgtagaatataaatagcagatacaaaacataacaaagcatacctttagtatatcttgaaactatttagtgtataaataaaagtaccaattattcaaaacatatatcaaagtttcattccaacatctggcttgaatatgtagacaaaatgatttaaatagactaaccaatgatcaatgttagtggttctacttcagcaattgtaaagggatgcttattttttggtcacgatgcggtgtcgtgctttcagccgtggaattatgtttaatggagtggtcaaaatttatgccgccatgtcagtccactagatcagaagcatctgtgtcctgcggcagcatgatgggctcacctataaacaaatggataagccttccctgacccagaacagaagaggttcaatggctttggctcaagtctacgacatcttaaaccattttgtttgcagtcatgcacggagaagacagaggaattgcacccaacaagcccttgatatccaaggaccacgagcgtacctaatttgattctacagactgggtcgatctctctatgattaacaaacacaataaaaaaactatatgtactaatcgatttataatgtttgtatgtactaatcgatttataaggcttgtatatactaatcgattttataatgtagctgctaggaaaaattcagaactgaaataaaggacacaacaatttttgccacttcagcaacttcatagcatgttttccaacaaggatacaactccaagaagaacgatgttggtctgttatgaccggtcgccactacaggcgccgggcaacagcataggcatgcagataaggattataagatgataatgattagaagattaaggagataagatttgttagagagaaaagagggaatttatctcattagataaggacaagaagggagtataaataattctcaaggtcgtgtgaatgttgccgctgagtactacaaacaacaggtagagatgttagagggttttagtgagatgggcgcatttacagatcatgctttcctacctgtaatgtccaaggaagaacacgaaaaagttatcaggagtgaaccattagccatatggttgtctaatattgcaaatatggttctctttgctgcaaaagtgtatgctttagtaaggagtggttcacttgctattatcgcatcaactttggattctcttctagactttttgtcacgatatatcttgtggtttactgccttttcaatgcaaacgccaaatccctatagaaacccaattggaaaaagcgtatgcagccgctggtgagttcttttttgccataacctgtacttccaaaaatgatggttgatgttgacatctagatctattgtccagaatgttttgtactcttttctgcgaaaatgatttacttatcttttacgtaatctgaattattgtctctgcattttgaatagaatgagcattgctttccatgtttctttctgaggcaaacaataaagatctgaattgacaggaaatcaataaacttactcaacactgtgtgctcactactcagtaattcttacttactggaatataaattacctgtctataaatactaattgttgagttcatgattgaagtcatagaaccatggaccctttttatccagtcacctctgtttgaattttctttaagttaatgatgaacttgttatgacttccaatttgacatttgcttttgagatgcgttgtcacttgttggggcaacttccatgtgtcaaacttttgtttgtcatgcctttttttcatattcttttttctttcaactttactgggattttctaatagatcgcctcttagttatattgttgatttgtgatccttccaaaaccatactatcacctaaaaatgatcagttcatccagcaatgttttgtttgtctatttcttgtcatggtgcacttattagaattgttgcccacttttactttttacatctgataatatgtttaagaaactatttttacttgattcttgacttgtagatacctttttatttctgtattgtatcccacaaactttcctgctagatattcagttgatgttttgtacttgtatataccttgtccacataaaacttgtgtgatatacttttatgaaattgatacatatgataggttgtttaatgttttagagaaatgctcttgataaccatagttggtcatatattatagttcatctacttaaacatattgtaccttttttacatctctcatttgagtacaactgtagtatttgttcataacatattgtagcttaaccagaacactaaagttcaaattccttacctttcaatgctcaaggtttttatgtcttgtacagtaaatgcggccatttttgtttggtttgagaaaaaaagatttttttgttttgtttgaggcaaattctcaactgtgctgcagtgtagtactgtagtggcaacattttacttctgtcacgttgcagcaggtggccccaaagatctgagcagcaattgtgatttagtgaattaatggtaaccctgcaataataatatctgttttatgacaacaactattgctaaagaattagatattgatgaatatcgtattgatatactatcaaattttagaaatatatttcgtttttcagaattattgttgaatgcaaacaaaacaatgagatatctatatatgtaacacaatttttcgtcatacttatttggttcagttgtgctctacgtttcaaagcagggctgtgatgattggttgttaaatgatgtaggttaagaccatataaacagttgtaattaaattctttgctatatagaaatcatagcaacgcacgggcacttaagaaacggagagggggaggccgttgtggctttgtgaagcgcttcgtcccgagcgggcgtgggcgggtatggcaccacacgtatcagccggctctgttgtggtattttaaaaaatattttaatttaatcaataacattcttaatttcttacgtacccattttaacctatatatctatactatattaaagcatcagtttcaacggtcgttctgcgtcatatttttacagataatccctcacatctatttcaaattaatacgctgcacgtctgtctgctctgcgcaaccaacctccacgttacaaaacacaactccatatatagatggctaaacagcggttcggcacggtcctgacgcccacgggccacaactctggcctaggcatggcgtgccggcctgctgactgtatcaggtcatttggttaaatcagtgtaaaatgttaaaaaagtagtgaggaggtggggttcgaacccacacattgatggaagaagggcggaagacactgagtgaagctatctaagcattagaacatcatgctcagatgtttttattattaaatataaa

SEQ ID NO: 207447 - DNA, 1999 bp, Zea Mays
cgaatgcggctggaggcagcccggcccagcacagcagacactccgccacgtcaccgtcgccatggcgctgcaccacctccgcctcgcgccgctcgcgctccttcgcgccgcaagcctcccgcccctcgcctcctcccgtatcgccgcgcgcggccaccgccgcgttctcctctttgcgccgccgtcgtggccgtggcgccttctgtcgcccggtgcgaggccgcgcgcgcttgccaccgctgcggcagaggccgacgatgctacctcgggctcgggcaacgaattcttcgcagagagcacgtcgtgggcttcactcggcgtatccgaacgcctcgcgtccgccctttgcagtgccgggctctcgaggccttcccttgtccaggcaacctgtataccacatgttctcatggcaaatgatgtaattgtcgcagcagagactggtagtggcaaaacccatggttaccttgtacctttgattgaaaagctgtgctcaaaatcttctaccaccaaagatgacaattgtcaggacaccaccccaggagcacatgacatggtgttggtcctttgtcccaatgtcatgctctgcgagcaagttgttcgcatggctaattcattacttgacgagtctggcaaaccacttaaaagagctgctgctgtttgtgggccaaatggctggccagctgttcatccagatattcttgtagccaccccagctgctctattaaactatctatttgactatgacccggaaaagaggcgaagagagagattcatgcgtaatgtaaaatttgtagtgtttgatgaagcagacatgctactctgtggaagttttgagaaccaggtcattcgtctcatcaatatgttgagatttgatgaaaagctactttctagagcacaggattctggaaaggatatatcacttgggagtgatgatgaatatcatgaggattcaaagtttgagactgctgaatttggtagttctgacaaggaaattgaagacaatattgtggaagatagacttgtcaagttggagaatagtcacgttggagcacacaaggactggaggagagttagaaaaatatacagacgcagcaagcagtatgtctttgttgctgccacccttcctcagagtgggaaaaaaactgctggtggtgtgctacaacgtatgtttccggatgctgtatgggttagtggcacttatctgcaccgtcacaaccccagttaaatatggcctgaagagtgaagttcatgatgctaaagatgttccaagacgcactatggtctttacaaacaccgttgatgctgctaattcagtctctgatatattgcatcgagttggtattccatgtattttgtaccatcgtgagagttccttgaaggagcgggctaacaatttacagtcttttcgggaaaatggtggtgtgcttgtatgcactgatgctgctgcccgtgggcttgatgttccaaatgtttctcatgtcattcaggcagaatttgctgcctgtgctgttgattttttgcacagggtgggccgcacagccagagctggtcaatctggtatagttactagcctatacacagaggcaaatcgtgatcttgtaagagcagttcgtcaagcagaggagttggctcagccagtggagggagcattcagcaggaaaagaagctttcgcaacaaactaaagaagcaagcattacaaaaacgcgaagcactgctatcttgatagcgtgactcactatatttgtagtaaggagaaaatatatgttttttttctctattactgggtgatgaatgtttttgtagtactatatagaaagctgctacatattaaatagaagttgtattcagaccgagtgcgttgaagtaatctgaccaacatgtagtctcttggataattatatccttatggcgttttcgtggtatttttaccgcattattgcaagtgattacaagtatttttgagaaaattaactatatggccaaaaaaagtctgcctta

SEQ ID NO: 207448 - DNA, 2606 bp, Zea Mays
cgttgaagcacagctgcacagatctcatatcgcggtagtctagtaatacaataaaccgttgaagcttggttgtgcagaaggtgtcgttgcattgagctgagccgcggtacgtggaggagcatgtggaggttaaagatcggagagggaagagggccgtggatgcagacggtgagcgacttccatggccggcaggtttgggagtacgacccggacgccggcaccgaggaggagcgcagcaaggtggagcagcttcgccgggagttcacagagaaccgcttccgaaggagggaatcgcaggacctcctcatgcgtatgcagttaactggacaaaaacatctgcatgcggacgatatgggagcggccaccaagatagaggatggcgacgaggtgacggaggagaggttgcgggagtcgctgaggcgagcgctggggtggatgtctgctctccaagctgaagatggccactggcctggtgatttcagtgggattatgtacattatgccgttctggattttcgccctgcacatcacaggatccatcgatgttgtcctatcgaaagagcatagacgtgagatctgccgccatatctacaaccatcagaacgaggacggaggatggggcttcaacatcttagatgagagcgccatgttttccacatgcttaaactacaccgccctgagacttctgggtgaggtgcagcaggaggagaacgatgggctagctaaaggtcgagcatggatcctatcccatggaactgcaactgcagcaccgcagtgggcaaaaatactactctcggttattggtgtatatgattggcgtggcaataatccagttgtacctgaactgtggttggtaccacgtttcctcccaattcacccagggcggttctggtgtttcactaggattacatacatgtcaatagctttcctttatggcaaaaaattcattggtcccattacaccaactatattagaactaagggaggaactctacagtttgccttatgttcagatagattggagtaaagctcgtaattcttgtgccaaggaggacatacgcaataaaccttcagaaatattcaaatttatttcaacatgcttgaacatgttcgtggagcctgtgttgaactattggccacttaacaagttaagagagagagctttgaaccacattctggaacatatccactacgaagatgaaactactcaatatattggcatatctcccgttacaaaggcactaaacatgatttgttgctgggttgaaaacccaaattcagatgcgctcaagcgacatattccaaggatacatgattatttgtggattgctgaagatggaatgaacaccaaaatatacgatggtacccacaactgggagttagcacttataatccaggccatgttatcagcagatgctgccaatgagtatggtccaaccattcagagggctatggaatacttaaagagagcacaagttactacaaaccctccagggaacccaagttactggttccggcataggtcaaaaggatcatggccactttccactatagacaatggctggggctcatcggatactagtgcggaagcaactaagaacaaagatggttcagtttctacatttgaatgtcaaagaacttattcttggctagagattctgaatcctttggagagttttcgaaatattgtcgctgattacccgacggttgaatgtacatcctcggtgttgcaggcattggtattatttgaggaattcaattcagagtaccgcagtaaagaaataaaagaaaatgttaagaaagctgccatatatattgagaataatcaaaacaaggatggatcctggtacggcacatggggaatatgttttgtctatgggactctctatgcaataaaaggcttagttgctgctgggagaaattatgagaacagtatttgcattaggaaagcatgtaactttttgctctcaatacaactcaaaactggtggctgggcagagagctatcattcctgtgaaagacaggtttatgtagagggtcatagcactcatgttgtacaaactgcttgggcgatgctagctttgatttatactggacagatggaacgggacccaacaccattacatcgagcagcaaaagtattgattaatatgcaactggagacaggagactatgctcaacaagaacatgttggtagcaccaactgctctgtatacttcaactaccccaactatcgtattttgttccctgtttgggctcttggagagtatcatcgcaaagtatgtaccaaaagtaattgaaaggaacccatggaatgcaaaaatgtcatatgtagtactatgttacatactaaaggaaaatcatagcggagtcgatataatcaattgtactttatataatgaaatgtaaatgggtagccacatacatgatttcaatggaccatgtagtgatgtctaacatttgattatgatgtatgtacactagtatgaatacgccaaatcgcaaataagtaacaattcagtttatgtgtaatcaaattgtctagacattgaaatttttcgggtttaacatttgcatgtgtagttgttcctttagaaatgatttccaa

SEQ ID NO: 207449 - DNA, 2718 bp, Zea Mays
tctaccttcagaacgttgaagcacagctgcacagatctcatatcgcggtagtctagtaatacaataaaccgttgaagcttggttgtgcagaaggtgtcgttgcattgagctgagccgcggtacgtggaggagcatgtggaggttaaagatcggagagggaagagggccgtggatgcagacggtgagcgacttccatggccggcaggtttgggagtacgacccggacgccggcaccgaggaggagcgcagcaaggtggagcagcttcgccgggagttcacagagaaccgcttccgaaggagggaatcgcaggacctcctcatgcgtatgcagttaactggacaaaaacatctgcatgcggacgatatgggagcggccaccaagatagaggatggcgacgaggtgacggaggagaggttgcgggagtcgctgaggcgagcgctggggtggatgtctgctctccaagctgaagatggccactggcctggtgatttcagtgggattatgtacattatgccgttctggattttcgccctgcacatcacaggatccatcgatgttgtcctatcgaaagagcatagacgtgagatctgccgccatatctacaaccatcagaacgaggacggaggatggggcttcaacatcttagatgagagcgccatgttttccacatgcttaaactacaccgccctgagacttctgggtgaggtgcagcaggaggagaacgatgggctagctaaaggtcgagcatggatcctatcccatggaactgcaactgcagcaccgcagtgggcaaaaatactactctcggttattggtgtatatgattggcgtggcaataatccagttgtacctgaactgtggttggtaccacgtttcctcccaattcacccagggcggttctggtgtttcactaggattacatacatgtcaatagctttcctttatggcaaaaaattcattggtcccattacaccaactatattagaactaagggaggaactctacagtttgccttatgttcagatagattggagtaaagctcgtaattcttgtgccaaggaggacatacgcaataaaccttcagaaatattcaaatttatttcaacatgcttgaacatgttcgtggagcctgtgttgaactattggccacttaacaagttaagagagagagctttgaaccacattctggaacatatccactacgaagatgaaactactcaatatattggcatatctcccgttacaaaggcactaaacatgatttgttgctgggttgaaaacccaaattcagatgcgctcaagcgacatattccaaggatacatgattatttgtggattgctgaagatggaatgaacaccaaaatatacgatggtacccacaactgggagttagcacttataatccaggccatgttatcagcagatgctgccaatgagtatggtccaaccattcagagggctatggaatacttaaagagagcacaagttactacaaaccctccagggaacccaagttactggttccggcataggtcaaaaggatcatggccactttccactatagacaatggctggggctcatcggatactagtgcggaagcaactaaggcacttttgatgttttccaaggtatatcccaacctcgttgaaaattcaaatggagatgagtggatgttgaatgctgttgattgccttctttcatttatgaacaaagatggttcagtttctacatttgaatgtcaaagaacttattcttggctagagattctgaatcctttggagagttttcgaaatattgtcgctgattacccgacggttgaatgtacatcctcggtgttgcaggcattggtattatttgaggaattcaattcagagtaccgcagtaaagaaataaaagaaaatgttaagaaagctgccatatatattgagaataatcaaaacaaggatggatcctggtacggcacatggggaatatgttttgtctatgggactctctatgcaataaaaggcttagttgctgctgggagaaattatgagaacagtatttgcattaggaaagcatgtaactttttgctctcaatacaactcaaaactggtggctgggcagagagctatcattcctgtgaaagacaggtttatgtagagggtcatagcactcatgttgtacaaactgcttgggcgatgctagctttgatttatactggacagatggaacgggacccaacaccattacatcgagcagcaaaagtattgattaatatgcaactggagacaggagactatgctcaacaagaacatgttggtagcaccaactgctctgtatacttcaactaccccaactatcgtattttgttccctgtttgggctcttggagagtatcatcgcaaagtatgtaccaaaagtaattgaaaggaacccatggaatgcaaaaatgtcatatgtagtactatgttacatactaaaggaaaatcatagcggagtcgatataatcaattgtactttatataatgaaatgtaaatgggtagccacatacatgatttcaatggaccatgtagtgatgtctaacatttgattatgatgtatgtacactagtatgaatacgccaaatcgcaaataagtaacaattcagtttatgtgtaatcaaattgtctagacattgaaatttttcgggtttaacatttgcatgtgtagttgttcctttagaaatgatttccaa

SEQ ID NO: 207450 - DNA, 677 bp, Zea Mays
cacagatctcatatcgcggtagtctagtaatacaataaaccgttgaagcttggttgtgcagaaggtgtcgttgcattgagctgagccgcggtacgtggaggagcatgtggaggttaaagatcggagagggaagagggccgtggatgcagacggtgagcgacttccatggccggcaggtttgggagtacgacccggacgccggcaccgaggaggagcgcagcaaggtggagcagcttcgccgggagttcacagagaaccgcttccgaaggagggaatcgcaggacctcctcatgcgtatgcagttaactggacaaaaacatctgcatgcggacgatatgggagcggccaccaagatagaggatggcgacgaggtgacggaggagaggttgcgggagtcgctgaggcgagcgctggggtggatgtctgctctccaagctgaagatggccactggcctggtgatttcagtgggattatgtacattatgccgttctggattttcgccctgcacatcacaggatccatcgatgttgtcctatcgaaagagcatagacgtgagatctgccgccatatctacaaccatcaggttattggtgtatatgattggcgtggcaataatccagttgtacctgaactgtggttggtaccacgtttcctcccaattcacccaggtcactag

SEQ ID NO: 207451 - DNA, 1534 bp, Zea Mays
atcgagatggcgatggtggaatttactcgggtgtttcctcaacgagagttcacagggattttggacaagcaacaatgctcaccgccgccgtttggaatgctcatgcggaagcagcggaaccatggacatcataccatttggaagtgattatgtgtgtgaagattcatcagcatctgaatatattgtttctaatggacttcatcacaggtaaggatagaacttgtaaaggtttgtaagttgcaagatgtgtttattttctgagataaatgttcctaggctggatgatgcttcaaaccttgaggagcaatgttttgaccacacaatagatgaaccaccaatgaactaccacgaggaaacagaccagcatgttcttgaacctctcagtgctagcaacactagtaacaactctgctttccctcctagtttcaaccaaatgctgaaaagttgttcaattgattatgaccaaggtgaactaatttctgaagaagatttacgttgaagtacaatatcagtatttggattttgttggtctataaccttaataatacaatgtaaatctaatacagaggaaccctgtccattggctgcatcaaaccatgtccttcaagaggtgtatgtgctggatacttctcatgatgttgccaatgaagaaaggactgctggtaaaggaatggatgctgctgaaggagttgatgccagtatattaacatatgacctaatggcacggataaagacatatatggctgatgaatcctttaatgatatgttgctcaagcttgataaagccattgatgaacttggtggtgacatgtcgctgtagatagcaaaacctcttctgcggtgaaggaatgcaggcgtgcttcgtggcaccctacagcacatttctcaaaagttcagattgtgaagcaacagtatagttacatatggttatacatagtagatagatagtgtctatatagattacgtgcaaagataaaaattcagtactatccactgctttttgccaataatttacaatacatgcaaagttcaaaatacagacattttgcaaccatgctcatgtttatctagatgattaaacagtagcaggttctttcattgctaaatgcttggcaacaggtgatcacacatgcgaaagaactgcctcagagtactcccaactatatccaagctgctgtaagtacctttgttgatgcacatgcacctttatggaaaggaaaagtatggtccttacagctacggtggatggaaaatcggaaagtgggtaaattcctttgctatcgtgttaataatagattcaggagtgatttaaagcgcagagtccaaatttctgaaagtttgatttgatttgatttgcatgtttagggtttagggccagtatgtgtacgtttgaagtggcaaacaacttaatcatgtaggatgtgtttggttgcctagttctgagcctggctcagtgagagaactaggctcaagagagcccgcatgtgatgaggtaacctaagatgtttggttggctgatcaaagtaagcctggc

SEQ ID NO: 207452 - DNA, 1328 bp, Zea Mays
cggaatttgggctgaccatgacccattggattggcaacaactgcaattaccacatggaatgctcatgcggaagcagcggaaccatggacatcataccatttggaagtgattatgtgtgtgaagattcatcagcatctgaatatattgtttctaatggacttcatcacaggctggatgatgcttcaaaccttgaggagcaatgttttgaccacacaatagatgaaccaccaatgaactaccacgaggaaacagaccagcatgttcttgaacctctcagtgctagcaacactagtaacaactctgctttccctcctagtttcaaccaaatgctgaaaagttgttcaattgattatgaccaagaggaaccctgtccattggctgcatcaaaccatgtccttcaagaggtgtatgtgctggatacttctcatgatgttgccaatgaagaaaggactgctggtaaaggaatggatgctgctgaaggagttgatgccagtatattaacatatgacctaatggcacggataaagacatatatggctgatgaatcctttaatgatatgttgctcaagcttgataaagccattgatgaacttggtggtgacatgtcgctgtagatagcaaaacctcttctgcggtgaaggaatgcaggcgtgcttcgtggcaccctacagcacatttctcaaaagttcagattgtgaagcaacagtatagttacatatggttatacatagtagatagatagtgtctatatagattacgtgcaaagataaaaattcagtactatccactgctttttgccaataatttacaatacatgcaaagttcaaaatacagacattttgcaaccatgctcatgtttatctagatgattaaacagtagcaggttctttcattgctaaatgcttggcaacaggtgatcacacatgcgaaagaactgcctcagagtactcccaactatatccaagctgctgtaagtacctttgttgatgcacatgcacctttatggaaaggaaaagtatggtccttacagctacggtggatggaaaatcggaaagtgggtaaattcctttgctatcgtgttaataatagattcaggagtgatttaaagcgcagagtccaaatttctgaaagtttgatttgatttgatttgcatgtttagggtttagggccagtatgtgtacgtttgaagtggcaaacaacttaatcatgtaggatgtgtttggttgcctagttctgagcctggctcagtgagagaactaggctcaagagagcccgcatgtgatgaggtaacctaagatgtttggttggctgatcaaagtaagcctggc

SEQ ID NO: 207453 - DNA, 2172 bp, Zea Mays
taccagcaagaaaaccctctacaagcccttttttttttgttatccggtccgcccaggctcttcccattctccggcgcttccctctgtcccttggctcgctctggcgtggttctcccgtcccctggtgcgtgcgcgcttctcgctctctcgtggcggcgactgggcgactatcgcctccgccctacaacagttgctcaggtcttctttgggcccttcgccggggacaagcacccaccggagaaaatcaataaatacatcggcctgaaagaatgggttatggcatgagtaggctagacgatgaatactatgaggctgaagggcagaatactggtggatctggctcagttcaagtgaacgatgagtttgcaacactacataatgatatttttcatatgacccgaatgagatcaggacttactgaaagctacaagtccatgggtaccaacagaggcataatatcaactgccaagttattatctcgaagggaaattgattgttctggaaaggggatgttctcttctggtgaccgtgcatttgttctaggtcgtcatgttccgatgaacaatcctgaattattggataggatggattctcgtgcttacgtttcacagttttctgctgatggtactctttttgttgctggttttcaggtatgctatgctcaaccaacaatagtcgaggttttaaacaagttcaagtcagaatttcctgggaagtcacataagaatatacgatgttgatagaggctggagcatacacaaagacattcatgctaggtgtttaagatggacaatcagtgatgtatccttatcacctgatcagcggtatcttgcctactctagtctggcacctattatccatattgtcaatgttgggaatgcggcaagagaatcctatgctaacgtcactgacatccatgatggattggatttttcacagcatgaagatgttcaatattcatttggaatattttctgtaaaattttcctctgatggacgggaacttgttgctggcagcaatgatgactcaatatatgtctatgatcttcatgcaaacaaattgacattacgtttatctgctcatacatctgatgtcaatacagtagcatttgctgatgaaaccggccatctcatatattctggaagtgacgacactttatgcaaggtctgggacaggcggtgtttgtccgcaggacaggctgccggagttttgactggacatttgcatgggataacacatattgatagtcgtggagatggccgaagtttcatatccaatggaaaagatcaagcaatcaaactgtgggatatcaggaaaatgatgtccaatgctgatagttgtgcagatggagccccagcctgggactacagatattcaaggtatccgcatcaacataaacagttaaagcatccgcatgatcagtcaatagcgacgtaccgtggacatacagtcctccggacattgatccgttgctacttttctccttcgtatagcactgggcaaaagtacatatatacagggtcgtatgattccaatgtttgcatctatgatgtggtaagtggatcccaggttgcgaagctgaaatggcatcaaatggcgattcgggactgcagttggcacccatttgagcccacgcttgtgagctcatcctgggacggccgggtagtgaaatggaccagcgcacgtgatgaaggggcttctgatgtcgattgagttgagtcgaccgtgcaggtgcagcgcgagtgatctttactgttcgtggttgtgggctaaaaaaaaacatacccaatcttgcactaaaaaaaaggagagtaagcacagctcgtaataaagaaagaagatcatgtgttgcagtggtaatttgtaaatgtaaatactgaactgaaaccatgtgggcaggaccgagtgcataagcacctttgtgaatatggttgttccataaagccttttccatgtcctttggagggagcgtgtttttgttggcatttggttttcgacgttccgttttttttgggtatgggtatgggcaatgcgctttttttagaagatgtttggtttctagggactaatttttagaaacggggagatctaggggtgcagagtactccaccagtttttctgatccaaccctcgcgccaaaactgcgagcgaggtgtcgcaaggcatgaaaag

SEQ ID NO: 207454 - DNA, 1023 bp, Zea Mays
acagaccagacgtagccgcgcacggtcggcttgcttgtgcatggacgtgatgttcggcgggacggagacggtggcgtcggcgatcgagtgggccatggcggagatgatgcacagccccgacgacctgcgccgggtgcagcaggagctcgccgacgtcgtgggcctcgaccgcaacgtgagcgagtcggacctggacaggctccccttcctcaggtgcgtcatcaaggagacgctccggctgcacccgcccatcccgctgctcctccacgagaccgccgacgactgcgtcgtggccgggtactccgtgcccaggggctcccgcgtcatggtcaacgtctgggccatcggccgccaccgcgcctcgtggaaggacgccgacgcgttccgcccgtcgcggttcgcggcgcccgagggggaggccgcggggctcgacttcaagggcgggtgcttcgagttcctgccgttcgggtcgggccgccggtcctgccccgggatggcgctcggcctgtacgcgctggagctcgccgtcgcccagctcgcgcacgccttcaactggtcgctgcccgacggaatgaagccctcggagatggacatgggcgacatcttcggccttaccgcgccgcgcgccacgcggctctacgccgtgcctacgccccggctcaactgccccttgtactgacgccctgcacgtggcgcgcggggactgccattacgcatgcatgcgtttggactttggtgttcatccctggggtggggccgccgtgggggaagttaggagtttggtggctttctagctctgtcttcttgtattctgtttattataaattttcccaacccttccatgcctgatcgatgtgcggtaataattgttagaaaatgtgacattttgtatgtaatcaatctatggggtgcaattgttatctcgtcaaaggacacaccactcgacttgcaccccttcatgtatatatatacatacacgaacatcccctgcaataaagaaatcgctgtcactttctttcgaac

SEQ ID NO: 207455 - DNA, 1475 bp, Zea Mays
ctcaccttccgcggcctccctccgttcccatccgccgcccgcgcacttcttccttcgggcacacaggacaccaccgtcgacggattcatcgcgacgatggggctcgacgtcatggagatcgggatgggcgccgatttgagcctggatctgaggcacttcgcctccaaggccgtgaggcagagcaaggacgacacgccggcgccggacatggacgcatgcatccgccgcctcgaggaggagcggggtaagatcgagatgttcaagcgggacctcccgctctgcgcgcgcctcctcgccgacgtaattgatgtcatgaaggaggaggcggggaagaagaagacgacgacgaggaggaggagtgatcgcaggctggcgtctgcggcagctgatgatgaggaggaggaggcggacggcgccaccgcggacaagagcaagtggatgagcacggcgcagctctggacgggcgattccgggcgggaggacgcggaatcagagaagcaagacaaggggcggtgctcgccggaggccaggtcccgcggcgctctcttaccgttcaaggctgatgtgggctctggcgcgccggcgttcgcgccgctcttcttgagaacggacgacaaggctgcggctgcgcgcgtcggggtgccggatctgtcgtccttgctgtcgccgccggcgaccatgcctcctgcggacgccggcgccgaggagagccgtcgccaggttgtgggatttgcgcaagctgcggccagggcggctgccatggcgccgtctgcccctgcgcttgggctccagtcgcagcagcagcagcagcagcagcagcaggcaaggaaggctcggcgttgctggtcgacggagctgcatcgcaagttcgtcgccgccttggatcagctcggtggcccccaagttgccacgccgaagcaaatcagggagctgatgaaggtggatgggctgacaaacgacgaagtgaaaagccatcttcagaaataccggctgcacaaccgcagggcgcctggatccggcgtggtgcgccagccgatcgtgctcgtgggagggctgtggattccccaggagcaaggcagccctcagtctggatctccccacggccccctccaccacctgtccacctcggtggccgccgtctcgtccgccgccaccgccagctgcgaggaggaagacggccggcggaggaaaggcggcagtgcacagcgacagagacgaagacttttggaatcgtccttgggtggatggatggacggacgaacgaggcggggccgcgagctctgaatattcgccgccgtcgatgcatcggcggcctgcctgtcgctctcgacggagagggtggtactggtgtgcgcaaccggacaacgcaatgttcaggccagaagaatcggaatcggaatatcatattccgtctgataaatactatgagggaagaatggaggggatatgaggatatcctcgttgattctgcttga

SEQ ID NO: 207456 - DNA, 1411 bp, Zea Mays
atccgccgcccgcgcacttcttccttcgggcacacaggacaccaccgtcgacggattcatcgcgacgatggggctcgacgtcatggagatcgggatgggcgccgatttgagcctggatctgaggcacttcgcctccaaggccgtgaggcagagcaaggacgacacgccggcgccggacatggacgcatgcatccgccgcctcgaggaggagcggggtaagatcgagatgttcaagcgggacctcccgctctgcgcgcgcctcctcgccgacgtcagcacaggatctgtgggggtgctgtcgggtgctcgattcgtcggtgggcctaaaagttttggagctttgcgatcgcagaagcaagacaaggggcggtgctcgccggaggccaggtcccgcggcgctctcttaccgttcaaggctgatgtgggctctggcgcgccggcgttcgcgccgctcttcttgagaacggacgacaaggctgcggctgcgcgcgtcggggtgccggatctgtcgtccttgctgtcgccgccggcgaccatgcctcctgcggacgccggcgccgaggagagccgtcgccaggttgtgggatttgcgcaagctgcggccagggcggctgccatggcgccgtctgcccctgcgcttgggctccagtcgcagcagcagcagcagcagcagcagcaggcaaggaaggctcggcgttgctggtcgacggagctgcatcgcaagttcgtcgccgccttggatcagctcggtggcccccaagttgccacgccgaagcaaatcagggagctgatgaaggtggatgggctgacaaacgacgaagtgaaaagccatcttcagaaataccggctgcacaaccgcagggcgcctggatccggcgtggtgcgccagccgatcgtgctcgtgggagggctgtggattccccaggagcaaggcagccctcagtctggatctccccacggccccctccaccacctgtccacctcggtggccgccgtctcgtccgccgccaccgccagctgcgaggaggaagacggccggtccgagagctatggctggaaatgatgaagaggctgctgctgctgctgctgcgccaccaatgtgtgttcactgtttagagaggggagggaggtttcttggcatggtggggatcgccatgggccatggcggaggccaccagttgcagcttcaggaatcgggaggggaattgagtgtagtgtagctgtctgtacacatacatacatacatacagtgagatgggatgagatgagagcgggccttgagcgctcgagatcagaactgatggtgcttcgtcgtcgggtttgtacatcccaaagagaaagagatactagctacagttttgcggcttgttaatccatgctctgggggcagagctacagttttcgccccgag

SEQ ID NO: 207457 - DNA, 2214 bp, Zea Mays
gctaaagtttatctcgcgagattgaaacagggccttagtacgcattgtagtctaaattcactctataactggtatcagctattacatgttgcaaagtgttgatatatggtggttgaatgctacttagaatgttttgtagtctaaattcactatgcaactggtatcaactatattacataaaaataacgttatatgcttacattttgtttcctgcctacatattatataatcatattatatttaaatttgttttacatggctgggtacttacaccaaactcttaagacatatgtgctcacgcgcgctgggcgcgcgctaaacactagtatagagtagtagagattgaatggctgttcagggcagtgtgttgctacagttcctcgtttataccattactggtcttcctatctctgtcattgctggcactaatagcagatcatatctgcatgtacttttatagactgtatcaattaggctagattagaggacattaggaggatagctttgattctttcctttgcatgtacagtccttcgcataaatccagcctttgcatgtataagtacagcctacacaatagagaattcgttccacctaatcgcctatcttctttcactgaggtcctatcacttgacggaatgcaatcgtgttgggcaggtctggatgagatttcatcgaaacatttgtcaaattatgccatgggagcatcttaggctgttgcattgatttggctgatggctgtagttctgtattcaaatgttcccaatgagccacctttttaaatgtgttcagtgcctcttagaatatgcacagatgagtaacatactaccgtgctgtagtgctggactcgaactactataaatttgcctttctggttatctggtataagttaagattaaatgagccacaccagcagctcccaatctttatgaaatgaatgcaaagccaatggcaagcgaacctgcatggatccatgttttgtattgtggagtaaatcatatttgtttgtgcaatacatgttgtctgagagaggtcgcggaacaagggctgttcgggtgtgagtatccaaaaaaataaatgaatttgttaggtttcaattacttcttttccctgcattttacttagttatactggtagcagcggtggcctgtatgttgtcctggacccgtagaataccagatctaagaataaaaaacgtctgcagcggtatccagtacctcgtcctgtattatccaggggggcggctccatcccgtagatatgggggacaagagagcgtccggcaagtcctccagctcccggctcctcctctcattcgcgtgattgggcatggacccgtaggacatagaggatatgccttataggataccgttgcggataaaatttatttacgggaagaaatcttttggaggaatctttaaattagtatttaggggatgcaatatacaggctaccgttgctaccagtcttagggctagtttgagaacccttttttcccaaaagattttcatttttcaaagaaaaattagttcatttttccttgagaaaataggaatcccttaaaaaaatagtgttttcaaactagcccttaatgttttttttcatgaacagaagctgcggccgtcagaaaagcttgacaggtttcttgagggtagaaacttatatgaagggatcttccgtaaccacatccagattgtttcattgaggcttatacggtaaaaattcttctgctagtgagatcaagattaagggtacaggagttgcatggacccactagaaattggtggccaaagtaccaaacgagttctttgaaacagcttcagtttttcttgttatgtaccaaatcggtctgccactagtgcaatgaccacagaaacaaaaccagggcaggttcccacttcccaccgtgtaaatagagatgcagtcgtcatttttctagctgtcatttttctagctgggttctagtctttggacgacaaatacaagagtagggttgagattgaccatccgtacgtgcttttcttttttttcatggctcccaatctatctttggttgtatttgaatcttgtgctggggtccaatgcgtaatcttctcgttttgtgagggattctaaagctttgatctctgaagtgacttttctgcacaaatgtatgattagctttacatctggactgatcactgatgaagctgccgattgatttctactggcatca

SEQ ID NO: 207458 - DNA, 5321 bp, Zea Mays
gccaagtcaagtgaaatgacttcgggtccaacctgcaaaaccggaacccgcccacaaaaatgtgaatcaaaaatcaaccgaacttgccagccccgccgcccctccctgcctccatcgcgcactagggtttttcctcgctctcacgttcggccgttccccaccacttgcgcgttgtgccgcgacgctccggccatggcgtggggggaggacgaggccatcggtcccgacgtggcctcggcgggtcttcacgtctcggagcggatcggccgcgacgccgccgcgcagcccgacctggaggaggcccttgaagcctcgcgctacgcgtcccacccctactcctcgcaccccaaggagtggcctcctttggtagaagttgcagaaactcgtcaactccctcctatgttgattgaaagatataacacagctgccggtgaaggaacagctctttgcgggattttttctgacatacatcgggcctgggcaacagttgacaattcatttttcatctggcgatttgataaatgggacgggcattgccaagagcataatgttgacgagcaagcaatttgtgctgttggccttgctagggcaaaacctgggattttcattgaagccattcaataccttttagttttagcaactcctgttgaactgatacttgttggagtttgctgttctgctagtgctgatggaacagacccatatgctgagctttcattacaaccattacctgagtacatgattgccactgatggtgtcacaatgacatgcatcacatgtacagacaagggccaaatttttgtagctggtcgcgatggccatatatatgaattgcagtatacaactggttcaggttggcgtaaacgttgccgtaaagtttgtcttactactggcattggcagtcttctttctaggtgggtactgccaaatgcattcaaattctcaactgttgatccaattgttgatatggtcatggatgaggagaggaacactatctatgcgcgtaccgagggcatgaagttgcaattatttgatctaggagttaatggtgatggccctttgacaaaaattactgaagaaaagaacattgttgatccacgggatggaccttatggtggtcggaggtctaatgcgccaagagctgcacgatcaccaagaccatcaattgtttgcatctcacctgtatcttctgtggaatcaaagtggctccatgctgttgctgttttatcagatgggaagagattattcctcactacatctggtggaagtggttcttcagttggattgaacagtggtctgcagaggccaacctgtttaaaaattgttgctactaggccgtccccacctctgggggttggtggtgggcttacatttggtgctgtttctgtggctggcagggctcttcctgaagatctagcattgaaagttgagtctgcattctattctgctggtgctcttgtaatgtcagattcatccgctacagccatgtcatctcttctggctgtgcagaaagattcagctgcgcagctatctctccccagcacctttggaacagcttctagaacctccagagctctacgagaaacagtctctgctttacctgttgagggtcgaatgctttgtgcctctgatgtcttaccacttcccgatgctgcttacatgatgcagtctttatatgctgatgtggaatgtttcacatgtttcagaaaaccttctgagaaggcatgtataaaactgtgggcaaaaggggatcttcctacccagcatatcttgcctcggaggagggtggttgtattcaatactatgggtttgatggagttgatttttaacaggcctgttgatattctaaggaaattgtttgacgggaacaccctgagatcacaaattgaagaattctttaatcgctttggtgctggagaggctgcggcaatgtgcttaatgttagctgcgaagctactttatgctgaagatagtctgataagcaatgctgtttctgagaaagctgctgaggcgtttgaggaccctgggcttgttgggatgcctcaaattaacggcaccactgctttatctaatacacgaactcaggctggaggctttagtatgggccaagttgttcaagaggcagaacctttgttttctggtgcatatgaagggctttgtttgtgctcgtcaagactactttatcccatctgggagcttcctattatgtcgattcgaggaccgtctggtaataataaacgcgaggatggcgtaattgtttgcaggctttcagctggggccatgaaaattcttgagagtaagattcattcactggaaacatttttaagatctagaagaaacaagagaaggggcctttatggttatgttgctggtcttggcgattctggttccatactctacaaaacagggcctattattggccctggagggcatagcaatggaaggagtccctacaactcccaaattcgagatatgaaccctgtagataaatctgcatcgaataaaaagccaaggctgctttatacatcagcagaactagccgctatggaggtgagggcaatggagtgtcttaggcggttgcttaggagatctggtgaagcactgtttctgcttcaacttatttgccagcataatgttgcccgtttggctcagacactgggcaatgatttatgcaagaaatttgttcaattaacatttcatcaattggtatgttcagaggatggtgatcagctcgcgatgcgtcttatttctgcactcatggagtactatattggcccagagggcagaggaactgttgaagaaatcagtactaaattgagggagggttgccctagttacttcaatgagtcagactacaaatattacttggcagtggaatgccttgagagagcatctatgactaataatgctgatgagagagatattcttgctagagatgctttcaacctcttgactaaaattccagactctgctgatttgagtgccatatgcaagagatttgagaacctaagattttatgaggctgtagtccgattgcctctgcagaaagctcaagcacttgactccaatgctgatattatcaatggtcaaatagacccaaggcatcatgatacaataatgttgcagcgtgaacaatgctataggattgttatggatgcgctgtgcactctcaagggtgttgggcatagtcgaatgcaaagtgcagacaagtcatctgctctagcaactgctgctgatccagcttctcgaagcaagtatatcaaacaaatcatacaacttagtgtccaatggccggacacagttttccatgagcatctatacaggacacttattgagcttggtctagaaaatgagcttttagagtatggtggatctgatttggtttcttttctgcagagtgctggccgtaagcatcaagaagaggttcgggcagtttcttcagttacacctggagctgctaagatgcatgatttaggtgcacctatctcgactagtcaaacaaagtatctcgagctcctagctaggtactatgtccgcaagggggaacatattgctgctgccaggatgttgttaatattggcagagagacagtgctctaattctgaagaagctccagctcttgacaagcggtatgaatatctcagagatgcagtgcttcaggccaaaagcgcaggcatcgctgctgatttgtccaaaaatcctgttgatagcagcacagtggatttgcttgaaggaaaacttgtcgtgctacgcttccaaattcaaattaaagaagaattggagctcatgagactgctaaggctgctaaggataaggcaaaagaactatcattaaatctcaagagtatcactcaactgtataacgattatgctgttccatttgatctctgggaggtttgcttggaaatgctgagctttgctaattactctggagacgctgatagcaaaattgttcgagaagtttgggctagactccttgatcaggcacttactaaagggggtgttgcagaagcttgttctgttgtgaaaagagtaggctcgaaacttgatcctgcagatggagcttgtttacctttagatatcatatgccttcaccttgagaaggctgcagtggatagattaagttcaggagaagaattagttggtgatgatgatgttgcaagagctcttcttggtgcctgtaaaggtcttcctggacctgtactttctgtgtatgatcacctgttatcgaacggtgcaatcataccctcactaaatctgaagttgcgccttctgcgatcagttctagcaatcctccgtgagtgggggatatctgtcattgcacacaggctaggcaccacaagtgctggggcttcattctttcttgatggaacattctcattgaaccaaacagggactgcgaatcaaggtgctcgagataaaataattagtttggcgaacaggtacatgactgaggtgaggcgattaaaccttccacagaaccaaacggagaatgtctaccgtggtttccgtgaacttgaggagaaattactatcttcttattaagcagattgcagtcattcctcaagatagtgaagaatgatcttgcatctgttgtaccacaaaaccaaggaatagagtcgagggcttctggattcacctcagcatgatctgtattgttccttacacttatctgcaagaacccggggctgctgcaggactctagctgaggtggttagatggctctagtaccactcatgtcctggctgagttggttagatggctctaatagcacttctgatgtcctgggtttgacttctaggtaaagatctagatctggtctatagggagcggattctcttgctgcatgggaggcagttttcgtgacttggtcgtactccgattgagcttcttaatataataacgggggacagtcttttctcaccgttcgagttcttttcttttttgaacccaaggctgctttaatcattattaatcagatgtttttcatgactaagtgcagccttcttttatttgacttgagtcagtatggactgcagagccgtagatttggaaaattgtttagatgtcttcattacttgctaatctagtggtagatactgccggtcctgttttaagggtggactttgtccctgaacaacattaaactgttgaatacaagttgggttttgatgcaggaatcggaatttagtatgtgccatgacattgtacagttctatagtagattattctcagtgttgtaagcttttacgctgtgtttgtttgtatgaagataccgtttcagtagctgaaaaaaggtaaaggttattgccagaaatgtgg

SEQ ID NO: 207459 - DNA, 5606 bp, Zea Mays
aatcaaaaatcaaccgaacttgccagccccgccgcccctccctgcctccatcgcgcactagggtttttcctcgctctcacgttcggccgttccccaccacttgcgcgttgtgccgcgacgctccggccatggcgtggggggaggacgaggccatcggtcccgacgtggcctcggcgggtcttcacgtctcggagcggatcggccgcgacgccgccgcgcagcccgacctggaggaggcccttgaagcctcgcgctacgcgtcccacccctactcctcgcaccccaaggagctcttatgctgctaggatgaaacaccgcaaacacattggtacatgttggaactctttgttttgaatgctggaaaggtttcttcagaagttttaatgacattgaacacgatgatcatgcaggtctcagaaatgctttgctggaccaacccttctctaacataccatgtgtttgttctaagttttatttgaatttaataatgaagttgttctactaatattttgaaaatgcacttttatgttctcttaatacatattttgtcttggcagtggcctcctttggtagaagttgcagaaactcgtcaactccctcctatgttgattgaaagatataacacagctgccggtgaaggaacagctctttgcgggattttttctgacatacatcgggcctgggcaacagttgacaattcatttttcatctggcgatttgataaatgggacgggcattgccaagagcataatgttgacgagcaagcaatttgtgctgttggccttgctagggcaaaacctgggattttcattgaagccattcaataccttttagttttagcaactcctgttgaactgatacttgttggagtttgctgttctgctagtgctgatggaacagacccatatgctgagctttcattacaaccattacctgagtacatgattgccactgatggtgtcacaatgacatgcatcacatgtacagacaagggccaaatttttgtagctggtcgcgatggccatatatatgaattgcagtatacaactggttcaggttggcgtaaacgttgccgtaaagtttgtcttactactggcattggcagtcttctttctaggtgggtactgccaaatgcattcaaattctcaactgttgatccaattgttgatatggtcatggatgaggagaggaacactatctatgcgcgtaccgagggcatgaagttgcaattatttgatctaggagttaatggtgatggccctttgacaaaaattactgaagaaaagaacattgttgatccacgggatggaccttatggtggtcggaggtctaatgcgccaagagctgcacgatcaccaagaccatcaattgtttgcatctcacctgtatcttctgtggaatcaaagtggctccatgctgttgctgttttatcagatgggaagagattattcctcactacatctggtggaagtggttcttcagttggattgaacagtggtctgcagaggccaacctgtttaaaaattgttgctactaggccgtccccacctctgggggttggtggtgggcttacatttggtgctgtttctgtggctggcagggctcttcctgaagatctagcattgaaagttgagtctgcattctattctgctggtgctcttgtaatgtcagattcatccgctacagccatgtcatctcttctggctgtgcagaaagattcagctgcgcagctatctctccccagcacctttggaacagcttctagaacctccagagctctacgagaaacagtctctgctttacctgttgagggtcgaatgctttgtgcctctgatgtcttaccacttcccgatgctgcttacatgatgcagtctttatatgctgatgtggaatgtttcacatgtttcagaaaaccttctgagaaggcatgtataaaactgtgggcaaaaggggatcttcctacccagcatatcttgcctcggaggagggtggttgtattcaatactatgggtttgatggagttgatttttaacaggcctgttgatattctaaggaaattgtttgacgggaacaccctgagatcacaaattgaagaattctttaatcgctttggtgctggagaggctgcggcaatgtgcttaatgttagctgcgaagctactttatgctgaagatagtctgataagcaatgctgtttctgagaaagctgctgaggcgtttgaggaccctgggcttgttgggatgcctcaaattaacggcaccactgctttatctaatacacgaactcaggctggaggctttagtatgggccaagttgttcaagaggcagaacctttgttttctggtgcatatgaagggctttgtttgtgctcgtcaagactactttatcccatctgggagcttcctattatgtcgattcgaggaccgtctggtaataataaacgcgaggatggcgtaattgtttgcaggctttcagctggggccatgaaaattcttgagagtaagattcattcactggaaacatttttaagatctagaagaaacaagagaaggggcctttatggttatgttgctggtcttggcgattctggttccatactctacaaaacagggcctattattggccctggagggcatagcaatggaaggagtccctacaactcccaaattcgagatatgaaccctgtagataaatctgcatcgaataaaaagccaaggctgctttatacatcagcagaactagccgctatggaggtgagggcaatggagtgtcttaggcggttgcttaggagatctggtgaagcactgtttctgcttcaacttatttgccagcataatgttgcccgtttggctcagacactgggcaatgatttatgcaagaaatttgttcaattaacatttcatcaattggtatgttcagaggatggtgatcagctcgcgatgcgtcttatttctgcactcatggagtactatattggcccagagggcagaggaactgttgaagaaatcagtactaaattgagggagggttgccctagttacttcaatgagtcagactacaaatattacttggcagtggaatgccttgagagagcatctatgactaataatgctgatgagagagatattcttgctagagatgctttcaacctcttgactaaaattccagactctgctgatttgagtgccatatgcaagagatttgagaacctaagattttatgaggctgtagtccgattgcctctgcagaaagctcaagcacttgactccaatgctgatattatcaatggtcaaatagacccaaggcatcatgatacaataatgttgcagcgtgaacaatgctataggattgttatggatgcgctgtgcactctcaagggtgttgggcatagtcgaatgcaaagtgcagacaagtcatctgctctagcaactgctgctgatccagcttctcgaagcaagtatatcaaacaaatcatacaacttagtgtccaatggccggacacagttttccatgagcatctatacaggacacttattgagcttggtctagaaaatgagcttttagagtatggtggatctgatttggtttcttttctgcagagtgctggccgtaagcatcaagaagaggttcgggcagtttcttcagttacacctggagctgctaagatgcatgatttaggtgcacctatctcgactagtcaaacaaagtatctcgagctcctagctaggtactatgtccgcaagggggaacatattgctgctgccaggatgttgttaatattggcagagagacagtgctctaattctgaagaagctccagctcttgacaagcggtatgaatatctcagagatgcagtgcttcaggccaaaagcgcaggcatcgctgctgatttgtccaaaaatcctgttgatagcagcacagtggatttgcttgaaggaaaacttgtcgtgctacgcttccaaattcaaattaaagaagaattggagctcatggttgcacggctcgaaaatattccaagcagttctgaattacctaatgttccgttccctcgtgacaacattcttgctaatgcagagactgctaaggctgctaaggataaggcaaaagaactatcattaaatctcaagagtatcactcaactgtataacgattatgctgttccatttgatctctgggaggtttgcttggaaatgctgagctttgctaattactctggagacgctgatagcaaaattgttcgagaagtttgggctagactccttgatcaggcacttactaaagggggtgttgcagaagcttgttctgttgtgaaaagagtaggctcgaaacttgatcctgcagatggagcttgtttacctttagatatcatatgccttcaccttgagaaggctgcagtggatagattaagttcaggagaagaattagttggtgatgatgatgttgcaagagctcttcttggtgcctgtaaaggtcttcctggacctgtactttctgtgtatgatcacctgttatcgaacggtgcaatcataccctcactaaatctgaagttgcgccttctgcgatcagttctagcaatcctccgtgagtgggggatatctgtcattgcacacaggctaggcaccacaagtgctggggcttcattctttcttgatggaacattctcattgaaccaaacagggactgcgaatcaaggtgctcgagataaaataattagtttggcgaacaggtacatgactgaggtgaggcgattaaaccttccacagaaccaaacggagaatgtctaccgtggtttccgtgaacttgaggagaaattactatcttcttattaagcagattgcagtcattcctcaagatagtgaagaatgatcttgcatctgttgtaccacaaaaccaaggaatagagtcgagggcttctggattcacctcagcatgatctgtattgttccttacacttatctgcaagaacccggggctgctgcaggactctagctgaggtggttagatggctctagtaccactcatgtcctggctgagttggttagatggctctaatagcacttctgatgtcctgggtttgacttctaggtaaagatctagatctggtctatagggagcggattctcttgctgcatgggaggcagttttcgtgacttggtcgtactccgattgagcttcttaatataataacgggggacagtcttttctcaccgttcgagttcttttcttttttgaacccaaggctgctttaatcattattaatcagatgtttttcatgactaagtgcagccttcttttatttgacttgagtcagtatggactgcagagccgtagatttggaaaattgtttagatgtcttcattacttgctaatctagtggtagatactgccggtcctgttttaagggtggactttgtccctgaacaacattaaactgttgaatacaagttgggttttgatgcaggaatcggaatttagtatgtgccatgacattgtacagttctatagtagattattctcagtgttgtaagcttttacgctgtgtttgtttgtatgaagataccgtttcagtagctgaaaaaaggtaaaggttattgccagaaatgtgg

SEQ ID NO: 207460 - DNA, 6319 bp, Zea Mays
aatcaaaaatcaaccgaacttgccagccccgccgcccctccctgcctccatcgcgcactagggtttttcctcgctctcacgttcggccgttccccaccacttgcgcgttgtgccgcgacgctccggccatggcgtggggggaggacgaggccatcggtcccgacgtggcctcggcgggtcttcacgtctcggagcggatcggccgcgacgccgccgcgcagcccgacctggaggaggcccttgaagcctcgcgctacgcgtcccacccctactcctcgcaccccaaggaggcaagccctgcgcgacctgtggtcagctgcgtgtgtactgatagacgcgcacgcttgagttgttgatgtgtcagtgtccggtttgggcgaatgttaccgttgtattcagggttcctgcagttgtcctgggggattcgtgtcattgtttttcccagtagaatgggggtgacgaggaatcgaaagatgaaggtggaggaaaacatggcgagcagtgatttcatctgattatttctggtgtttttttttggttgcttcagacctgcagtagaagttcggactttcggttcatatattgcattgtagtatgagtagttttgggtcaaattttgggagtgagactccatgacagaagtactatatgtcacacgggagcaatttacaattgtgtgtcatacacatgacatgattccctggcaggatgtgaatcctgattctgacattagaaaacggtgaaagagtttttggtcctttaagttacgctgaaacttggaaattgaggcaaacacgtggaaattagcataaaccgaaggacactagtttttgcaaaaaagaaaaaaaaagaaaaaaaggggaggtccctatttgaaactggctactggcaagctcaaccttggcttatatgagatcagcagtgacgaacagcttttcggattgctgacatcattcattcaagggacatattcttgtatgtattggtaattgaattgaggaggtaggaactggacattctgtttgctttgtttggttgagcatggtttatagactactggtcagttttcacacttttaaagtagatagttgtctttggttttgctttgcattttctgtttgctggatttattaaatgtttcatgttttagctcttatgctgctaggatgaaacaccgcaaacacattggtacatgttggaactctttgttttgaatgctggaaaggtttcttcagaagttttaatgacattgaacacgatgatcatgcagtggcctcctttggtagaagttgcagaaactcgtcaactccctcctatgttgattgaaagatataacacagctgccggtgaaggaacagctctttgcgggattttttctgacatacatcgggcctgggcaacagttgacaattcatttttcatctggcgatttgataaatgggacgggcattgccaagagcataatgttgacgagcaagcaatttgtgctgttggccttgctagggcaaaacctgggattttcattgaagccattcaataccttttagttttagcaactcctgttgaactgatacttgttggagtttgctgttctgctagtgctgatggaacagacccatatgctgagctttcattacaaccattacctgagtacatgattgccactgatggtgtcacaatgacatgcatcacatgtacagacaagggccaaatttttgtagctggtcgcgatggccatatatatgaattgcagtatacaactggttcaggttggcgtaaacgttgccgtaaagtttgtcttactactggcattggcagtcttctttctaggtgggtactgccaaatgcattcaaattctcaactgttgatccaattgttgatatggtcatggatgaggagaggaacactatctatgcgcgtaccgagggcatgaagttgcaattatttgatctaggagttaatggtgatggccctttgacaaaaattactgaagaaaagaacattgttgatccacgggatggaccttatggtggtcggaggtctaatgcgccaagagctgcacgatcaccaagaccatcaattgtttgcatctcacctgtatcttctgtggaatcaaagtggctccatgctgttgctgttttatcagatgggaagagattattcctcactacatctggtggaagtggttcttcagttggattgaacagtggtctgcagaggccaacctgtttaaaaattgttgctactaggccgtccccacctctgggggttggtggtgggcttacatttggtgctgtttctgtggctggcagggctcttcctgaagatctagcattgaaagttgagtctgcattctattctgctggtgctcttgtaatgtcagattcatccgctacagccatgtcatctcttctggctgtgcagaaagattcagctgcgcagctatctctccccagcacctttggaacagcttctagaacctccagagctctacgagaaacagtctctgctttacctgttgagggtcgaatgctttgtgcctctgatgtcttaccacttcccgatgctgcttacatgatgcagtctttatatgctgatgtggaatgtttcacatgtttcagaaaaccttctgagaaggcatgtataaaactgtgggcaaaaggggatcttcctacccagcatatcttgcctcggaggagggtggttgtattcaatactatgggtttgatggagttgatttttaacaggcctgttgatattctaaggaaattgtttgacgggaacaccctgagatcacaaattgaagaattctttaatcgctttggtgctggagaggctgcggcaatgtgcttaatgttagctgcgaagctactttatgctgaagatagtctgataagcaatgctgtttctgagaaagctgctgaggcgtttgaggaccctgggcttgttgggatgcctcaaattaacggcaccactgctttatctaatacacgaactcaggctggaggctttagtatgggccaagttgttcaagaggcagaacctttgttttctggtgcatatgaagggctttgtttgtgctcgtcaagactactttatcccatctgggagcttcctattatgtcgattcgaggaccgtctggtaataataaacgcgaggatggcgtaattgtttgcaggctttcagctggggccatgaaaattcttgagagtaagattcattcactggaaacatttttaagatctagaagaaacaagagaaggggcctttatggttatgttgctggtcttggcgattctggttccatactctacaaaacagggcctattattggccctggagggcatagcaatggaaggagtccctacaactcccaaattcgagatatgaaccctgtagataaatctgcatcgaataaaaagccaaggctgctttatacatcagcagaactagccgctatggaggtgagggcaatggagtgtcttaggcggttgcttaggagatctggtgaagcactgtttctgcttcaacttatttgccagcataatgttgcccgtttggctcagacactgggcaatgatttatgcaagaaatttgttcaattaacatttcatcaattggtatgttcagaggatggtgatcagctcgcgatgcgtcttatttctgcactcatggagtactatattggcccagagggcagaggaactgttgaagaaatcagtactaaattgagggagggttgccctagttacttcaatgagtcagactacaaatattacttggcagtggaatgccttgagagagcatctatgactaataatgctgatgagagagatattcttgctagagatgctttcaacctcttgactaaaattccagactctgctgatttgagtgccatatgcaagagatttgagaacctaagattttatgaggctgtagtccgattgcctctgcagaaagctcaagcacttgactccaatgctgatattatcaatggtcaaatagacccaaggcatcatgatacaataatgttgcagcgtgaacaatgctataggattgttatggatgcgctgtgcactctcaagggtgttgggcatagtcgaatgcaaagtgcagacaagtcatctgctctagcaactgctgctgatccagcttctcgaagcaagtatatcaaacaaatcatacaacttagtgtccaatggccggacacagttttccatgagcatctatacaggacacttattgagcttggtctagaaaatgagcttttagagtatggtggatctgatttggtttcttttctgcagagtgctggccgtaagcatcaagaagaggttcgggcagtttcttcagttacacctggagctgctaagatgcatgatttaggtgcacctatctcgactagtcaaacaaagtatctcgagctcctagctaggtactatgtccgcaagggggaacatattgctgctgccaggatgttgttaatattggcagagagacagtgctctaattctgaagaagctccagctcttgacaagcggtatgaatatctcagagatgcagtgcttcaggccaaaagcgcaggcatcgctgctgatttgtccaaaaatcctgttgatagcagcacagtggatttgcttgaaggaaaacttgtcgtgctacgcttccaaattcaaattaaagaagaattggagctcatggttgcacggctcgaaaatattccaagcagttctgaattacctaatgttccgttccctcgtgacaacattcttgctaatgcagagactgctaaggctgctaaggataaggcaaaagaactatcattaaatctcaagagtatcactcaactgtataacgattatgctgttccatttgatctctgggaggtttgcttggaaatgctgagctttgctaattactctggagacgctgatagcaaaattgttcgagaagtttgggctagactccttgatcaggcacttactaaagggggtgttgcagaagcttgttctgttgtgaaaagagtaggctcgaaacttgatcctgcagatggagcttgtttacctttagatatcatatgccttcaccttgagaaggctgcagtggatagattaagttcaggagaagaattagttggtgatgatgatgttgcaagagctcttcttggtgcctgtaaaggtcttcctggacctgtactttctgtgtatgatcacctgttatcgaacggtgcaatcataccctcactaaatctgaagttgcgccttctgcgatcagttctagcaatcctccgtgagtgggggatatctgtcattgcacacaggctaggcaccacaagtgctggggcttcattctttcttgatggaacattctcattgaaccaaacagggactgcgaatcaaggtgctcgagataaaataattagtttggcgaacaggtacatgactgaggtgaggcgattaaaccttccacagaaccaaacggagaatgtctaccgtggtttccgtgaacttgaggagaaattactatcttcttattaagcagattgcagtcattcctcaagatagtgaagaatgatcttgcatctgttgtaccacaaaaccaaggaatagagtcgagggcttctggattcacctcagcatgatctgtattgttccttacacttatctgcaagaacccggggctgctgcaggactctagctgaggtggttagatggctctagtaccactcatgtcctggctgagttggttagatggctctaatagcacttctgatgtcctgggtttgacttctaggtaaagatctagatctggtctatagggagcggattctcttgctgcatgggaggcagttttcgtgacttggtcgtactccgattgagcttcttaatataataacgggggacagtcttttctcaccgttcgagttcttttcttttttgaacccaaggctgctttaatcattattaatcagatgtttttcatgactaagtgcagccttcttttatttgacttgagtcagtatggactgcagagccgtagatttggaaaattgtttagatgtcttcattacttgctaatctagtggtagatactgccggtcctgttttaagggtggactttgtccctgaacaacattaaactgttgaatacaagttgggttttgatgcaggaatcggaatttagtatgtgccatgacattgtacagttctatagtagattattctcagtgttgtaagcttttacgctgtgtttgtttgtatgaagataccgtttcagtagctgaaaaaaggtaaaggttattgccagaaatgtgg

SEQ ID NO: 207461 - DNA, 1069 bp, Zea Mays
agctacaagagtgtgcaggaggtggatattttggcatattacacgttgagtggtgaactcaagtatcagtttgggtctggaagcatgagcataacagactatctcttaaatctagaaaatcttttgtgtggttgtggaggtttctacctacaagactggtctttagcatggtatgacagcatgtttgtgtatccactctgtagaaaatatcttatgcttcatgtctttagcatggcacttgtgtctcaaatcctttcaacaattggatccattttagtgaaaatccatggaggatccagtggaattggtacattcgctatacagattgccaagtacctcggaattaaggtttttgtcactgcaggaagtgaagagaaactagcagcctgcaaagttttgggtgccgatgtatgcattaactatagaactaaagacttcgttgaacgtatcaaacaagaaaccaacggaaagggtgttgatgtgattcgggataatattggaggatcatatctccagcgcaatctaaacaacttaggtgttgatggtagacttttcatcattggcttccaagggggcatagcagctgaagtgaacctgcaagctgtgcttgcacgccgtttgaccatacaagctactggactgcgcaacagaagccttgccaaaaaggcagagattgttagtgaggtggaaaagaacgtgtggcctgctgtcgctgctggcaaagtgaagccgatgatttacaagacgtttcccttatgtgaagctgctgaggctcataggttgatggaagctagcacccacatcggcaagatactgctgctcccactgcacctgtggcgtttgcgctcttactctcggaggagtcagttcaagaacatatgcaacttctgtgacagcctgcatggatgttgtactggtgtagcatgtcttttttatatatcttgtagtactagattggatcttttaccccgagaaattatcttgtcaattggatccttaaagtgctgatgacatttttctgtgagctatgatataatcaatctggagatagagccactacagcacgtca

SEQ ID NO: 207462 - DNA, 1152 bp, Zea Mays
caacgaggcatccgggtccgcgcattgcactagctccccccaggctctaccagaaccgccgccgtttctggatctctcgacggcgagcagcgactcgtccggtcgtccctcagcactgtgcttggcggacgcaggacaagacacaggatgagggctgtggtgcagcgcgtcctctcggccagtgtcgaggtcgaggggcgaatagtgtctgcgatcggccctggactcctcgttctcgtcggcgtccacgaggcggacacggactccgacgccgactacatttgtcggaaggtcctgaacatgaggctgttttcaaatgacaagactggaaaagcatgggatcaaagtgttatgcagcgtaactttgaagtgctattggtcagtcagttcaccttatacggcatcctgaagggtaataagccagattttcacgtggctatgtcacctgcaaaagcgaaaccattctatgcttctctagttgagaaatttcaaaggtcatactcggctgattcagtgaaagatggtgtttttggagcgatgatgaaggtttctttggtgaatgatggccccgtgacaatgcaaatcgactcaccctcactgcaaggtgctgctcagtcaagttggatctgaaagccctcctgctgtgcacttggtatgaactttgcgtctatctgttctagcgctttgtcattgccagtcagttacagcactgcttcagtctgcggaggcatagccttttgcgcaaatgacagaaccagacacattctctagactatatttgtcatcttattcatttttctactgcggataatactcttatcaatatgggagctacacatgagcttgtggcttctcaacaatgtagtatctagggtcttattactgaattagcaatcttcagtacatctatggatgaagttcagctctggtctatatatcagctgaactgtctctgtctcctacttgagcagaactcaaacaaccaaaaatcaatacttgggatcctctttcacccgagttattacttgttagcagcactgtagcagctagtgtcacatgcagcagagacaatgcagagatgccaacatgactgaaggataattttcttttgcactaggtttatttgaccaagagtaactccattaatacttt

SEQ ID NO: 207463 - DNA, 1918 bp, Zea Mays
gtgagttgtgacgccgccgtccctggctccttgctgcgtgctgcccttgtgcagttgtgctccttccttccttgccccgtaccccgccggcgcgccctgagccaaatcgcaggctgccattgtgccatggacgaaggtgcgacgacgagcgactcgtccgctgccgagacatttgatccggacctgattcacgccatcttcaagctggtgtggaggcggcgggcggggaagggggccggcggcggcggcagcattgaggacatcgatgcggagcgtgctccagagacatcgaggagaaatcggagcacaactggtaagcgagtcttttttccttctttattactagagctggcggcatgaaaaggtttccaggaagtgcatgtgttggtgcagtcatatcaaatgtctcatggggccacccatttgaacatcggctgcaagaaggctgtgtcagccacgctagggcatcagataaagatttaattcgctttgttgtcaagttttagcttggtttgattgttaggattggaactgggtttgttagacatgcacatcgttgttagcttggatggattgtaagaatgactgaactgggaaatcaagcatggaaagaacctccttccccatgttgcatctaatgcagctcaaaggctcgtgttgtttctccagtctccaccacaacgcacaacataatgagtagtgctatttttttaaaagaatttctgttcttttgtctagattggaactagatggcgtaaggttcccatatactatgttaaaactggcttttaactttggtatttgtcctttttatgtctcagcgacttaattctgctgtgacttggggtaagagtatcagtaagacaaaacttggtgaataaaagatttctttaggtctagtttgagaactccatttttccaaatgattcctattttctcaagggaaaataaactaatttcccttgggaaaatggaaatcctttgggaaaataggatttccaaactagcccttaacgaaattgcgggactggttttctttctttttttattaagagatgaagaattgacactagaaagagttccaaagattttttttttgagaagtcaacgggagggaagatactcttcacctgaataattttctactgataccgggaaagtcagaaattgagggtgccaggcgtcagttacacggttgggtcacgaaccccagaggtgcaaagtaaaaggcgaggaagatgtatttaacccaattagtcaattataatcacgttttggtttctagcggacaatatacagttcaaagtaacttgactgagttctcgttcttgttcatgatatgctgacacagtatgttcacctgacagccaatgcgactgctcttaaagtcagctgcgaacttctacggatatttgtaacagaggctattcaacgctctgcttttatcgctgaagcggaggatggtgctgttattgaacccacccacctagagcgtgtgttgccgcagctgctcttggacttctgaggtaccccatggagcctccaaaagcatttatctaggcgtgtctgctatggaaggatacagatgcctggatgcatcaacagaatcttattgctgatctatgtcttgtaatctgtaaacacacgagatttctatatggctttataaaaatgcatgcatttcttggaatgttttcctgttcgtgttgtgtttgacgagattattgccattataaaacacgacagagttggtttcgatgaaatggagatgtagggaagggcttcgacggtttggaggcgcagacgactgcgaagcgctgatatagacatgaaaatcccattagttgttacggacactaattgatctcccgctgtgagaataagtctccttaaccaggttgccgtcttcagcgccgtc

SEQ ID NO: 207464 - DNA, 2896 bp, Zea Mays
atttccattccctcccgcccctctaaacccagagcctaaaaccccggaaaccctaaccctagagaaaaaagggcgccgccacccaccctggccaccggggcgcgctcatttgttccccgccccttttgcaggtggtttcgttcaaacccaatctattttttcgcgagcgcgcgcgtgcggcgttgtgagaggaggcgaagaagatggctccattcggcgacggcggtgtcggctgtggcgatggaggggaggcgctgcgtgggtgggaccctctgcgcagtggcagcgcgccgccaacgatggagggcgcggcggcggcagcggcggcggcggagaggagggtatttggcggcggcggtgacggcgcgtcgttcttctccgggatcgacgggctcatgtttggcgcgaggatggacgaggtcagcaggtgccgcggtgccgccggagctcaggaacattttggcaattctacatctttatctgttggaccatctggccaactgtttaatggtgcaggagactgggatgaatggcagtttggaccgagcacagttcatagtggtggtgctatggcaaactatgcatttgatatgaatctcctttggacagatatgaatccagacaatgctgaatatcacagaaatatccagaatcacttcatgtcaaacattgaaaacatgaatgcttatggtaatagggatcttgatgcttcctccatgtttgattctgatatttcagatgctttatctgggttgaggctgtctaataattcagtaatggatcaaaggaataatagggaagagctagcagatgaaatactcgagcgtcaaagagatttctctaaaactgttgatgaaacccgatcatctttggttggtaatgtttttcatgcacctaggtcagatgtgcatccatcacgaatatatggagatggtattttacggaggcagaccagtgcatgtgcattagatggttccaatgtttcaaggatcaatcgccatcacataaagggtgttgatcgcccatctttggctgaccagctagctataatgcaatcaggcaactttcctagagggaccaatctttctcgcaatgtgtctgtgactaacatgtccaaccccatgagcaacagatacaacagcaatacagacctggatttggctaggagtcgaatgacattttttaaggagatacttgcacaacagtatctgcaggaggataatctgtcatataacgatagtaggatctatcatgatgagccttgttttccctgttcaagaatgcaaagatctggatctcatttttattcaaactcgcggtgcattctatcccatggtgatcggcaatcacggctcttgtccctcaataggaaggcaatgggtagaaatattggatcacatgcctatcatgataatacattatcaaactacctggatgtgctttctttggataatgcagatagaaacggtgctgattcagtggaactgattgatttagtgggtcacgttaaggaaattagtatggatcaatatggaagccggtttattcaacaaaaactcgaaattgcatcactggatgaccgggaaaaaatatttccagagatattatccaatgccattgctctaacaactgatgtttttggcaattatgttatccagaagaaaggcagttaatccaattggcagatcaactcaaaggtcacattttggaactcagcctccagatgtatggttgcagggtagttcagaaggttttggaggtagttgataaggatcgaaagattgacattgttcatgagctcaggaatcatattctgaaatgtattggtgatcaaaatggtaaccatgtgatccagaaatgcatcgagtgtgttcctgaagaccgcattccatttgttattgatcctatactttcacaaattcttgttttatgtacccatcaatatggctgcagagttattcagagagttttagagcattgccatgatcctgtgactcaaagtgctaccatgaatgaaattgtgcagcaaaccttccatctgacagatgataaatttgggaactatgttgttcagcatgtgttgaaacatgggaaaccagaagagcgttcggccatcattcaaaagctctctgggcaagtggtcatcttgagcaagctaaagtatgcttctaatgtcatcgagaaatgtttggagtttggaactcttgaagaacgtgatagccttattggggagatcatttcttctggtcaaacatttcaggaattgatgaaggatcagtttggtaactatgttgtacagaaagtccttaagacatgtgatgaaagatacctagagatgatcctctcgagcatcaagttacacttgaatgaactgaagaattacacgtacggaaagcacattgtgacacgcgtcgagaagctaatcgttacaggagaggaacgagcaaggatggcctccctgagcggccagcgtcagcagcagccaccaaactgtacagctgtcgacgcacactaatccttttttttatgcattggcgtcaaatgcgacggcacattggttccttttaacgcattgtggcgtcaaatacgagtagctagatgagagctaggtttttgggcactgtaaattcttttggccatgtgcaagttcatttacagtggataatagatgtacattgtgctggagcgttcgttagctttggtatggtaggtgatcgagagcagtgctgtgtaatataaatatactcttgttgttcaccgtacgacgtacagttgctcttttgtagcactgatctcgtttttcattcatatgtaatctctaattcattcgtaaggctgctttcaagttccaacccttgtcttaatcagcgccacattagtgatcaattgtgctgtc

SEQ ID NO: 207465 - DNA, 3000 bp, Zea Mays
cagcaacgaagcactgttcctgaaggtaatttcactcctatctccggctttcccggcgccgaatcctagtcctagcgatgccaagatttccattccctcccgcccctctaaacccagagcctaaaaccccggaaaccctaaccctagagaaaaaagggcgccgccacccaccctggccaccggggcgcgctcatttgttccccgccccttttgcaggtggtttcgttcaaacccaatctattttttcgcgagcgcgcgcgtgcggcgttgtgagaggaggcgaagaagatggctccattcggcgacggcggtgtcggctgtggcgatggaggggaggcgctgcgtgggtgggaccctctgcgcagtggcagcgcgccgccaacgatggagggcgcggcggcggcagcggcggcggcggagaggagggtatttggcggcggcggtgacggcgcgtcgttcttctccgggatcgacgggctcatgtttggcgcgaggatggacgaggtcagcaggtgccgcggtgccgccggagctcaggaacattttggcaattctacatctttatctgttggaccatctggccaactgtttaatggtgcaggagactgggatgaatggcagtttggaccgagcacagttcatagtggtggtgctatggcaaactatgcatttgatatgaatctcctttggacagatatgaatccagacaatgctgaatatcacagaaatatccagaatcacttcatgtcaaacattgaaaacatgaatgcttatggtaatagggatcttgatgcttcctccatgtttgattctgatatttcagatgctttatctgggttgaggctgtctaataattcagtaatggatcaaaggaataatagggaagagctagcagatgaaatactcgagcgtcaaagagatttctctaaaactgttgatgaaacccgatcatctttggttggtaatgtttttcatgcacctaggtcagatgtgcatccatcacgaatatatggagatggtattttacggaggcagaccagtgcatgtgcattagatggttccaatgtttcaaggatcaatcgccatcacataaagggtgttgatcgcccatctttggctgaccagctagctataatgcaatcaggcaactttcctagagggaccaatctttctcgcaatgtgtctgtgactaacatgtccaaccccatgagcaacagatacaacagcaatacagacctggatttggctaggagtcgaatgacattttttaaggagatacttgcacaacagtatctgcaggaggataatctgtcatataacgatagtaggatctatcatgatgagccttgttttccctgttcaagaatgcaaagatctggatctcatttttattcaaactcgcggtgcattctatcccatggtgatcggcaatcacggctcttgtccctcaataggaaggcaatgggtagaaatattggatcacatgcctatcatgataatacattatcaaactacctggatgtgctttctttggataatgcagatagaaacggtgctgattcagtggaactgattgatttagtgggtcacgttaaggaaattagtatggatcaatatggaagccggtttattcaacaaaaactcgaaattgcatcactggatgaccgggaaaaaatatttccagagatattatccaatgccattgctctaacaactgatgtttttggcaattatgttatccagaagtttttcgagttcgctacagaaaggcagttaatccaattggcagatcaactcaaaggtcacattttggaactcagcctccagatgtatggttgcagggtagttcagaaggttttggaggtagttgataaggatcgaaagattgacattgttcatgagctcaggaatcatattctgaaatgtattggtgatcaaaatggtaaccatgtgatccagaaatgcatcgagtgtgttcctgaagaccgcattccatttgttattgatcctatactttcacaaattcttgttttatgtacccatcaatatggctgcagagttattcagagagttttagagcattgccatgatcctgtgactcaaagtgctaccatgaatgaaattgtgcagcaaaccttccatctgacagatgataaatttgggaactatgttgttcagcatgtgttgaaacatgggaaaccagaagagcgttcggccatcattcaaaagctctctgggcaagtggtcatcttgagcaagctaaagtatgcttctaatgtcatcgagaaatgtttggagtttggaactcttgaagaacgtgatagccttattggggagatcatttcttctggtcaaacatttcaggaattgatgaaggatcagtttggtaactatgttgtacagaaagtccttaagacatgtgatgaaagatacctagagatgatcctctcgagcatcaagttacacttgaatgaactgaagaattacacgtacggaaagcacattgtgacacgcgtcgagaagctaatcgttacaggagaggaacgagcaaggatggcctccctgagcggccagcgtcagcagcagccaccaaactgtacagctgtcgacgcacactaatccttttttttatgcattggcgtcaaatgcgacggcacattggttccttttaacgcattgtggcgtcaaatacgagtagctagatgagagctaggtttttgggcactgtaaattcttttggccatgtgcaagttcatttacagtggataatagatgtacattgtgctggagcgttcgttagctttggtatggtaggtgatcgagagcagtgctgtgtaatataaatatactcttgttgttcaccgtacgacgtacagttgctcttttgtagcactgatctcgtttttcattcatatgtaatctctaattcattcgtaaggctgctttcaagttccaacccttgtcttaatcagcgccacattagtgatcaattgtgctgtc

SEQ ID NO: 207466 - DNA, 1275 bp, Zea Mays
ggccgtggccggtgtcccgtggcggtagaacgcgtgcgtcggcaggagcccccccacctgtcgagacgaggcttctccaaaccgccaccgcagccgacccctgctgccccggctttgttataacggatttttttcccgacacggctggtcggctgccatcgccatgtgcctcgccgccgcgtgcgcgtccgccaccctagcccgccgcctctcgccctccaccgcgctcccgcgccgcttcctcctcggcgcccccacgaggccttccccgccaccgcctctgctgcggcgctgcctcccgttccacttctaccatatggcgcaatattggactcaaccatcactggacaggaacaaagctatggttgagtacctaaagcagtatggtgctgttagaactgataaagtgaaggaagtaatggaaacgattgatagagcactatttgtaccagagggtaccccttacattgacagtcctatgcctattggtttcaacgcgacgatatctgctcctcacatgcatgcgacctgcttagagctattgaaggatcatttgcaaccaggaatgcatgctctggatgtcggatcaggtagtggctacctgacagcttgttttgccatgatggttggaccagaaggccgtgcagtgggaattgaacacgttcccgagatcgttgcttcttctgttgaaaatgtgcagagaagtgctgcagctccactactgagggatggatcgctctcttttcatgttacagatggcaggcttggctttccagacgcggcaccctacgacgctatccatgttggtgcagcggcacctgagatccctcagcctctgcttgatcagctaaagcctggcggccggatggtgataccggttggcacctactcccaggacctgcaggtggtggacaagaacacggatggatcattcagcgtccggagcgacgcggctgtgcgctacgtcccactgaccagccgcgccgcgcagttgcagggcccctaaataaggtggtctcagtccgttcgtgtttcacgaacgacgacggtgaaaaaagagtggttctttctgtaataagaaggatcgctagcatgtttctgaatcagatggtcggtggatgatgttttgagcttctgaacgaacttgcatctgcccgccgctgagctagacagctaatgctgaagtgtgcatgtacaagtacaaactagctttgcaccagtagtgattctatagatcgtatgcactgcatatcgcaatgctgcacgggttctgtc

SEQ ID NO: 207467 - DNA, 2274 bp, Zea Mays
cacactcccccacttcgccttcgcccaccccctccgctgcgagcgcgaggcgcggagggaggggctagcgctagcgctagcggctgcggcgccatggccctggccgacgccaccgcgttcccctacggcctgcgcgtcctcgtcgtcgacgacgaccccacctggctcaagatcctcgagaagatgctccgcaagtgctcctacgaagtcaccacatgcggtttggctagcgttgctctccaaattctccgagagaggagaaacaagtttgacattgtaatcagtgatgtcaacatgcctgacatggatggtttcaagcttctcgaactcattgggcttgagatggatctacctgttataatgatgtccatagacggagagacaagtagagtgatgaaaggtgtacatcatggtgcgtgtgactatctcctcaagcctgttcggatgaaggaactccgaaacatttggcaacatgtgtataggaagaaaatgcacgaggtgaaagagattgaaggtaatgacagctgcgatgatctcccaatatttagaaatggtttagatggattggatgagaggggcctatttatgagagctgacactgataccatgaggaagagaaaagaagtggataaggaccatgcagaccaggactcaagtgatggagctactgctaagaaggctagagttgtctggtctgttgaccttcaccaaaagtttgtaaatgctgtcaaccaaattggatttgacaaagtggggccgaagaaaatacttgatcttatgaatgttcatggcctgacaagagagaacgtggccagccatcttcagaaatatcgcctctacttgagtaggttgcaaaagcagaacgaagaaaggataatgggtgcggctaggcaagatttcaatcaaaaggggccatcagataatcttaacctccgaagttccttccaagagcagccaggaaaccttaccaatggatttcagcatagttctcagaaggtccaatctcagaccaacattctcgatcctcatctggacgacacgaagacttcagtgcccttgaaagtgccagataaaaatggaacttcagcaagtgatgctgctgaccatcagaacatcaccggtgtttcacctttaggtgggggtggggtgttctcttttgaaagaatgccagtgaatcaggacacgaagctatcggaagccatgatcttggaatgtcagtcctggagtggtggtgtgccaccaaagcagttcatgcagtatccaaagcataaccatgagcgctgcgaccttctaggagactattcttgcctgcccaaaccggacttagagcacccaattgcgcctagccatctttatgccccaccacctgtaatatcgatgagttgcagtgtggagggagatgtcagagacttctcagatgtaaaaccagatcttcttggctgtatgaagtccttatcaccggcactgacatgtacagttgagtcagtttctgctcaactcagtgacagtgttgtgagctcaactaacaatgacaagaagatttccagtgtggaggggttgtccagcgttaaagattgtgactttgatcaggaaaggaaccaagccattttgcttacttcagaagaggcaagtatattatgcagcactgatttgacttgtctacctgatgaactgtccggctatcaacttcaaggcgtctccttcggggatataggactgaatagcatcgatttattccagtgcaatgatacaatggtactacctggactgcagaataactggtatgatgatccagattttagcaatgaaactatggagttcccgttgctagacggaggtctgtttgcataaatgcctcagcgggccctatcttttgatcatgcccttatgtgagttctttggtatgttcccgtatagtgcctcctgtagggctatactaatctaactttatcatgtggtggaagggtttaatttgtagtctctccacttttgataattgtctgtattatagaccgtgccatggtacaatgactgcaatatatactcttcacaatgatcaaaactacatatgaagactgtcaaatttttgccttgaacaactgacttttgcagtaaattcttactctgatgcagcattgcacatatgtgagacttataaatttcactgaaaaattttagtatgaggactcctacaggggctgcagaatgtgaagctatttgttgatctaacctgaaaaaatatatatgtgaaggtggtagtgatacggctgtatg

SEQ ID NO: 207468 - DNA, 2001 bp, Zea Mays
atggccctggccgacgccaccgcgttcccctacggcctgcgcgtcctcgtcgtcgacgacgaccccacctggctcaagatcctcgagaagatgctccgcaagtgctcctacgaagatgctatgagtgatcggaccgtgatcgctcggacaggaggcatttcttcctgtgtcaccacatgcggtttggctagcgttgctctccaaattctccgagagaggagaaacaagtttgacattgtaatcagtgatgtcaacatgcctgacatggatggtttcaagcttctcgaactcattgggcttgagatggatctacctgttataatgatgtccatagacggagagacaagtagagtgatgaaaggtgtacatcatggtgcgtgtgactatctcctcaagcctgttcggatgaaggaactccgaaacatttggcaacatgtgtataggaagaaaatgcacgaggtgaaagagattgaagaagtggggccgaagaaaatacttgatcttatgaatgttcatggcctgacaagagagaacgtggccagccatcttcagaaatatcgcctctacttgagtaggttgcaaaagcagaacgaagaaaggataatgggtgcggctaggcaagatttcaatcaaaaggggccatcagataatcttaacctccgaagttccttccaagagcagccaggaaaccttaccaatggatttcagcatagttctcagaaggtccaatctcagaccaacattctcgatcctcatctggacgacacgaagacttcagtgcccttgaaagtgccagataaaaatggaacttcagcaagtgatgctgctgaccatcagaacatcaccggtgtttcacctttaggtgggggtggggtgttctcttttgaaagaatgccagtgaatcaggacacgaagctatcggaagccatgatcttggaatgtcagtcctggagtggtggtgtgccaccaaagcagttcatgcagtatccaaagcataaccatgagcgctgcgaccttctaggagactattcttgcctgcccaaaccggacttagagcacccaattgcgcctagccatctttatgccccaccacctgtaatatcgatgagttgcagtgtggagggagatgtcagagacttctcagatgtaaaaccagatcttcttggctgtatgaagtccttatcaccggcactgacatgtacagttgagtcagtttctgctcaactcagtgacagtgttgtgagctcaactaacaatgacaagaagatttccagtgtggaggggttgtccagcgttaaagattgtgactttgatcaggaaaggaaccaagccattttgcttacttcagaagaggcaagtatattatgcagcactgatttgacttgtctacctgatgaactgtccggctatcaacttcaaggcgtctccttcggggatataggactgaatagcatcgatttattccagtgcaatgatacaatggtactacctggactgcagaataactggtatgatgatccagattttagcaatgaaactatggagttcccgttgctagacggaggtctgtttgcataaatgcctcagcgggccctatcttttgatcatgcccttatgtgagttctttggtatgttcccgtatagtgcctcctgtagggctatactaatctaactttatcatgtggtggaagggtttaatttgtagtctctccacttttgataattgtctgtattatagaccgtgccatggtacaatgactgcaatatatactcttcacaatgatcaaaactacatatgaagactgtcaaatttttgccttgaacaactgacttttgcagtaaattcttactctgatgcagcattgcacatatgtgagacttataaatttcactgaaaaattttagtatgaggactcctacaggggctgcagaatgtgaagctatttgttgatctaacctgaaaaaatatatatgtgaaggtggtagtgatacggctgtatg

SEQ ID NO: 207469 - DNA, 1533 bp, Zea Mays
tgatcacccactctagaatgacttaacaaatttaagttatctgtgatctttgtaaatcatttttaagttatttcagggtgggtgatcatcacctgggggctggggtgacaaatagcgctgccctataaacacacaagctgcaacactgtttattctgaaatgtctagcattcaagctgcaacatcctatcacttgatgacagaatctaagtgtactgaacttcatgtagtcttgttggatatattttcttgctcctggtgctaacccagcattattttgcatgttcatgtggatcatgtaacttggcacatgaaggcttttttaacttggttgcgactgcagccttgttcctggcagcaaaggcagaagaaacagcatgccttttgaatactgttcttagggcttcatgtgaggtttctcaaaatcaggaattcaatcttcttccttacatgctatgtggtcaggactggtttgaacagtacagagagagtgtaatacaagcggagcaaatgatacttacaacacttgattttgaactcgaagtagcccacccatatgcttccctatcctctgctttgggcaaactaggactcacacatactgttctgtttaatgtggcttggaatctgatcaatgaagggctacgaagttcactttggcttcagttcaagccccatcatattgctgctggagctgcattccttgctgcaaagttcctccactatgacatcacattccatccaaatttctggcatgaattcaagacaagtccatatattgttcaagatgttgtccagcagttgaaggagctactttaggatacaacattcaatgtatttacataatactcagagatcctcttggtttatacgctgtagtgagtagtgatcactgccaaaagtacgtacacattagcatgtggtcactttcatcaattactgaacatctttcatgtaggtttttacaaccacagtgctatgtacaaaaggggaagatgttattcaaaagttgcccttttagttttggggaggtaaaagcaaacaatctttagaagagatgtgacgaacaacaagagataaaaaaggcaaaaaggtgtaagagatgtaaaaagttgatgaaatgttggatcccttaattggttgtccggttgtgattatctgatatatatagaggatggtttatcccaacaataaacgagtcgaaatcgtaaccttcacattatctttagtccaaaattgatttaaaaaccgatctagaaagtattcgatttgaacttgaacagaaaaactgacttgtgggtcccaaaacaaaccatgatgctttcagtagaaggaccgagcagctggcttggccgagcaacaacaggaaaatcggttcggctggtttgagacaagggaattggtttggttggtttgggaatcgacatcgtcggccctgcaggctagacatccatctcctttgctttgtaggcttcaaatgtagtgttccaataatttatttgttattattttgttgtctggaattttgctagtc

SEQ ID NO: 207470 - DNA, 2747 bp, Zea Mays
tttaggtaaactatggggatgtttagatggccgcctaagccgccgccgcccgccacacttcccacgccaccagtgtggcgctcgttttgagcgccacaggtgtggcgcggcgtggccgccggcgcgccgatccaaactagccctatgtatctgcgcaccgtttaacatgtcgccgccggttggaattccctactccattccgagctgccgccatcgccaccactgcgccgccaattcgaatcggatccccactccgttccgagctgccgccatcgccaccgctgcgccgccgattcgaatcggatccccactcctttccaaactgccgccatcgccaccgctgcgtcgccaatgggctcgacgtgcctgtcgtgcggcgagggcgcggtggtggcagacgcggactcgggcgtgctcgtctgcacctcatgcggcatcatccaggacgccggcggcgcggagttcgtccaccagtccaccttcaacgagtcggggggcctcgatcgccgcgtctcctccctcgtccgcaacgactccgactccgcctaccgcgaccagaagctcgccatcgccaccgcgggcatcacctccatcgccacccgcctcggcctgtcccacacccgcgccgaggaggcgctccgcatggccaagtccgccaccgacggccagctcgccaccccgggcagcgccttcctccctgccctcgccgccgcctgcgcccttctcgtcgcgcggtcccaccgcctcccgctctccctcgccgaggccgcggaggccgccttctgctccgcgcccgccctcgccgacctggtctcccgcgtcaccgcccagctatccctccctcccctcccatgcttcgactacaccgccgcgctcgaccgtgccgtgcacctctcgacctcgctcaacgccgccgcgcccgacaagacggacgccattctcgcccaggcccggttcctcttccgctgcgcatccaagtggtcgctcaccacggggcggtttccacttcccctcgtcgcggctctgctcgccttctctgcggaggtgaacggggtcacttctgtctctttggaggacattgcaagggacatctcggcaggattgaggaccagcctgctccgatacaaggagctcgttgacgccctggtgcatgtcgcggggcacctgcttccatggggtgccgatgtcaatgccaagaacctgctcctcaacgctccggtcttgctccggctcatggagatgcggtcacaatcggacccttctgaagagtttcttatgagctgcgctccgaacattgctgcaattgtgcaggctaactctaaagttgatgacgaagtgtctaaataccttcacattactccagtgggttctgatgactttgatttcgataatcttgagccagaggagaaagaatttgaaaatcagaatatctcagagaagggcctatcagatgcttaccaaaatgtcttaaataggcttgcccagctacagaaacttgggaaggttggtaaaggtactgacaggaggaagcgattgaaaggaggactggagctggagccatgcatggacacagtgaataatggttggagaaaggacatgctgcttgaggatgtggtggatattgacgttggctatgatgcacctccaccatcgtttactgctggtttggagttgcagaagcagaggagagcacgtattgaagctgctaagcagcgaattgatgcaactaggaaggctcctgctgctccagctgcaaaagcaaataactcagaagacgttgtaagaaaaaaattgaccatgaagaatcgagggggaaagaagaaggatgatatcgatcatatccttcccagtgacaatatgacaggttgttcaggtgctaggaaaaagagacgaagaggttcctgtgacagtattgattgggaagattgcatcattgagctcctgctactgcatggtgcaaatgaagctgagattgaacaaggccagtacagaagattgttggagttgcatgtattcagtgcagtaagtggggagaattgaaaaatgtctcaagtgttcgccgttgccttcgctgtattagctgctggtgctatagttctgacactcaatgttctactgctgggtgggaacatcatcttcttccaaagcctcagtcttctcggatactgtctgttcccgctggacgtgggggctctgatttgcatgcttaaggacagcgtcatactaaagatggttgtggtgacggtaacattggcatggagctcttgggcagcataccccctcatgagtgctgctgttaacccaaagagaaaggccctggcgctgtatcccgtgttcctcatgtatatctcagttgcatgtctcataattgctatagattaaggcgggcatggtttctacagaactaacagaagaattacaggattttgttttctagctggatcatcaaaatgcatattattttctttttttggctgcgtatagatctgggttcacattgttattgtagtttttgctggctgcttcaatactttatttcattttgtttaagaaaaaaatcacagggatttagaatgtagtcaatcaaatgtatgaatgttgtatagccatacagatatcttgctgtttcgcatctatgtggataatctggaatggactgctgaagcctgaataagtgaattactctgttttaccatttcgtttgggggtgtggactgtagaacagttagggggtgtttggtttgtgg

SEQ ID NO: 207471 - DNA, 2823 bp, Zea Mays
tttaggtaaactatggggatgtttagatggccgcctaagccgccgccgcccgccacacttcccacgccaccagtgtggcgctcgttttgagcgccacaggtgtggcgcggcgtggccgccggcgcgccgatccaaactagccctatgtatctgcgcaccgtttaacatgtcgccgccggttggaattccctactccattccgagctgccgccatcgccaccactgcgccgccaattcgaatcggatccccactccgttccgagctgccgccatcgccaccgctgcgccgccgattcgaatcggatccccactcctttccaaactgccgccatcgccaccgctgcgtcgccaatgggctcgacgtgcctgtcgtgcggcgagggcgcggtggtggcagacgcggactcgggcgtgctcgtctgcacctcatgcggcatcatccaggacgccggcggcgcggagttcgtccaccagtccaccttcaacgagtcggggggcctcgatcgccgcgtctcctccctcgtccgcaacgactccgactccgcctaccgcgaccagaagctcgccatcgccaccgcgggcatcacctccatcgccacccgcctcggcctgtcccacacccgcgccgaggaggcgctccgcatggccaagtccgccaccgacggccagctcgccaccccgggcagcgccttcctccctgccctcgccgccgcctgcgcccttctcgtcgcgcggtcccaccgcctcccgctctccctcgccgaggccgcggaggccgccttctgctccgcgcccgccctcgccgacctggtctcccgcgtcaccgcccagctatccctccctcccctcccatgcttcgactacaccgccgcgctcgaccgtgccgtgcacctctcgacctcgctcaacgccgccgcgcccgacaagacggacgccattctcgcccaggcccggttcctcttccgctgcgcatccaagtggtcgctcaccacggggcggtttccacttcccctcgtcgcggctctgctcgccttctctgcggaggtgaacggggtcacttctgtctctttggaggacattgcaagggacatctcggcaggattgaggaccagcctgctccgatacaaggagctcgttgacgccctggtgcatgtcgcggggcacctgcttccatggggtgccgatgtcaatgccaagaacctgctcctcaacgctccggtcttgctccggctcatggagatgcggtcacaatcggacccttctgaagagtttcttatgagctgcgctccgaacattgctgcaattgtgcaggctaactctaaagttgatgacgaagtgtctaaataccttcacattactccagtgggttctgatgactttgatttcgataatcttgagccagaggagaaagaatttgaaaatcagaatatctcagagaagggcctatcagatgcttaccaaaatgtcttaaataggcttgcccagctacagaaacttgggaaggttggtaaaggtactgacaggaggaagcgattgaaaggaggactggagctggagccatgcatggacacagtgaataatggttggagaaaggacatgctgcttgaggatgtggtggatattgacgttggctatgatgcacctccaccatcgtttactgctggtttggagttgcagaagcagaggagagcacgtattgaagctgctaagcagcgaattgatgcaactaggaaggctcctgctgctccagctgcaaaagcaaataactcagaagacgttgtaagaaaaaaattgaccatgaagaatcgagggggaaagaagaaggatgatatcgatcatatccttcccagtgacaatatgacaggttgttcaggtgctaggaaaaagagacgaagaggttcctgtgacagtattgattgggaagattgcatcattgagctcctgctactgcatggtgcaaatgaagctgagattgaacaaggccagtacagaagattgttggagttgcatgtattcagtgcagtaagtggggagaattgaaaaatggttaatgcccgtgcgttgcgacagcaaaatcgatcgcgagaagcaagaaagagaaatatacctacatgctttgcactctcaagtgttcgccgttgccttcgctgtattagctgctggtgctatagttctgacactcaatgttctactgctgggtgggaacatcatcttcttccaaagcctcagtcttctcggatactgtctgttcccgctggacgtgggggctctgatttgcatgcttaaggacagcgtcatactaaagatggttgtggtgacggtaacattggcatggagctcttgggcagcataccccctcatgagtgctgctgttaacccaaagagaaaggccctggcgctgtatcccgtgttcctcatgtatatctcagttgcatgtctcataattgctatagattaaggcgggcatggtttctacagaactaacagaagaattacaggattttgttttctagctggatcatcaaaatgcatattattttctttttttggctgcgtatagatctgggttcacattgttattgtagtttttgctggctgcttcaatactttatttcattttgtttaagaaaaaaatcacagggatttagaatgtagtcaatcaaatgtatgaatgttgtatagccatacagatatcttgctgtttcgcatctatgtggataatctggaatggactgctgaagcctgaataagtgaattactctgttttaccatttcgtttgggggtgtggactgtagaacagttagggggtgtttggtttgtgg

SEQ ID NO: 207472 - DNA, 1937 bp, Zea Mays
ctgtaaacgacatgcggacggtactgccggagttcaacgtctgacgcctttcctacatggcgctgatgaggctgctcatgattgcctcgctcccgctcccgctcccgtctctatcgtataagacgtcgcgctgctgctgccaccgcagtcgccgactcgtccgcagtgcaatgccgggggcctgccaggacctcagcaccatcacgcccacaccacggcggcagagtatggcgcagctccagcgcgggtccgtgctggttggtgggcgcgagctcctcgtccgcgccccgcccaacgtcaacctacggcccgccggtgccggcgtcgccgacggcggggccgcctcgggcgccgcgttcctcggagccagggctccggccgcgtccagccgccacgtgttctccgtcggaaacctggctagtgggtggaggtggttgtcgttgttcaggttcaagatctggtggatgatcccggccacgggcgtcggcgcggcggctgtgccggcggagacgcagatgctgcttctggagtacaggagcgaggcgggtcctgcggccgcgacggagcgtggctcactgtacgcgctggtgctgccggttcttgacggcggcttccgagccagcctccaggggagccccgaggacgagctacagttctgcttcgagagcggtgatcctgatgtccagacgatggaagcagttgatgcagtgttcgtcaactcaggggacaaccccttcaagcttctgaaagaatccatcaagatgttgtccaagatcaaaggaactttcagtcatatagaggacaaggagatcccttcaaatttgaactggtttgggtggtgcacttgggatgcattttacaaagctgttaacccaagtgggattgaggagggccttcaaagtctgcgtgaaggtggtgtgccaccaaggtttctgattatagatgatggttggcaagaaacagttgacgaaatcaaggaagtggatgaagccctccgtgagcagactgtatttgcgcagaggctggctgatctgaaggagaatcataagttcaggggggaaacctgcaagaatcttgaggaccttgttaaaacgataaaagaaaaacatggagtcaaatgcaatgtgcaaaactataggtgcgtctacatgtggcatgctttacttggatattggggaggcaccttagcagcatccaaagtgatgaagaagtataatccaaagcttgtttatccagtccaatcgcggggtaatgttgcaaatctgagggatattgccatggatagcttggagaaatttggagtgggtatcgttgatcctgacaagatatatgagttctacaatgatcagcacagctacctttctagtgtgggtgtggatggcgtgaaggttgatgttcagaacgtgttggaaactcttggacgcggatttggtggtcgtgttgcagtaactcgaaagtaccagcaggctcttgaggaatcaattgcccagaacttcaaaacaaacaacctaatctgttgcatgagtcacaattcagacagcatctttagtgccttgaagagtgcagttgctagagcctcagaagatttcatgcctcgggaaccaacactgcaaactctgcacattgcgtctgtggcattcaatagcctattgttgggagaaatcttcatacctgactgggatatgttccatagcaagcatgaatcagcggaattccacggagcagctagagccctgagtggaggtggtgtttatgtcagtgacaaacctggggtgcatgatttcagtgttctaaaaaagcttgttctaccagatggttcgattctaagagcaaggtatgctggtcgtcctacacgcgattgtctgttcactgacccagtcatggatggcaaaaggtatgagcacgaatatagatttacattttcttttgctactaag

SEQ ID NO: 207473 - DNA, 1320 bp, Zea Mays
agctacaagctagaacaaggccatccattccaccacccttgtagtagtgcgcgctgttcgcttgcactagctagccagcagcgtgcgcaccacctctcgccgcggcagcgacgacgacgggaggcttgttgagagctagctagctagctcagcgagttcgagagcctgtgtgctagagagacagacagagagagagaaaacatactcctcctctgcacacaggggagctagaagctagcgttaattatagcacagctagccgcaaccgtcgcaggatatatatatagacgacagcaccgatcgagagtagtacgtgaggccggcatgacgatgaggcagtcgaggttcaagaggatctgcgtgttctgcggcagcagccaggggaagaagcggagctaccatgacgccgccattgagctcggcaacgagctggtggcccggagcgtcgacctggtgtacggcggcggcagcatcgggctcatgggcctcgtctcccaggccgtctacgacggcggccggcacgtcatcggggtcattcccaagacgctcatgacaccagaggtcgggctgctgaacgtggacggctactacaactcgctgctgaccttcatcgacaaggccgtggaggagggcttcatcaaccccagcgcccgccgcatcatcgtcctcgcgcccaccgcgcaggagctcatggacaagctcgaggagtacgagccttaccacgacatggtggcgtccacgctcaactgggagatgggcaacctgcaggggtactgacgatcgacaccaccactgcgcatgcaagagcccgccagagagctagctaggcagtgcagctagcgcgcggcgcctgaatctgatgaagcacagccggggaacggggcattcgatcggtggattattaagcaacgagcgagcttaactagatagccgtcgtcagctacattgggattttccttttctttttattaactcgacgcaggtctcggtttggagtgccgggcgaaggaaaaaaaaaagggtttggttggcgtacgtagcaggagtatgtcgtagctgctagctagcttgttctgtatatgatgcctcgtgttaattagtttgcttccaccggggatgacgacgatgatggcttgcagtgttgcttgtagcgcagtaagaaaaaaaaaacttggccggtttccccggcctccctccctgctgtgtacgttctggttagtagtgttagcagccggtacctgcctatgtatgctaccttcaagatgctcaattcgattggatatatatatgcagcagatcaacccagcaagtgtgtaatac

SEQ ID NO: 207474 - DNA, 1162 bp, Zea Mays
cctgtttttttttttgttcaagaggatctgcgtgttctgcggcagcagccaggggaagaagcggagctaccatgacgccgccattgagctcggcaacgagctggtggcccggagcgtcgacctggtgtacggcggcggcagcatcgggctcatgggcctcgtctcccaggccgtctacgacggcggccggcacgtcatcggggtcattcccaagacgctcatgacaccagagataagcggcgagacggtcggggaggtgcgggcggtggccgacatgcaccagaggaaggcggagatggcgcggcagtccgacgcattcatcgccctgcctggagggtatgggacgctggaggagctgctggaggtcatcacgtgggcgcagctaggcatccaccacaagccggtcgggctgctgaacgtggacggctactacaactcgctgctgaccttcatcgacaaggccgtggaggagggcttcatcaaccccagcgcccgccgcatcatcgtcctcgcgcccaccgcgcaggagctcatggacaagctcgaggagtacgagccttaccacgacatggtggcgtccacgctcaactgggagatgggcaacctgcaggggtactgacgatcgacaccaccactgcgcatgcaagagcccgccagagagctagctaggcagtgcagctagcgcgcggcgcctgaatctgatgaagcacagccggggaacggggcattcgatcggtggattattaagcaacgagcgagcttaactagatagccgtcgtcagctacattgggattttccttttctttttattaactcgacgcaggtctcggtttggagtgccgggcgaaggaaaaaaaaaagggtttggttggcgtacgtagcaggagtatgtcgtagctgctagctagcttgttctgtatatgatgcctcgtgttaattagtttgcttccaccggggatgacgacgatgatggcttgcagtgttgcttgtagcgcagtaagaaaaaaaaaacttggccggtttccccggcctccctccctgctgtgtacgttctggttagtagtgttagcagccggtacctgcctatgtatgctaccttcaagatgctcaattcgattggatatatatatgcagcagatcaacccagcaagtgtgtaatac

SEQ ID NO: 207475 - DNA, 1513 bp, Zea Mays
attcgcaccaccgccgcgccgcccaaaccctagccgccgccgccgccgccgccgccatggtcgccgtcaaccgccccctcgtctccgtgaaggccctagagggcgacatggtaaccgacgcccccggcatcgccttaccgcccgtcttcggggcgccgatccgccccgacgtggtcaggttcacccacaagctgctgtcctgcaacaagcgccagccctacgcagtctcccgccgcgccggccaccagacgtcggccgagtcctggggtaccggccgcgccgtgtctcgtatcccccgcgtccccggcggcggcacccaccgcgccggccagggagcgttcggcaacatgtgccgcggcgggcgcatgttcgcgcccaccaagatctggcgcaagtggcaccgccgcgtcaacatcaaccaccgccgtcccggccctcgtccaggcgcgcggccaccgcatcgagtctgtccccgagatgccccttgtcatttccgactccgcggagtccattgagaagacctcccaggcgctcaagatcctcaagcagatcggcgcccacgccgacgccgagaaggccaaggactccgtcggcatccgccccggcaagggtaagatgcgcaaccgtcgctacatcaaccgcaagggcccgctcatcgtctacggcaccgagggctccaaggtcgtcaaggccttccgcaaccttcccggtgtggatgttgccaacgtcgagcgcctcaacctactagaccttgcccccggtggccaccttgggcgctttgtgatctggacccagagcgcgttcaataagctcgaggaggtgtatgggagctatgacgccccgtcgcagaagaagaagggcttcgtgctgccgaggcctaagatgtccaacgctgacctgggcaggatcatcaactctgacgaggtgcagtctgtggtgaagccactcaacaaggaagtgaagcgcagggagaagaggaagaacccactcaagaacatggctgctgtgctcaaactcaacccctacctcggcactgcccggaagatggccacccttgctgaggctgctcgtgtgaaggccaggaaggcgaagctcgactccaagaggaccaagcttaccccggagactgccaaggttaaggctgctggcaaggcatggtacaagaccatggtctcggacagcgactacaccgagtttgagaacttctcaaagtggctcggcgtgactcagtgagcggcaagggtagttaagttttgagtagctcagcttatgttgagaggaaagaggatccatcaaatctgttttatcctgcatcatcataacaagttgctacaagtcttgcatgttcgtgttgtttgtgcatttccgcgagaacatagtatttttatattcgaaccagttgtctgaactgtgcttggatttgtgcactgatgcttggctcaacctttctgtatcacgaatgagctggtccttgctgaaaatggtttacagaaaaagaaaacaggaatactcg

SEQ ID NO: 207476 - DNA, 2301 bp, Zea Mays
ctctttgattccgtaggttcacgagttagggtttgcttgtgtgggtttcgggcctcgatttgctcaattgaggacggattttgcacggggcgtcggatctatgcgtgtcctgtatgttgtacctaggattgttgccaattctcccgtcaattttgcgtgatttttctggttgtcggatgaggggttagggtttcgttcggtccagaggtgttggactcctattcgcgcattcgttagggcttcatgccgcgatatccgagcctcttgcttgaattagttattgcatgaacattgaacagaaacgttgttatgtaacttactggttatagacggcaattcatctgtgcccttcatcatggtagttgaatatggactgtaattcattattttattctaccctctcagtagtttagacaagcatgctgcatcaggagaacagtgagccgttcgtgaggcaccactctgagcagcttgcgtgtggcaacatgaggggagcagataatggtcgtccgaatttccttcctgagaagtgccagattgcagtcacaattggtgccaagtggtgtcaaggaaacaccaatagtggatcaaaacaagagacctgcatccagtgacatgcttgacatagttgaatgcaaacgtctgaagcaggaaggtcaaaaggattttcatgagtaccccacatacacgacttgcagaagaagctttgactcaccactatctgagagcgaggatagtgaagatgaaggtgtagattcacctctccatttttcacatgctcacacctatgttgaagatgatctatggcctgccagctttcatcatgctctgggcccttttcccttgaggaaacctgttcctatcgggccaaatcatcaggctgaattacctgagtgcaggccattttgtggaagaactgaagaaggcgaaagtgtcaagtggatcagaaacggtgttgtgccaatgcctgatactggtgcatcgtctttggtgttggaacctgttcactgcaaggcagactgtgagtgtcatgatgaaggttcaatcatttgtgtgaaaaagcatgtgagggaagcaagagaaaagctgaagggttctgttggtgcagacaccttcagggagttgggtttgaatgatatgggtgaagaggttggctcaaggtggacagaagaggaggaacatttgttccagcaggttgtcttgtcaaaccctgcttctctgtgcagaaacttttgggatgaactccctcttgccttcccttccaagtccagcaaagaactagtgagctactacttcaatgtattcatgttgaggaagagggctgagcagaacagatttgacccagtgaacatcgacagtgatgatgacgaatggcaggcaggtgacgatggtgagtatccaatcacaggaagaactgatgaatacttgccaactgagtctcttactgatcaagatgatgttgcatgcaatccagttcctttagaaagggatctctatgaagattctgatgatgaggatgagctggacaatgccagtggagacaggcataatggtgcccagagggctggtatgttgtcagagggtaatcgtgtaatgtcggtcatagaacataatcaacagacgttcaagttagatgcagaggcgcaagacgactcttgcacatcatttgaggctcatcaggttggtgttgaaggtgggacacatactgatattgctgatgacaatcattacaggagtgacggctttggtggtggtgcagaacatgggttcttcggtaatcagtgtgacacaaaagagtgggacttcggtctcagtatcggttgggaaaagcatgattttttgtcaacaaacaatgtcatagaagaggtgttcgggaagtgctgtgacactgctgaccaggaccttatctgagccagacgcggaggcttcttgtcagctgcgaaaactttagggttctctgaattgtacagcagtagttggctattttgatttaatgcctcacttgttcttacaggaatctcatctctgtccttggaacatcatctgcttgtgatttcgtcacatgattaatgtaaatccgtagtctgttgatagcctgtggaatgtatgtatcatctttgttgtgacggtgtctcttgacctgagcgttttttctatgtgctagcgagggtcatgtaataaaagctgttgttgttccttgaccctgtctgcaaataaatgtaacctgccagtcaatgtattccgaaaggtcatttttatctgatctgaaatctgtagtcgtttccgcggctcgttcgtcgt

SEQ ID NO: 207477 - DNA, 2058 bp, Zea Mays
ttttcttttcccgtttttataaataaatcagcccgaaaaaaggacgcggtcgtggaccgaacaaacctttccccaaaatttccccttccccgcacaccgaacgaactctcgatctgatccctatccttgcagggcccgcctcggctcaccgatccggccccggatccgctcgtcgctcgacgggatctctcgattgtgagccgttcgtgaggcaccactctgagcagcttgcgtgtggcaacatgaggggagcagataatggtcgtccgaatttccttcctgagaagtgccagattgcagtcacaattggtgccaagtggtgtcaaggaaacaccaatagtggatcaaaacaagagacctgcatccagtgacatgcttgacatagttgaatgcaaacgtctgaagcaggaaggtcaaaaggattttcatgagtaccccacatacacgacttgcagaagaagctttgactcaccactatctgagagcgaggatagtgaagatgaaggtgtagattcacctctccatttttcacatgctcacacctatgttgaagatgatctatggcctgccagctttcatcatgctctgggcccttttcccttgaggaaacctgttcctatcgggccaaatcatcaggctgaattacctgagtgcaggccattttgtggaagaactgaagaaggcgaaagtgtcaagtggatcagaaacggtgttgtgccaatgcctgatactggtgcatcgtctttggtgttggaacctgttcactgcaaggcagactgtgagtgtcatgatgaaggttcaatcatttgtgtgaaaaagcatgtgagggaagcaagagaaaagctgaagggttctgttggtgcagacaccttcagggagttgggtttgaatgatatgggtgaagaggttggctcaaggtggacagaagaggaggaacatttgttccagcaggttgtcttgtcaaaccctgcttctctgtgcagaaacttttgggatgaactccctcttgccttcccttccaagtccagcaaagaactagtgagctactacttcaatgtattcatgttgaggaagagggctgagcagaacagatttgacccagtgaacatcgacagtgatgatgacgaatggcaggcaggtgacgatggtgagtatccaatcacaggaagaactgatgaatacttgccaactgagtctcttactgatcaagatgatgttgcatgcaatccagttcctttagaaagggatctctatgaagattctgatgatgaggatgagctggacaatgccagtggagacaggcataatggtgcccagagggctggtatgttgtcagagggtaatcgtgtaatgtcggtcatagaacataatcaacagacgttcaagttagatgcagaggcgcaagacgactcttgcacatcatttgaggctcatcaggttggtgttgaaggtgggacacatactgatattgctgatgacaatcattacaggagtgacggctttggtggtggtgcagaacatgggttcttcggtaatcagtgtgacacaaaagagtgggacttcggtctcagtatcggttgggaaaagcatgattttttgtcaacaaacaatgtcatagaagaggtgttcgggaagtgctgtgacactgctgaccaggaccttatctgagccagacgcggaggcttcttgtcagctgcgaaaactttagggttctctgaattgtacagcagtagttggctattttgatttaatgcctcacttgttcttacaggaatctcatctctgtccttggaacatcatctgcttgtgatttcgtcacatgattaatgtaaatccgtagtctgttgatagcctgtggaatgtatgtatcatctttgttgtgacggtgtctcttgacctgagcgttttttctatgtgctagcgagggtcatgtaataaaagctgttgttgttccttgaccctgtctgcaaataaatgtaacctgccagtcaatgtattccgaaaggtcatttttatctgatctgaaatctgtagtcgtttccgcggctcgttcgtcgt

SEQ ID NO: 207478 - DNA, 2169 bp, Zea Mays
ttttcttttcccgtttttataaataaatcagcccgaaaaaaggacgcggtcgtggaccgaacaaacctttccccaaaatttccccttccccgcacaccgaacgaactctcgatctgatccctatccttgcagggcccgcctcggctcaccgatccggccccggatccgctcgtcgctcgacgggatctctcgattgtttagacaagcatgctgcatcaggagaacagtgagccgttcgtgaggcaccactctgagcagcttgcgtgtggcaacatgaggggagcagataatggtcgtccgaatttccttcctgagaagtgccagattgcagtttgccagaggggtgaaaaagttagcctatttgatgaagggctgatacatggtgttgatctaaccaatcatattgctcagtcacaattggtgccaagtggtgtcaaggaaacaccaatagtggatcaaaacaagagacctgcatccagtgacatgcttgacatagttgaatgcaaacgtctgaagcaggaaggtcaaaaggattttcatgagtaccccacatacacgacttgcagaagaagctttgactcaccactatctgagagcgaggatagtgaagatgaaggtgtagattcacctctccatttttcacatgctcacacctatgttgaagatgatctatggcctgccagctttcatcatgctctgggcccttttcccttgaggaaacctgttcctatcgggccaaatcatcaggctgaattacctgagtgcaggccattttgtggaagaactgaagaaggcgaaagtgtcaagtggatcagaaacggtgttgtgccaatgcctgatactggtgcatcgtctttggtgttggaacctgttcactgcaaggcagactgtgagtgtcatgatgaaggttcaatcatttgtgtgaaaaagcatgtgagggaagcaagagaaaagctgaagggttctgttggtgcagacaccttcagggagttgggtttgaatgatatgggtgaagaggttggctcaaggtggacagaagaggaggaacatttgttccagcaggttgtcttgtcaaaccctgcttctctgtgcagaaacttttgggatgaactccctcttgccttcccttccaagtccagcaaagaactagtgagctactacttcaatgtattcatgttgaggaagagggctgagcagaacagatttgacccagtgaacatcgacagtgatgatgacgaatggcaggcaggtgacgatggtgagtatccaatcacaggaagaactgatgaatacttgccaactgagtctcttactgatcaagatgatgttgcatgcaatccagttcctttagaaagggatctctatgaagattctgatgatgaggatgagctggacaatgccagtggagacaggcataatggtgcccagagggctggtatgttgtcagagggtaatcgtgtaatgtcggtcatagaacataatcaacagacgttcaagttagatgcagaggcgcaagacgactcttgcacatcatttgaggctcatcaggttggtgttgaaggtgggacacatactgatattgctgatgacaatcattacaggagtgacggctttggtggtggtgcagaacatgggttcttcggtaatcagtgtgacacaaaagagtgggacttcggtctcagtatcggttgggaaaagcatgattttttgtcaacaaacaatgtcatagaagaggtgttcgggaagtgctgtgacactgctgaccaggaccttatctgagccagacgcggaggcttcttgtcagctgcgaaaactttagggttctctgaattgtacagcagtagttggctattttgatttaatgcctcacttgttcttacaggaatctcatctctgtccttggaacatcatctgcttgtgatttcgtcacatgattaatgtaaatccgtagtctgttgatagcctgtggaatgtatgtatcatctttgttgtgacggtgtctcttgacctgagcgttttttctatgtgctagcgagggtcatgtaataaaagctgttgttgttccttgaccctgtctgcaaataaatgtaacctgccagtcaatgtattccgaaaggtcatttttatctgatctgaaatctgtagtcgtttccgcggctcgttcgtcgt

SEQ ID NO: 207479 - DNA, 2214 bp, Zea Mays
ttttcttttcccgtttttataaataaatcagcccgaaaaaaggacgcggtcgtggaccgaacaaacctttccccaaaatttccccttccccgcacaccgaacgaactctcgatctgatccctatccttgcagggcccgcctcggctcaccgatccggccccggatccgctcgtcgctcgacgggatctctcgattgtttagacaagcatgctgcatcaggagaacagtgagccgttcgtgaggcaccactctgagcagcttgcgtgtggcaacatgaggggagcagataatggtcgtccgaatttccttcctgagaagtgccagattgcagtttgtcctgaagtttgccagaggggtgaaaaagttagcctatttgatgaagggctgatacatggtgttgatctaaccaatcatattgctcagtcacaattggtgccaagtggtgtcaaggaaacaccaatagtggatcaaaacaagagacctgcatccagtgacatgcttgacatagttgaatgcaaacgtctgaagcaggaaggtcaaatcgtaactaaggaagacaaccatacatctgcagaggattttcatgagtaccccacatacacgacttgcagaagaagctttgactcaccactatctgagagcgaggatagtgaagatgaaggtgtagattcacctctccatttttcacatgctcacacctatgttgaagatgatctatggcctgccagctttcatcatgctctgggcccttttcccttgaggaaacctgttcctatcgggccaaatcatcaggctgaattacctgagtgcaggccattttgtggaagaactgaagaaggcgaaagtgtcaagtggatcagaaacggtgttgtgccaatgcctgatactggtgcatcgtctttggtgttggaacctgttcactgcaaggcagactgtgagtgtcatgatgaaggttcaatcatttgtgtgaaaaagcatgtgagggaagcaagagaaaagctgaagggttctgttggtgcagacaccttcagggagttgggtttgaatgatatgggtgaagaggttggctcaaggtggacagaagaggaggaacatttgttccagcaggttgtcttgtcaaaccctgcttctctgtgcagaaacttttgggatgaactccctcttgccttcccttccaagtccagcaaagaactagtgagctactacttcaatgtattcatgttgaggaagagggctgagcagaacagatttgacccagtgaacatcgacagtgatgatgacgaatggcaggcaggtgacgatggtgagtatccaatcacaggaagaactgatgaatacttgccaactgagtctcttactgatcaagatgatgttgcatgcaatccagttcctttagaaagggatctctatgaagattctgatgatgaggatgagctggacaatgccagtggagacaggcataatggtgcccagagggctggtatgttgtcagagggtaatcgtgtaatgtcggtcatagaacataatcaacagacgttcaagttagatgcagaggcgcaagacgactcttgcacatcatttgaggctcatcaggttggtgttgaaggtgggacacatactgatattgctgatgacaatcattacaggagtgacggctttggtggtggtgcagaacatgggttcttcggtaatcagtgtgacacaaaagagtgggacttcggtctcagtatcggttgggaaaagcatgattttttgtcaacaaacaatgtcatagaagaggtgttcgggaagtgctgtgacactgctgaccaggaccttatctgagccagacgcggaggcttcttgtcagctgcgaaaactttagggttctctgaattgtacagcagtagttggctattttgatttaatgcctcacttgttcttacaggaatctcatctctgtccttggaacatcatctgcttgtgatttcgtcacatgattaatgtaaatccgtagtctgttgatagcctgtggaatgtatgtatcatctttgttgtgacggtgtctcttgacctgagcgttttttctatgtgctagcgagggtcatgtaataaaagctgttgttgttccttgaccctgtctgcaaataaatgtaacctgccagtcaatgtattccgaaaggtcatttttatctgatctgaaatctgtagtcgtttccgcggctcgttcgtcgt

SEQ ID NO: 207480 - DNA, 2217 bp, Zea Mays
ttttcttttcccgtttttataaataaatcagcccgaaaaaaggacgcggtcgtggaccgaacaaacctttccccaaaatttccccttccccgcacaccgaacgaactctcgatctgatccctatccttgcagggcccgcctcggctcaccgatccggccccggatccgctcgtcgctcgacgggatctctcgattgtagtttagacaagcatgctgcatcaggagaacagtgagccgttcgtgaggcaccactctgagcagcttgcgtgtggcaacatgaggggagcagataatggtcgtccgaatttccttcctgagaagtgccagattgcagtttgtcctgaagtttgccagaggggtgaaaaagttagcctatttgatgaagggctgatacatggtgttgatctaaccaatcatattgctcagtcacaattggtgccaagtggtgtcaaggaaacaccaatagtggatcaaaacaagagacctgcatccagtgacatgcttgacatagttgaatgcaaacgtctgaagcaggaaggtcaaatcgtaactaaggaagacaaccatacatctgcagaggattttcatgagtaccccacatacacgacttgcagaagaagctttgactcaccactatctgagagcgaggatagtgaagatgaaggtgtagattcacctctccatttttcacatgctcacacctatgttgaagatgatctatggcctgccagctttcatcatgctctgggcccttttcccttgaggaaacctgttcctatcgggccaaatcatcaggctgaattacctgagtgcaggccattttgtggaagaactgaagaaggcgaaagtgtcaagtggatcagaaacggtgttgtgccaatgcctgatactggtgcatcgtctttggtgttggaacctgttcactgcaaggcagactgtgagtgtcatgatgaaggttcaatcatttgtgtgaaaaagcatgtgagggaagcaagagaaaagctgaagggttctgttggtgcagacaccttcagggagttgggtttgaatgatatgggtgaagaggttggctcaaggtggacagaagaggaggaacatttgttccagcaggttgtcttgtcaaaccctgcttctctgtgcagaaacttttgggatgaactccctcttgccttcccttccaagtccagcaaagaactagtgagctactacttcaatgtattcatgttgaggaagagggctgagcagaacagatttgacccagtgaacatcgacagtgatgatgacgaatggcaggcaggtgacgatggtgagtatccaatcacaggaagaactgatgaatacttgccaactgagtctcttactgatcaagatgatgttgcatgcaatccagttcctttagaaagggatctctatgaagattctgatgatgaggatgagctggacaatgccagtggagacaggcataatggtgcccagagggctggtatgttgtcagagggtaatcgtgtaatgtcggtcatagaacataatcaacagacgttcaagttagatgcagaggcgcaagacgactcttgcacatcatttgaggctcatcaggttggtgttgaaggtgggacacatactgatattgctgatgacaatcattacaggagtgacggctttggtggtggtgcagaacatgggttcttcggtaatcagtgtgacacaaaagagtgggacttcggtctcagtatcggttgggaaaagcatgattttttgtcaacaaacaatgtcatagaagaggtgttcgggaagtgctgtgacactgctgaccaggaccttatctgagccagacgcggaggcttcttgtcagctgcgaaaactttagggttctctgaattgtacagcagtagttggctattttgatttaatgcctcacttgttcttacaggaatctcatctctgtccttggaacatcatctgcttgtgatttcgtcacatgattaatgtaaatccgtagtctgttgatagcctgtggaatgtatgtatcatctttgttgtgacggtgtctcttgacctgagcgttttttctatgtgctagcgagggtcatgtaataaaagctgttgttgttccttgaccctgtctgcaaataaatgtaacctgccagtcaatgtattccgaaaggtcatttttatctgatctgaaatctgtagtcgtttccgcggctcgttcgtcgt

SEQ ID NO: 207481 - DNA, 3243 bp, Zea Mays
cttttctcccttctaactcaacatttagctttttatagtccgttattatacttgctctaatagttagctcttcgctgctaatgtaggatttacttatctctctcataattttttttttggttttttgtgtctaaactctaaacccgttaagtttgtaaccgcctccctccttcaactgtctcagcagattgtgcagcaccgtgttctccctcccttcccaatcccctatcccgttactttccccggctccaccccaaaccctaatacgtcatggcgctcactacacggggcggcgccggcggcggggatcccgcgaaggcgccgtccgcctccgaccccagcctcggcttcctcaccaagcgcgataccgaggtcaagctaccccgcgcaacgcgggtcaagaacaagacccccgcgccgatccagattacggccgagcagatcctccgggaggccagggagaggcaggagcctgagatccgcccgcccaaacagaagatcacagacccccacgagctctccgattaccgcctccgtaagcggaaggagttcgaggacgtcatccgccgcgtgcgctggagcgtctcggcatgggtcaagtacgcgcggtgggaggagcagcagcgagacttcgcgcgcgcgcgctccgtctacgagcgcgcgctcgacgtcgcccaccgcgaccacacgctctggctcaaatatgctgaattcgagatgcggaaccggtttgtcaaccatgcccggaatgtctgggaccgcgcggtgtcgctcctcccccgggtggatcagctctggtacaagtacatccacatggaggagctgcttggtgcagttgccaatgcgcgccaggtgttcgagcgctggatgtcttggcgacccgacacagccggctggaattcttacatcaagtttgagctgcggtacggggaggtcgagcgtgccagggctatctatgagcggtttgtagctgagcacccaaggccagataccttcatccgctatgctaagtttgagatgaagctcggcgaggtcgagcgggcacggcgggtgtatgagcgtgcagcagacctgcttgctgatgatgaggatgctgaagtgttatttgtggcatttgcagagtttgaggagaggtgccgcgaggtcgagcgagcacgtgcaatatacaagtatgctctagacagggtgcccaagggtcgtgctgaggaactgtataggaagtttcttgcatttgagaaacagtttggtgaccgtgagggaatagaagatgccattgtgggcaagaggagatttcagtacgaggatgaggttaggaagaatccactaaactacgactcatggtttgattatatcaggctggaggagagtgttgggaataaggacaggatcagggaggtgtacgagagggccattgccaacgtgccccctgcagaggagaagcgatactggcagaggtacatatacctctggattaactatgcactctatgaggagctagacgcacaagacagagaacggacaagagaggtttacaaggaatgcctgaggttgattcctcacaagaaattcacgtttgcaaagatgtggctcatggcggcccagtttgagatacggcagagaaatctaaaggctgcaagacaaattcttggaaatgcaattggaatggccccaaagggcaagatattcaagaaatatattgaaattgagctttatctgggcaactttgaccgttgtaggactctttatgagaaatatattgaatggtccccagcaaactgttatgcctggaggaagtatgccgaattggagaagaaccttagtgagactgatcgtgctcgatcaatatatgaacttgctattgcacaaccagcccttgatacaccagaggttctgtggaaggagtacttgcagtttgaaattgatgaaaatgaatttgagaggacaaggcaactatatgagagactgcttgataggacaaaacatttgaaggtatggatcagttatgctgagtttgaggcctctgctggcttgggcggtgaagacggtgaagacaaggagaaaaagaatgaagttagttatcaggagcagcagatggagcgggttcaaaaatgtagagctgtctttgaaagggcatttgattacttcagaaccagtgccccagagttgaaggaggaaagagctatgcttcttgaagaatggcttaataaggaggtgaactttggtgatcttggagatgtcagcttagtgcaaaagaaggcaccaagaaaagtcaagcggaagagaccaatccctacagaagatggctccactatagcatatgaggagtatatagattacattttccctgatgaagttgctctagcaccaaacctgaagatcctagaagctgcttacaaatggaagaagcaaaaaactggagatggcgatgagtgatcctggcatcttagtatggcattgtcgtggttcgtgagcattttgccacagccaaaatcagatgccctgcaacactctggccagagctatcggaatgagaatagtcattttttcatgtcacaaaggatgttgttgctgttgaaaagaatcctgcgaattacatttaacttgtaactgtatgggctgtagtttggtggccatgagttgcttccatgcgtcggaacaatgagggctacacaagtcgagatggtgtatgggagtttgtcttgcaattgcaaaggtatctctccagtctatgctttttatgaagtcagtaaactgggcgtcttcgacttcaatcgctggccatgccggtcacgctggtgtccagggttcagttggagggcttgcagttgcagaagatcctaccagcaaaacgtcatcttcagtgcctagcagctctgtttattagccagtgaggcttttggttcctaatagtctgttgccaagtttggttcttggcagagctaatttattagaaagaaaaacaagaaaagtacaagacaaccaaaaaaagcaaaaggaaagggaagggggacagctatagtaaagcgaagaaatcatgttcttttatgtgtgtcttgtgattttggcaagcctagacttgccatgaattgtcttattaggccattctcagttgtagttttatcacatcatttttaatgttaccacgtcaataatgtttaatgaaataaaaaaaataaaatatgctctcttaatgaagagttttagtggcatgattttataggctaacatgtgacttcaatgttg

SEQ ID NO: 207482 - DNA, 1859 bp, Zea Mays
gtaggatttacttatctctctcataattttttttttggttttttgtgtctaaactctaaacccgttaagtttgtaaccgcctccctccttcaactgtctcagcagattgtgcagcaccgtgttctccctcccttcccaatcccctatcccgttactttccccggctccaccccaaaccctaatacgtcatggcgctcactacacggggcggcgccggcggcggggatcccgcgaaggcgccgtccgcctccgaccccagcctcggcttcctcaccaagcgcgataccgaggtcaagctaccccgcgcaacgcgggtcaagaacaagacccccgcgccgatccagattacggccgagcagatcctccgggaggccagggagaggcaggagcctgagatccgcccgcccaaacagaagatcacagacccccacgagctctccgattaccgcctccgtaagcggaaggagttcgaggacgtcatccgccgcgtgcgctggagcgtctcggcatgggtcaagtacgcgcggtgggaggagcagcagcgagacttcgcgcgcgcgcgctccgtctacgagcgcgcgctcgacgtcgcccaccgcgaccacacgctctggctcaaatatgctgaattcgagatgcggaaccggtttgtcaaccatgcccggaatgtctgggaccgcgcggtgtcgctcctcccccgggtggatcagctctggtacaagtacatccacatggaggagctgcttggtgcagttgccaatgcgcgccaggtgttcgagcgctggatgtcttggcgacccgacacagccggctggaattcttacatcaagtttgagctgcggtacggggaggtcgagcgtgccagggctatctatgagcggtttgtagctgagcacccaaggccagataccttcatccgctatgctaagtttgagatgaagctcggcgaggtcgagcgggcacggcgggtgtatgagcgtgcagcagacctgcttgctgatgatgaggatgctgaagtgttatttgtggcatttgcagagtttgaggagaggtgccgcgaggtcgagcgagcacgtgcaatatacaagtatgctctagacagggtgcccaagggtcgtgctgaggaactgtataggaagtttcttgcatttgagaaacagtttggtgaccgtgagggaatagaagatgccattgtgggcaagaggagatttcagtacgaggatgaggttaggaagaatccactaaactacgactcatggtttgattatatcaggctggaggagagtgttgggaataaggacaggatcagggaggtgtacgagagggccattgccaacgtgccccctgcagaggagaagcgatactggcagaggtacatatacctctggattaactatgcactctatgaggagctagacgcacaagacagagaacggacaagagaggtttacaaggaatgcctgaggttgattcctcacaagaaattcacgtttgcaaagatgtggctcatggcggcccagtttgagatacggcagagaaatctaaaggctgcaagacaaattcttggaaatgcaattggaatggccccaaagggcaagatattcaagaaatatattgaaattgagctttatctgggcaactttgaccgttgtaggactctttatgagaaatatattgaatggtccccagcaaactgttatgcctggaggaagtatgccgaattggagaagaaccttagtgagactgatcgtgctcgatcaatatatgaacttgctattgcacaaccagcccttgatacaccagaggttctgtggaaggtgtcatttagaacttccgcaaattaatctactcgatgcagc

SEQ ID NO: 207483 - DNA, 1411 bp, Zea Mays
ttttcttttcccgtttttataaataaatcagcccgaaaaaaggacgcggtcgtggaccgaacaaacctttccccaaaatttccccttccccgcacaccgaacgaactctcgatctgatccctatccttgcagggcccgcctcggctcaccgatccggccccggatccgctcgtcgctcgacgggatctctcgattggtcgagctgggacagcagaacatcgactggcgagtgcagcaggagaaattcatctgagtcactaaggagcagaacatcggctggcgggcgcagaagcaggagaaactcatctgagtcactaaggagcagctggaacaaaaagctcaaggtcaccagccagcatccattcaagttgaggacagagcaaaggggaaagtttaaggaacagcagttcgtccaaaaggtgcaagagatgcttgcagaggaagagaagaagcgtattcatattgcgcaaggattgccatggactaccgatgaacccgagtgtttgataaagcctgcagtcaaagaaagaactgagccgatagaccttgttttgcatagcgatgtgcgtgctcttgaacgtgcagaatttgatcagcacgttttggataggaacaagtttgctgagcaacaaagattagaatgggaaaggcaacaggaattagacgaagaagaaaggataaggcaactgaggagaaccgagctgattcctaaagctcagcccatgccatactttgaccgcccattcatccccaaaaggtccacaaaacctcctacagttcccatggaaccgaaattctacctcaggccagaaaagttatcctgttactatcgacagcaatgtatggaacttggaaagctgaatccacaacatcagtgccaacatccgctgtggcaatcgagaaatgcagagcatcgacacacatgatccaacaactgtttccatttcctggcatcgtcttattcattcttgattcgtcttcttccatgtgcgaagaaattgctatcaagcgtgtttttgtagctttgcttggatcgccttgcctccaagttctgttaatcgctggctctgtgcttcagatgcaatcccaccgaggtttgaaatttgtcgttcaagaaactgataaggaaattcaaggatgaattttctgtggtatattaatatgtactttaatgttggttcttgcccgctatgcatgagcccggcagtcccagtgtgcttttatatggtagtttctatttgtgcttaagtatataatataagagaaaaatatgttgtatatgagtttagaaccaacaattatggttcgaacctttatgtctgcatggttttggcatttaactatgagttagcacaatggccatagaaaccgtgaaactagagaaactggtgttttaatatagtagatagag

SEQ ID NO: 207484 - DNA, 2502 bp, Zea Mays
gctactgctactacctacagtacggtgctgccgcctcgcctctcctctccgtccttccttttccgctttgcccgctttcctccttttctctctctttttcgcctttgctgctttgcggcctttgttcaaggttcgacgacacgtccgactccgatcggcggtttcatcgcctcatcggcggccgcgggcggcatctcccttggcttccccccctccactttgctcgctgcttgttcgcttgcgtgcgcgctttttactgttccgcagtcagtcgccaccacatccattctccgtcttcttcctcgcccgccgacccctgaccctgaggccctgaccaccgccgctgcgcccgctgacatttgtctccccggtcgccgaagaggcgaacgtttacgttgctggattcgcgtttatcttcccccgcattacttaccgttgccccacgtcagaggatctcgttccgctcctggagcctgcttggcttctcttgacttgggctttcgcagcgctgctggctgttgctacgtcccctcgctcttcctctcctctgctctgctctcagggtcgcttccttcctctgcccagattgattgttctcgaggttcagatcttggacttggaccctttcgtcggctactcagagttccagaacccgtcccgcgcttgttccagcagattcagagatggccgaggtgaagcctgaggacatggtgcatcatctgcccatggaccagctccagggactggagtactgcatcgactccaatccttcatggggatgacaaggccaaggtggttcaaacgctgctgttcgttactgggatcaagacgctgctccagacgctattcggcactcgtcttcccacagtcatgggaggttcatacgcttacgtggttccaatcctctccatagtccgtgacccctcgttcgcgcgtatagctgatggccacactagattcctgcagactatgagggccgtacaaggttcactgattgtatcctcaagcatccaaataattcttggatatagccagttgtgggctatatgttctaggttcttcagcccacttgggatggttcccgtggttgcactggtggggcttggacttttcgagagaggattcccagtggttgggaaatgcgtggagattggtcttccaatgcttatcctatttgtcgcgctttcccagtatctcaagcacgtgcatattcgtcatgttcctgttttcgagaggttctcattgctgatgtgcatcactcttgtatgggtatatgcccacatcctcacagcaagtggtgcatacaagcacacagcacttgtcacccagatcaactgtcggacagaccgtgccaatctcatatcttcatcacaatggataagcattccataccctttacaatggggtgcaccaacattcagtgcagaccatgcatttggtatgatggcagcggtgatggtttctttaatagagaccacgggagcattcaaagctgctgcacgattggctagtgcgacacccccaccagcatatgtcctgagcagaggcattgggtggcagggcattggcaccctactagatggcctgtttggcactgggactggttctactgtttctgttgagaacgttggtctcctaggatcaacgagggttggtagcagaagagtgatacaaatttctgctggtttcatgatcttcttctccattcttggaaaatttggagcactttttgcctccattcctttcacaatattcgctgccatttactgcgttatgtttggaattgtcgctgctgtggggctctcctttatgcagttcaccaacatgaactcgatgcgcaatctcttcatcatcggtgtctcactcttcctgggtttatctataccagagtacttctctaggtattccacaagttctcaacaaggcccagcgcacacaaaagctggatggttcaatgactacatcaacactagcttctcatcaccacccgccgtcgccctcattgtagcagtactccttgacaacacacttgatgtgagagatgcagcaagggaccgaggaatgccatggtgggcgcggttcaggacattccgtggcgacagcaggaacgaagagttctacactttgcctttcaacctcaacagattctttccaccgacttaagccaaattgccattgagaacacgctgcatgtcaagtggtccactcaagcaagcattgcctaacaatgaggtctgcttctgatagagtagaacaacaaaaggctcgacaaaggaagaactaattccctgttaccaatcgattgtacataaaacaaaactgtttaggttgaccaccggtgtcgaatcagaatgccatattttgatgtaatatgagtttagagatcttatgaacaattttcaagccttatatgcaagctagcttttaaaccgtgttttcatggcttagtggcatggtctggtgtctgatccccaaaaagctatagaaggtatattgcaagaa

SEQ ID NO: 207485 - DNA, 2103 bp, Zea Mays
cagacggcctcctcctaacctgacccagtgacccgacccgcagaaaaaatccagtcagcgaagggttcctctgaccgggcgaggctctcatggcggcggctgaccccgagacggcggcggcgctgcggggggaggtcgccgcgctgcggatgcgcgtacaggagctggaggcagagaatcagaggctggcaaggattgcttcgacctgtacctgcggattcaaggagggcagtgttggatccattactgcacatcataatgtgaaatttcatcaaaatagcactatggagaaagatttgagctctccatttgatcacacagtaatatccaatgcaaatgaaatgcagtgcaacagaaatgcagatgacaatggtttacctgaggattcaagcaagcatactaaaagaacaggtcgcaaggtgggcattttaagtcactgcccaaagcgactagttgctctcaaagtcatgtatttcggccagagattctatggtttttcttctgaaggtaacattgaaccaacagttgagtctgagatatttaaagcactggaaagagcaaaactgatggttgccaataggaaagaatcatgctactcgaggtgtggaagaactgacaaaggagtttctgctactggacaggtgatttctttatatctgcgatcgaacataaaggatgttgggggggacatgttagatgaaagatccgaaattgattatgtgaaggtattgaatagaattcttccaagagatatacgtgtactgggttggtgtcctgttccagcagattttcatgcaagattcacctgtttgagccgggaatataaatacttattttggaaaggggacctggatatattggaaatgcagaaagctgcatccaaattcattggagaacacgactttaggaatttttgtaagatggatgcagcaaatgtccaacaatgatgagctgtgttccatgacgatcaagggtagcgcttttctgtggcaccaagttcgctgcatggtagctgtgttatttctaataggtcaaggccttgagtcaccatccgtagttgattcactattggatattatgaaaacatctaggaaacctcaatataaaatggcgccagagcttccattgattttgcaatcttgtctatttgataaagccaactttatgtgttcagcagatgccagccggtctctgactgagcacttaaatgatgaatatcgtcaccatatgctccaagctgaaatatttcacatagcgtcatcctgtttaccttttccagaaccaaattcatcagaaacgcctcagaagaagaggaaccatattcctctcctgtcacgagagacagagccttcttacgaggagcgcatatcgaaagtcaaagcgaagctggctgataatctcaagtagagccaccgttttcaattgttacaccaatacttggaagagaacttatggaactgtagaaggtttcttccaaaagcctatatggcaccccatctcttggtgactgtcgttcgctacaggatgacggcaaagctttatttagcgctggtcggtgtcagtgtcactcatatggttgttagagctcatgctcagggatttctgaatgctgaggccttggatcttctcgctcccaaggccacgggcaggaaatcacaaacgggagaagttctatggtgtaacacccttgtacttgcacagttttacagcaaatcaaatgatagcagagtagcaggaagtaccatgttttaattcctctttctgatcaatggacttttaggaccaatttggaggcaaaaccagagagtttctctcccatcaagaattaaatgccttgtacaaatgacaccccacgcaaagatcacaagggaatttaagtttcaaactagcccttaggggatttctcaaataaagctatgctgcccattctgagttctgactgcattgtccgagtatttgtacgatgctatctactgtatgcatttttttatctctaatgtataaagcactagatttcaaagttccacctttatcgtaagttccacctttatctgcccttcccatttaaatgataaaaaactaaaattatgtataaatgaggat

SEQ ID NO: 207486 - DNA, 2160 bp, Zea Mays
acccgacccgcagaaaaaatccagtcagcgaagggttcctctgaccgggcgaggctctcatggcggcggctgaccccgagacggcggcggcgctgcggggggaggtcgccgcgctgcggatgcgcgtacaggagctggaggcagagaatcagaggctggcaaggattgcttcgacctgtacctgcggattcaagggcagtgtttcaaaggtgtcgcctaggtggccaggcgtacccagcttgccttgtgaaatagtgatgccttgtcgcctaggcgtccaggagggcagtgttggatccattactgcacatcataatgtgaaatttcatcaaaatagcactatggagaaagatttgagctctccatttgatcacacagtaatatccaatgcaaatgaaatgcagtgcaacagaaatgcagatgacaatggtttacctgaggattcaagcaagcatactaaaagaacaggtcgcaaggtgggcattttaagtcactgcccaaagcgactagttgctctcaaagtcatgtatttcggccagagattctatggtttttcttctgaaggtaacattgaaccaacagttgagtctgagatatttaaagcactggaaagagcaaaactgatggttgccaataggaaagaatcatgctactcgaggtgtggaagaactgacaaaggagtttctgctactggacaggtgatttctttatatctgcgatcgaacataaaggatgttgggggggacatgttagatgaaagatccgaaattgattatgtgaaggtattgaatagaattcttccaagagatatacgtgtactgggttggtgtcctgttccagcagattttcatgcaagattcacctgtttgagccgggaatataaatacttattttggaaaggggacctggatatattggaaatgcagaaagctgcatccaaattcattggagaacacgactttaggaatttttgtaagatggatgcagcaaatgtccaacaatgatgagctgtgttccatgacgatcaagggtagcgcttttctgtggcaccaagttcgctgcatggtagctgtgttatttctaataggtcaaggccttgagtcaccatccgtagttgattcactattggatattatgaaaacatctaggaaacctcaatataaaatggcgccagagcttccattgattttgcaatcttgtctatttgataaagccaactttatgtgttcagcagatgccagccggtctctgactgagcacttaaatgatgaatatcgtcaccatatgctccaagctgaaatatttcacatagcgtcatcctgtttaccttttccagaaccaaattcatcagaaacgcctcagaagaagaggaaccatattcctctcctgtcacgagagacagagccttcttacgaggagcgcatatcgaaagtcaaagcgaagctggctgataatctcaagtagagccaccgttttcaattgttacaccaatacttggaagagaacttatggaactgtagaaggtttcttccaaaagcctatatggcaccccatctcttggtgactgtcgttcgctacaggatgacggcaaagctttatttagcgctggtcggtgtcagtgtcactcatatggttgttagagctcatgctcagggatttctgaatgctgaggccttggatcttctcgctcccaaggccacgggcaggaaatcacaaacgggagaagttctatggtgtaacacccttgtacttgcacagttttacagcaaatcaaatgatagcagagtagcaggaagtaccatgttttaattcctctttctgatcaatggacttttaggaccaatttggaggcaaaaccagagagtttctctcccatcaagaattaaatgccttgtacaaatgacaccccacgcaaagatcacaagggaatttaagtttcaaactagcccttaggggatttctcaaataaagctatgctgcccattctgagttctgactgcattgtccgagtatttgtacgatgctatctactgtatgcatttttttatctctaatgtataaagcactagatttcaaagttccacctttatcgtaagttccacctttatctgcccttcccatttaaatgataaaaaactaaaattatgtataaatgaggat

SEQ ID NO: 207487 - DNA, 2203 bp, Zea Mays
aaaaaatccagtcagcgaagggttcctctgaccgggcgaggctctcatggcggcggctgaccccgagacggcggcggcgctgcggggggaggtcgccgcgctgcggatgcgcgtacaggagctggaggcagagaatcagaggctggcaaggattgcttcgacctgtacctgcggattcaagggcagtgtttcaaaggtgtcgcctaggtggccaggcgtacccagcttgccttgtgaaatagtgatgccttgtcgcctaggcgtccaggagggcagtgttggatccattactgcacatcataatgtgaaatttcatcaaaatagcactatggagaaagatttgagctctccatttgatcacacagtaatatccaatgcaaatgaaatgcagtgcaacagaaatgcagatgacaatggtttacctgaggattcaagcaagcatactaaaagaacaggtcgcaaggtgggcattttaagtcactgcccaaagcgactagttgctctcaaagtcatgtatttcggccagagattctatggtttttcttctgaaggtaacattgaaccaacagttgagtctgagatatttaaagcactggaaagagcaaaactgatggttgccaataggaaagaatcatgctactcgaggtgtggaagaactgacaaaggagtttctgctactggacaggtgatttctttatatctgcgatcgaacataaaggatgttgggggggacatgttagatgaaagatccgaaattgattatgtgaaggtattgaatagaattcttccaagagatatacgtgtactgggttggtgtcctgttccagcagattttcatgcaagattcacctgtttgagccgggaatataaatacttattttggaaaggggacctggatatattggaaatgcagaaagctgcatccaaattcattggagaacacgactttaggaatttttgtaagatggatgcagcaaatgtgagtaactacaggcggcacattacagaatttactatttctgcatgtgacagaaggtccaacaatgatgagctgtgttccatgacgatcaagggtagcgcttttctgtggcaccaagttcgctgcatggtagctgtgttatttctaataggtcaaggccttgagtcaccatccgtagttgattcactattggatattatgaaaacatctaggaaacctcaatataaaatggcgccagagcttccattgattttgcaatcttgtctatttgataaagccaactttatgtgttcagcagatgccagccggtctctgactgagcacttaaatgatgaatatcgtcaccatatgctccaagctgaaatatttcacatagcgtcatcctgtttaccttttccagaaccaaattcatcagaaacgcctcagaagaagaggaaccatattcctctcctgtcacgagagacagagccttcttacgaggagcgcatatcgaaagtcaaagcgaagctggctgataatctcaagtagagccaccgttttcaattgttacaccaatacttggaagagaacttatggaactgtagaaggtttcttccaaaagcctatatggcaccccatctcttggtgactgtcgttcgctacaggatgacggcaaagctttatttagcgctggtcggtgtcagtgtcactcatatggttgttagagctcatgctcagggatttctgaatgctgaggccttggatcttctcgctcccaaggccacgggcaggaaatcacaaacgggagaagttctatggtgtaacacccttgtacttgcacagttttacagcaaatcaaatgatagcagagtagcaggaagtaccatgttttaattcctctttctgatcaatggacttttaggaccaatttggaggcaaaaccagagagtttctctcccatcaagaattaaatgccttgtacaaatgacaccccacgcaaagatcacaagggaatttaagtttcaaactagcccttaggggatttctcaaataaagctatgctgcccattctgagttctgactgcattgtccgagtatttgtacgatgctatctactgtatgcatttttttatctctaatgtataaagcactagatttcaaagttccacctttatcgtaagttccacctttatctgcccttcccatttaaatgataaaaaactaaaattatgtataaatgaggat

SEQ ID NO: 207488 - DNA, 2102 bp, Zea Mays
aaaaaatccagtcagcgaagggttcctctgaccgggcgaggctctcatggcggcggctgaccccgagacggcggcggcgctgcggggggaggtcgccgcgctgcggatgcgcgtacaggagctggaggcagagaatcagaggctggcaaggattgcttcgacctgtacctgcggattcaagggcagtgtttcaaaggtgtcgcctaggtggccaggcgtacccagcttgccttgtgaaatagtgatgccttgtcgcctaggcgtccaggagggcagtgttggatccattactgcacatcataatgtgaaatttcatcaaaatagcactatggagaaagatttgagctctccatttgatcacacagtaatatccaatgcaaatgaaatgcagtgcaacagaaatgcagatgacaatggtttacctgaggattcaagcaagcatactaaaagaacagattctatggtttttcttctgaaggtaacattgaaccaacagttgagtctgagatatttaaagcactggaaagagcaaaactgatggttgccaataggaaagaatcatgctactcgaggtgtggaagaactgacaaaggagtttctgctactggacaggtgatttctttatatctgcgatcgaacataaaggatgttgggggggacatgttagatgaaagatccgaattcttccaagagatatacgtgtactgggttggtgtcctgttccagcagattttcatgcaagattcacctgtttgagccgggaatataaatacttattttggaaaggggacctggatatattggaaatgcagaaagctgcatccaaattcattggagaacacgactttaggaatttttgtaagatggatgcagcaaatgtgagtaactacaggcggcacattacagaatttactatttctgcatgtgacagaaggtccaacaatgatgagctgtgttccatgacgatcaagggtagcgcttttctgtggcaccaagttcgctgcatggtagctgtgttatttctaataggtcaaggccttgagtcaccatccgtagttgattcactattggatattatgaaaacatctaggaaacctcaatataaaatggcgccagagcttccattgattttgcaatcttgtctatttgataaagccaactttatgtgttcagcagatgccagccggtctctgactgagcacttaaatgatgaatatcgtcaccatatgctccaagctgaaatatttcacatagcgtcatcctgtttaccttttccagaaccaaattcatcagaaacgcctcagaagaagaggaaccatattcctctcctgtcacgagagacagagccttcttacgaggagcgcatatcgaaagtcaaagcgaagctggctgataatctcaagtagagccaccgttttcaattgttacaccaatacttggaagagaacttatggaactgtagaaggtttcttccaaaagcctatatggcaccccatctcttggtgactgtcgttcgctacaggatgacggcaaagctttatttagcgctggtcggtgtcagtgtcactcatatggttgttagagctcatgctcagggatttctgaatgctgaggccttggatcttctcgctcccaaggccacgggcaggaaatcacaaacgggagaagttctatggtgtaacacccttgtacttgcacagttttacagcaaatcaaatgatagcagagtagcaggaagtaccatgttttaattcctctttctgatcaatggacttttaggaccaatttggaggcaaaaccagagagtttctctcccatcaagaattaaatgccttgtacaaatgacaccccacgcaaagatcacaagggaatttaagtttcaaactagcccttaggggatttctcaaataaagctatgctgcccattctgagttctgactgcattgtccgagtatttgtacgatgctatctactgtatgcatttttttatctctaatgtataaagcactagatttcaaagttccacctttatcgtaagttccacctttatctgcccttcccatttaaatgataaaaaactaaaattatgtataaatgaggat

SEQ ID NO: 207489 - DNA, 1977 bp, Zea Mays
gtcagcgaagggttcctctgaccgggcgaggctctcatggcggcggctgaccccgagacggcggcggcgctgcggggggaggtcgccgcgctgcggatgcgcgtacaggagctggaggcagagaatcagaggctggcaaggattgcttcgacctgtacctgcggattcaaggagggcagtgttggatccattactgcacatcataatgtgaaatttcatcaaaatagcactatggagaaagatttgagctctccatttgatcacacagtaatatccaatgcaaatgaaatgcagtgcaacagaaatgcagatgacaatggtttacctgaggattcaagcaagcatactaaaagaacagattctatggtttttcttctgaaggtaacattgaaccaacagttgagtctgagatatttaaagcactggaaagagcaaaactgatggttgccaataggaaagaatcatgctactcgaggtgtggaagaactgacaaaggagtttctgctactggacaggtgatttctttatatctgcgatcgaacataaaggatgttgggggggacatgttagatgaaagatccgaaattgattatgtgaaggtattgaatagaattcttccaagagatatacgtgtactgggttggtgtcctgttccagcagattttcatgcaagattcacctgtttgagccgggaatataaatacttattttggaaaggggacctggatatattggaaatgcagaaagctgcatccaaattcattggagaacacgactttaggaatttttgtaagatggatgcagcaaatgtccaacaatgatgagctgtgttccatgacgatcaagggtagcgcttttctgtggcaccaagttcgctgcatggtagctgtgttatttctaataggtcaaggccttgagtcaccatccgtagttgattcactattggatattatgaaaacatctaggaaacctcaatataaaatggcgccagagcttccattgattttgcaatcttgtctatttgataaagccaactttatgtgttcagcagatgccagccggtctctgactgagcacttaaatgatgaatatcgtcaccatatgctccaagctgaaatatttcacatagcgtcatcctgtttaccttttccagaaccaaattcatcagaaacgcctcagaagaagaggaaccatattcctctcctgtcacgagagacagagccttcttacgaggagcgcatatcgaaagtcaaagcgaagctggctgataatctcaagtagagccaccgttttcaattgttacaccaatacttggaagagaacttatggaactgtagaaggtttcttccaaaagcctatatggcaccccatctcttggtgactgtcgttcgctacaggatgacggcaaagctttatttagcgctggtcggtgtcagtgtcactcatatggttgttagagctcatgctcagggatttctgaatgctgaggccttggatcttctcgctcccaaggccacgggcaggaaatcacaaacgggagaagttctatggtgtaacacccttgtacttgcacagttttacagcaaatcaaatgatagcagagtagcaggaagtaccatgttttaattcctctttctgatcaatggacttttaggaccaatttggaggcaaaaccagagagtttctctcccatcaagaattaaatgccttgtacaaatgacaccccacgcaaagatcacaagggaatttaagtttcaaactagcccttaggggatttctcaaataaagctatgctgcccattctgagttctgactgcattgtccgagtatttgtacgatgctatctactgtatgcatttttttatctctaatgtataaagcactagatttcaaagttccacctttatcgtaagttccacctttatctgcccttcccatttaaatgataaaaaactaaaattatgtataaatgaggat

SEQ ID NO: 207490 - DNA, 3529 bp, Zea Mays
gtcagcgaagggttcctctgaccgggcgaggctctcatggcggcggctgaccccgagacggcggcggcgctgcggggggaggtcgccgcgctgcggatgcgcgtacaggagctggaggcagagaatcagaggctggcaaggattgcttcgacctgtacctgcggattcaagctgcagcagcccgaatagccagctttaattcgaagcgaacaacctgtatgattcagtcagctccagaagatgcaattgccactgttgtttatgagagctaattagagcatctccaagagaggttttaaatgtgaccctattttaatatagggctcggaaccataaaacacccttccaacaatggccatattttataaaatttcaccaaacgattatatggcttggtctcttgggtcctaaatatagtaccctatatactgaagccctattctcattaactctctccaaccattagtttcctaataccatgatttatttcctaaatagtattgtttaaggcctgactgttggaggacaaaattgttttgaggccctaaacaatctaaacacggtcctatttcaaaatttaggactattttagagtttattgttggagatgctcttagaacttatctttctggcatcgaccaaaacttttttaaggttgtttctctgcctataaattgttgcgacatgataatctttgttatagcatgtgctgacatgaattacagggagaattgagaacatgtaatggttgtttgctgccagagaatacatgctaacagaaagtttccatccatttagaattatatgctaacagaaagtttccatccatttagaattatattaaattagtgtccttaatattggctgtcaccatgactatgtgaatgcgaatttctatatgtttatggcattatggcaatcgccaacactattatatgcatattcatatatatatatgtgtggaaatcaagtgcgatgcatcatccactcaaggttcaaaaaagtttagattaattcgtttgcatatgtaggattgtatcttgatgttgatacctttccttaaagcaagtcaataccctgcatatcatgtaccgtagggcagtgtttcaaaggtgtcgcctaggtggccaggcgtacccagcttgccttgtgaaatagtgatgccttgtcgcctaggcgtccaggagggcagtgttggatccattactgcacatcataatgtgaaatttcatcaaaatagcactatggagaaagatttgagctctccatttgatcacacagtaatatccaatgcaaatgaaatgcagtgcaacagaaatgcagatgacaatggtttacctgaggattcaagcaagcatactaaaagaacagattctatggtttttcttctgaaggtaacattgaaccaacagttgagtctgagatatttaaagcactggaaagagcaaaactgatggttgccaataggaaagaatcatgctactcgaggtgtggaagaactgacaaaggagtttctgctactggacaggtgatttctttatatctgcgatcgaacataaaggatgttgggggggacatgttagatgaaagatccgaaattgattatgtgaaggtattgaatagaattcttccaagagatatacgtgtactgggttggtgtcctgttccagcagattttcatgcaagattcacctgtttgagccgggaatataaatacttattttggaaaggggacctggatatattggaaatgcagaaagctgcatccaaattcattggagaacacgactttaggaatttttgtaagatggatgcagcaaatgtccaacaatgatgagctgtgttccatgacgatcaagggtagcgcttttctgtggcaccaagttcgctgcatggtagctgtgttatttctaataggtcaaggccttgagtcaccatccgtagttgattcactattggatattatgaaaacatctaggaaacctcaatataaaatggcgccagagcttccattgattttgcaatcttgtctatttgataaagccaactttatgtgttcagcagatgccagccggtctctgactgagcacttaaatgatgaatatcgtcaccatatgctccaagctgaaatatttcacatagcgtcatcctgtttaccttttccagaaccaaattcatcagaaacgcctcagaagaagaggaaccatattcctctcctgtcacgagagacagagccttcttacgaggagcgcatatcgaaagtcaaagcgaagctggctgataatctcaagtagagccaccgttttcaattgttacaccaatacttggaagagaacttatggaactgtagaaggtttcttccaaaagcctatatgtttatgacgtgcgctttttttatggcaaaattggatctgttaacatgtggagatggaaattacccggaaacatgagcttagcgtggattttaccattttgaggtgttagaaaagcgtgctgcctattttagactagatatacagactaaaacatatggagccccacatttcgggtattgtcaagttgtgcgtttcactttcaaaatagtgtaagggccttgtgttttttttcttcttctgaatttgttgtaaaatagtctagcatcccttgcaaagagggggtaatgttgttgtcacatgatggtgtgtaccaaagtgtagtaaagcatcccttgcaaagagggggtggtagtgtcctgtatgtttttttaagcaaatgtgacaaactatataagaaatgaatatttcatgtgagttatgtatttccagccgtattatttaggttacttgcattcatatttaagcagcttacaaggaatgcacgttactctgagatcagaatcatttaagtgtccatctaccctttccttgcttacagggcaccccatctcttggtgactgtcgttcgctacaggatgacggcaaagctttatttagcgctggtcggtgtcagtgtcactcatatggttgttagagctcatgctcagggatttctgaatgctgaggccttggatcttctcgctcccaaggccacgggcaggaaatcacaaacgggagaagttctatggtgtaacacccttgtacttgcacagttttacagcaaatcaaatgatagcagagtagcaggaagtaccatgttttaattcctctttctgatcaatggacttttaggaccaatttggaggcaaaaccagagagtttctctcccatcaagaattaaatgccttgtacaaatgacaccccacgcaaagatcacaagggaatttaagtttcaaactagcccttaggggatttctcaaataaagctatgctgcccattctgagttctgactgcattgtccgagtatttgtacgatgctatctactgtatgcatttttttatctctaatgtataaagcactagatttcaaagttccacctttatcgtaagttccacctttatctgcccttcccatttaaatgataaaaaactaaaattatgtataaatgaggat

SEQ ID NO: 207491 - DNA, 2490 bp, Zea Mays
ggataaacgaatagacccaccgcatctcaacatcctctcctcgtcttctcccaacgccgccgcagcgttcttgtcgggctccggtcaggtgaagtatgctgatgaacttcagggactggatctcgtaccggctcggttcctcgctgctgtccgccaggccgttcgcgctttcccccggtgctgatgacggcgcctccgagggtgatgctcatggtacagcacacaatgactttgtagatactgttactgccaatacattttcttctaatgatatgcgggcgtcagaggtcacagccaactctggtagtggtgcaatttattctggtattgttcaacaagatgatgataataagaagtcagatccactgatgaaagtcgaggcgcttcaaatcaagtttctgcggttagtatacaggactggagtgtctcccagtgctgatgtagttgcacaggttctgtacagattgcagcttgcaaatttgattaaagccagtgaatcagatgcaaggagaacaaacctagctatcaacaaagctagggttatagcagcacagcaggaagcaccgggtgggcctgatctggatgtctcaatgcaaatccttcttctggggaagtctggtgtgggaaagagtgccacaataaattcaatttttgatgagaggaaggttgctactgatgctctggttcctgctactcataggataaagaaaattgaaggaacaattaaaggaataagagtcacagtcatcgacacacctggcctggtgtctcattaccatggccaaaggaggaacatgaagattctgaattctgtcaagcacttcattaagcgatccccacctgatatcatcttatactttgagcgtttggaccatattaacagcagatacagtgattacccactgctgaagcttatgactgacatattggggtctccaatgtggttcaatactgtccttgtaatgactcactgttcctcatctcctcctgaaggaccagatggttacccattggaatatgatacttatacgcgttactgcaagaatgtggtgcagcgtcacatccaggctgcagtttccaacacgcagttggataatccatttgtgctcatagacaatcatccaatgtgcagacgaaacaccaagggtgaaagggttttaccaaatgggcaggtatgggtatcagaactgctgctgctgtgtggggcaaccaagttgctgacagaagcaaattccttgcttaagtttcaagatagcttcctactgtcacaagcaaacaccaggctgccttcgctgcctcatcttctttcttcacttcttaagcctcactcttcatccagttcagatgccattgacagtcaattgacagaaatgtcagatgaggaggatgaatatgatcaactaccacccttccgcattctaaagaaatctgaatatgaaaatttgaccaatgaacagaagtctgcatatcttgacgaactggactaccgtgagactttgtacctaaagaaacagtggaaagaaggaatcagaaggaaaaagcttactgaagctcagagtgatgaagttggtgatgattatgatgagagtgcatccccagagattgtgcacatgtcagatatggacattccactaagttttgactctgattatcctgtgcatcgttaccgtcacattataactgatgatcagttgtttagaccagttttggatccacaaggatgggaccatgatattgggttcgatgccatcaattttgaagcatctcaagagttgaaaaagaatgtctctgcggcaattacaggacagatgagaaaggacaaggaagacatgtatatccattcagaatgttcagtaagttacaatgctcagagaggctgctccttgatggggggtatggatatgcagacggcaagcaaagatttggtctgtactgttcatggggatgccaagttccacaatctgccttggaacagtattggaggtggcatttctgttactaagtttggcaacaagtactttgctggggctaagttagaagactctgttaccattgggagacgagttaaactggtagccaacgccggtaggatgtctggctgtgggcaggtggcacatggaggtggtgtggagattacagcaagggggaaagattaccctgtgagggaagggagtgtcactgccgcggtctctgctttgtcatttgaaaaggaaaccgtaattggggccaaccttcagtcagacttccgagtgggccgtggatcaaaaatatcagtcagcgctaacctaaatagtagaaatttgggcaatctcagcgtcagaactagcacatcagaccacgctgagatagctttgataacagttgtctccttgatccagttcattcttaggagaagatcagcagcagataataaagatgagcaacagattggcaccaatttggatgactaaataacagcataagctattacagaaaacttcgtcttcaaga

SEQ ID NO: 207492 - DNA, 2958 bp, Zea Mays
taaacgaatagacccaccgcatctcaacatcctctcctcgtcttctcccaacgccgccgcagcgttcttgtcgggctccggtcaggtacgtcgagctcgggccagttgcgatgtccctgcttggttttattatacgggagattcggcagtccgctacgaggtgaagtggtgaagtatgctgatgaacttcagggactggatctcgtaccggctcggttcctcgctgctgtccgccaggccgttcgcgctttcccccggtgctgatgacggcgcctccgagggtgatgctcatggtacagcacacaatgactttgtagatactgttactgccaatacattttcttctaatgatatgcgggcgtcagaggtcacagccaactctggtagtggtgcaatttattctggtattgttcaacaagatgatgataataagaagtcagatccactgatgaaagtcgaggcgcttcaaatcaagtttctgcggttagtatacaggactggagtgtctcccagtgctgatgtagttgcacaggttctgtacagattgcagcttgcaaatttgattaaagccagtgaatcagatgcaaggagaacaaacctagctatcaacaaagctagggttatagcagcacagcaggaagcaccgggtgggcctgatctggatgtctcaatgcaaatccttcttctggggaagtctggtgtgggaaagagtgccacaataaattcaatttttgatgagaggaaggttgctactgatgctctggttcctgctactcataggataaagaaaattgaaggaacaattaaaggaataagagtcacagtcatcgacacacctggcctggtgtctcattaccatggccaaaggaggaacatgaagattctgaattctgtcaagcacttcattaagcgatccccacctgatatcatcttatactttgagcgtttggaccatattaacagcagatacagtgattacccactgctgaagcttatgactgacatattggggtctccaatgtggttcaatactgtccttgtaatgactcactgttcctcatctcctcctgaaggaccagatggttacccattggaatatgatacttatacgcgttactgcaagaatgtggtgcagcgtcacatccaggctgcagtttccaacacgcagttggataatccatttgtgctcatagacaatcatccaatgtgcagacgaaacaccaagggtgaaagggttttaccaaatgggcaggtatgggtatcagaactgctgctgctgtgtggggcaaccaagttgctgacagaagcaaattccttgcttaagtttcaagatagcttcctactgtcacaagcaaacaccaggctgccttcgctgcctcatcttctttcttcacttcttaagcctcactcttcatccagttcagatgccattgacagtcaattgacagaaatgtcagatgaggaggatgaatatgatcaactaccacccttccgcattctaaagaaatctgaatatgaaaatttgaccaatgaacagaagtctgcatatcttgacgaactggactaccgtgagactttgtacctaaagaaacagtggaaagaaggaatcagaaggaaaaagcttactgaagctcagagtgatgaagttggtgatgattatgatgagagtgcatccccagagattgtgcacatgtcagatatggacattccactaagttttgactctgattatcctgtgcatcgttaccgtcacattataactgatgatcagttgtttagaccagttttggatccacaaggatgggaccatgatattgggttcgatgccatcaattttgaagcatctcaagagttgaaaaagaatgtctctgcggcaattacaggacagatgagaaaggacaaggaagacatgtatatccattcagaatgttcagtaagttacaatgctcagagaggctgctccttgatggggggtatggatatgcagacggcaagcaaagatttggtctgtactgttcatggggatgccaagttccacaatctgccttggaacagtattggaggtggcatttctgttactaagtttggcaacaagtactttgctggggctaagttagaagactctgttaccattgggagacgagttaaactggtagccaacgccggtaggatgtctggctgtgggcaggtggcacatggaggtggtgtggagattacagcaagggggaaagattaccctgtgagggaagggagtgtcactgccgcggtctctgctttgtcatttgaaaaggaaaccgtaattggggccaaccttcagtcagacttccgagtgggccgtggatcaaaaatatcagtcagcgctaacctaaatagtagaaatttgggcaatctcagcgtcagaactagcacatcagaccacgctgagatagctttgataacagttgtctccttgatccagttcattcttaggagaagatcagcagcagataataaagatgagcaacagattggcaccaatttggatgactaaataacaggtacaaggaaaagacaatgattgcatgctttagatgctcatcgtcatcaggatttgctgcaattatgttaacctaaggcgcctgtcaatctagagttccaatttgtacagaattcttgtatatcaattatgagtataaataatgtatgaaggaggcattttccatgagaagagctccttctgcccataagcgatttttttaggttttaaggatgtaatcagacgccgttttgagttttaacatcacacaaagtttatttagtttattacttgcataggaatgtttatttacttaccaagcttctgttttccaattttaaaaggtctcagtgatgagatttcactgctcagagacggatacaacctttatctgtataaatgaggaaactataacatcacatggtttttgttttgcaatagaa

SEQ ID NO: 207493 - DNA, 848 bp, Zea Mays
agagcaaagcatacacgcgcgcagtcactcacgcacgcccccagctctctccttctccctgctcgctcgctcgccatggacgctccgagcagctggaagagtcctgcgcgcgccaagtgaccggagaagctgcgagatcagagtagttgcttgccgctcccgtgccaccaaattagattggacgtagctagcagctagctgagccgtagtgcgtagcggcagctaggctgctagctcgatcgttatagctgcgtactagtggtgtcgcagcagaagcagtagccagcttcagtagccgatccggtggtaaaagcaactttttttggacatggcggcggagggagccccggtgctggtgaggcatgctggcggcgtggaggagctgcggcagctcccgccggggttccggttccgccccacggacgaggagctcgtggtgcagtacctccggcgcaaggccttgggcgcgccgctccccgccgccgtcatccccgtcgtccgcgacctctacagcctcgacccctgggacgccgtcgacgtgccggccgcccctgatgcgagcagccaaggcgagagatacttcttcgcggtgcggccggcgggcggcgtcggaagtgctaggagggcgaccgcgagcgggcggtggaggccggcggggaaggagaagccggtggccctgccccgcccgtgcggcggcgggagcctcctggtgggcgtgaagagggcgatggcgttcgttccccggcggaagaagaagaaggcggcggcggcggcggccctggcgatcggctgggtcatgcacgagtaccgcctcgccgcgccgctgcacaagcacaagagcccgtgac

SEQ ID NO: 207494 - DNA, 710 bp, Zea Mays
ctctattcccctccgtgtccgatgcctctcatcgccagaagaccttcccggtacgacgccaccgcaccacggaattaacacgagcactgcatcggtgaatctgcaagcccgcccgcccgtcgctcgccaccgccatgttcggcatcgtcttcccggaccacacctttcccctcgacgccaccgctttcgcgcaggtggcgcccaattcctgggtcctcgatctctccactctcgcgctcgccgccgcgccgcgctcggcagtcgtcttcctgctccccgctgccgtgacagcgctgccgcccggcaaggccgtctccgtctacttccaggccgccaccaaccgccccttcgcattcttaggtgcgctcgggcccacgcgcccctcggccagcttcccgcttccggaggccggcgacgagccggagcctgctgtgggccccgctaaactgggtgtcgccgtggaggacgcggccgcgttaccgccgccccctgacgagcagcgtgccgagcgtgtggcgctccgtgtcggcgagaacctgttcaacttcatgcaatcgttctgcggtgccgacggcggcaagctggtagtgcccacggacatcctggaccggtggttccgcaagttccaggagcgagccaagaaagatccagcgtacctcaagagcttcgacttttgagagcaaaggcctaatgaacaagtctctttggat

SEQ ID NO: 207495 - DNA, 1494 bp, Zea Mays
ctttatcgttctcggcgattccagaaattcttctttggtgggaggctcatattcggacctgacgccaagtcactgatcctgtctgtttcgctcattgtggccccggtattggtcttctgcggattcgttgctcggcatcttcgccaccacttcccggcttacaatgctggatatgcgattcctgcggtagctgtagtgtttatgatttatgtgctagtcctgctcttgattacatcagcgcaggatcctgggatcgttccccgcgcagcccacccgccggaggatgagttttcttatggcaacgctttgtctgggggcacgcctgggaggctacaattcccccgtgtaaaggaagtactggttaatgggatgcctgtgaaagtgaagtattgtgacacctgcatgatttatcggcctcctcgatgctcacactgttcgatatgcaacaattgtgtagagcgctttgaccatcattgcccctgggttggacaatgcattgggcagtatggaaggctttcaaacactctcccgcttctttggggcttctgatatattgtttcattgctctctggtttgttggtggactcactggatttcatttgtacctcattagcaccaaccagaccacgtacgagaatttccgatacagatcagacagcaggcctaacatctatagccaaggatgtctgaataactttctacaagtcttctgcagcaagacaaaaccttctaaacacaagttccgggcctacgcgcaagaggaagtgcggcctccaacggttagcttcggcagggaggtcgatgaggaaccggtcggcgggcctcggccgaaagttgaggacgatcttgaaattggtaccgatcttctgaagatctctcagcggcgcaactacgaggacgtcgatgcagaaacgggaggccgtcgcagtcgcagcagcgaggtggaaggcacggccagtgccagacctgctgtggcgtgctcggagtcccagatccctgcggtcgggggtactgacgtgagggtgcggcactcgagctgggaccggcgaagcgggaactgggacatgtcggctgtgcttacgaggagcgcgtcagatgtgattggacgtagcagcgtgttcgccgcggacgctgcacgtccatctctagaagagactcgctagcgaactgtgtctgtgcatccaggaaacatgtgcgagcggttcggatagcgaggccatttgactcgtggtggtggtgacacacacccaggtgttttggctttggctgccttgattgggtttttgttaccgacccttgtcagttgtcatgtatggacagttatttttagtcagagaatctgcccccattgttgccggcatgttcgtgtgcctgtaaattgcaaatgcaggatcctcatcaacttcaattcttattgggctgtttctttgagaatgcgtaatgtgaaaaagcatctggcctagctctttataggaatggatgcaattttaaagc

SEQ ID NO: 207496 - DNA, 1611 bp, Zea Mays
ggggaattccgcttccgcttcttgctaaattcttctttggtgggaggctcatattcggacctgacgccaagtcactgatcctgtctgtttcgctcattgtggccccggtattggtcttctgcggattcgttgctcggcatcttcgccaccacttcccggcttacaatgctggatatgcgattcctgcggtagctgtagtgtttatgatttatgtgctagtcctgctcttgattacatcagcgcaggatcctgggatcgttccccgcgcagcccacccgccggaggatgagttttcttatggcaacgctttgtctgggggcacgcctgggaggctacaattcccccgtgtaaaggaagtactggttaatgggatgcctgtgaaagtgaagtattgtgacacctgcatgatttatcggcctcctcgatgctcacactgttcgatatgcaacaattgtgtagagcgctttgaccatcattgcccctgggttggacaatgcattgggcagcgcaattaccggtactttttcatgtttgtttcttcctcgactcttctctgcatttatgtatttgcaatgtcagccttgtacatcaagtttctcatggatgaggattatccaacagtatggaaggctttcaaacactctcccgcttctttggggcttctgatatattgtttcattgctctctggtttgttggtggactcactggatttcatttgtacctcattagcaccaaccagaccacgtacgagaatttccgatacagatcagacagcaggcctaacatctatagccaaggatgtctgaataactttctacaagtcttctgcagcaagacaaaaccttctaaacacaagttccgggcctacgcgcaagaggaagtgcggcctccaacggttagcttcggcagggaggtcgatgaggaaccggtcggcgggcctcggccgaaagttgaggacgatcttgaaattggtaccgatcttctgaagatctctcagcggcgcaactacgaggacgtcgatgcagaaacgggaggccgtcgcagtcgcagcagcgaggtggaaggcacggccagtgccagacctgctgtggcgtgctcggagtcccagatccctgcggtcgggggtactgacgtgagggtgcggcactcgagctgggaccggcgaagcgggaactgggacatgtcggctgtgcttacgaggagcgcgtcagatgtgattggacgtagcagcgtgttcgccgcggacgctgcacgtccatctctagaagagactcgctagcgaactgtgtctgtgcatccaggaaacatgtgcgagcggttcggatagcgaggccatttgactcgtggtggtggtgacacacacccaggtgttttggctttggctgccttgattgggtttttgttaccgacccttgtcagttgtcatgtatggacagttatttttagtcagagaatctgcccccattgttgccggcatgttcgtgtgcctgtaaattgcaaatgcaggatcctcatcaacttcaattcttattgggctgtttctttgagaatgcgtaatgtgaaaaagcatctggcctagctctttataggaatggatgcaattttaaagc

SEQ ID NO: 207497 - DNA, 1448 bp, Zea Mays
agtctttctccccccacggcagaattccgattccggccgcctcctatacatagccagccagccttccaccctctcccctcccccaacacagagcagcgagccgcgcgcggaggcgaggcgttcgcacacctcgcccgcgccaccaccaccgctccgttgcgcccgccagccgtcacgcgtgacgtttcccggggggccgggggagagagaggcagaaggaggaggcacggagaggacgagacaggatgctcgggttcaggcagatgccgtggtcgtcggcgcaggagcaggagcaggcgccgtcggagcagctgtgcgagggggtgtcggccgtcgtggcggcgcgccaggggatggagaagccgctgacggctgtggcggaggcgttcgaggagctggcgcgcggcatggaggccgatggcggggagctccgcctcgctcccttcagcgactcctgcgctctcgtctccgtgctcttcagcagcctcgggatggccttcaggttcgccgagatcgagtacgtcaccaaggtgaacgatctcatcggtgccggcaagtcgtaccgcacgttgagcgacatcctcgacaaggacatccagaatgactgcgtgaagaagcagggaagccactcccggaacttacgcagggtccgtctcggcctcggcctcattaaagccctcttcgagcaattcctcgataccgagtacgtctcgttgcattcaaccaaacatgaacacatctcatcactaagtctgaatatttcaggcaagataggccacattgactgaatctcaaggcctgtatacagcgtatgatgtccttttgtcagaatgtgtacgatgataactgcatgatctcgaactggttgtcatgtggatgtggttaaatacatttaccaaattgccagctggtgctcacaaggctattactgcatggggacattgtatgatgctgctacgatagcttacgggcaggtctgcgcgccgtttcatagctgggcgatcaggaaggctgttggtgctggcatgtacactcttccaactagggagcagttgatagtgcggctgaatgaaactgaaggagatgaggagatacattgatgcttctagtcctatcatagagtacatcgacaaccttttcctctcgaggaacattagcctagattggtgagctgatctgaactggactggactgaagatcaagtctgcagcttgttcacaaagccgttgttggtaccatcgatttattgttcatagttatttattcagccttgttgggtggtggatggatgctcccttttcttcctttgttgcacgcacgggtctcgtgcatgtgttgtacaactgcatgataattctagcatggacattgatgttcttgccgactgtccatatagaaactgatggataatgcaaacgactattcagatatccatgagttctctcgct

SEQ ID NO: 207498 - DNA, 2454 bp, Zea Mays
ttattgagaaatttaattgtactcatctatctaatctactttctctctcctcccccgtcccgtcgcttcgatcccccgagcttcgctcacaccggtcacctccgcctcctcccgcttcgcgcgcatctccttctatcgctccagcctccagcacacgtcctccatgccctcgcggttctgatccggccatagccatgcagcaccgctcgccggaggcggcttcggcatccgcctccccgacggccgcggcggtggaggccatggcgccgggcgtcggcggggttgagccggccgtgacgctcgaccaggttccgcgctggagcgacccggaccagcgcatctccctgctgtcccccaccgccgccggatccgagaccccggcctcgtccttcctctccttctccgacccgctcaccggcgacgacgcggccgcgggggccgggggccgtggcgcgtcgcggttccccgtcgattacgagatcaactcgaagatctacctctggcgaggccatccgtggaacctcgaggtcgacgccgtcgtcaactccaccaacgagaacttggacgaagctcatagcagtcctgggctccacgctgctgcaggttcggggctcgccgaggagtgcgccaccctgggtggctgccgcactgggatggctaagatgacaaatgcttatgatttgcctgccaggaaggtcatccatactgtgggcccaaaatatgctgtaaagtatcacacagctgcagagaatgcgcttagccactgctacaggtcttgtctagaactgctcattgagaatggccttgaaaggtttcacatcgaatgttcttcaacttttgcaagtaatttgttctgcctttgatgtggttagcattgctactggctgcatttacacagaagccaagaattatcctcgtgaaccagctgctcatgtggcaataagaactgtgagacgttttctggagaaacaaaaggacaaaataacagctattgtcttctgtacgatatcatcatctgacacagagatatataagaggttgcttccactatatttccctcgggacaagcaagaagaagagatagccgcattgaaacttccagctgatgttggggatgagaatggtgagacagtaatagatgaaaggaaaataagaataaagcccttgcctgctggggaagcaaatagcaaaacaccaattcctacacttgcagatatcccgcttcctgattcgagtttgacacgtagaaggaattctttcaagttggactcatatttggatcctgcttttatgtctataattaaggatcctgatctccgacgcaaggagcaatgggaaaaatctcaggcaaacaagggacttaacttggctaacatgcttgggtttggtgatcttggcagtccaccattatctgctgctgaagaatattcacttcattcacgataccttgctaaagcgaattctatgaatctgtcagatgttgctgaaatgaaaataatttaccgtggaggagttgatagtgaagggcgtccagttatggtcattgttggtgctcactttcttcttcgctgcttggatctggaacgatttgttctatatgtagtaaaggaatttgaatctctgattcagaagccttacacaattgtctatttccactctgtggcatcattacaaccacagcctgatttaggattcatgaaacggttacaacagatactaggtcggaagcataaaaaaaatcttcatactatatacatactccacccgacactgggactgagaacagccgttatggcgatgcaactttttgttgacggggaggtctggaagaaagttgtatatgtcgacagacttgtgcagctattcagatatgtaccacgtgaacagctcaccattcctgattttgtgttccagcatgaccttgaagtgaatggtggaaagggcataatcgttgacccaagaacaaagcatatctaccagagaccatctggttgatctgtcataaacctgcaaatgaacgcttcacagtaccactctcactatgcacagactctccatgaatgactctgtccagtcctctgtagaagagtacccttctagagctgtgcattttgtatctagttgacattgttgctctgtgctattccttcgcctttttgggaggcatatttatgtatcttaataactattctgtataaacaaaaaaaatgctaaatgtctctcaatttgcctatagctgggcgtgctcgttaggttctgtaaatttttgacaggtccatagatattgagaaataggattgcagtctgttccgtctgagtaattgatcgccttggaatgtcttaataggctgaagactgatctgtttgctgttgcaaacaataagtagcaagtcccaaaggcgaggaagcataaactctggtctattttgcttttggttaactgcatgagatagt

SEQ ID NO: 207499 - DNA, 2314 bp, Zea Mays
ttattgagaaatttaattgtactcatctatctaatctactttctctctcctcccccgtcccgtcgcttcgatcccccgagcttcgctcacaccggtcacctccgcctcctcccgcttcgcgcgcatctccttctatcgctccagcctccagcacacgtcctccatgccctcgcggttctgatccggccatagccatgcagcaccgctcgccggaggcggcttcggcatccgcctccccgacggccgcggcggtggaggccatggcgccgggcgtcggcggggttgagccggccgtgacgctcgaccaggttccgcgctggagcgacccggaccagcgcatctccctgctgtcccccaccgccgccggatccgagaccccggcctcgtccttcctctccttctccgacccgctcaccggcgacgacgcggccatccgtggaacctcgaggtcgacgccgtcgtcaactccaccaacgagaacttggacgaagctcatagcagtcctgggctccacgctgctgcaggttcggggctcgccgaggagtgcgccaccctgggtggctgccgcactgggatggctaagatgacaaatgcttatgatttgcctgccaggaaggtcatccatactgtgggcccaaaatatgctgtaaagtatcacacagctgcagagaatgcgcttagccactgctacaggtcttgtctagaactgctcattgagaatggccttgaaagcattgctactggctgcatttacacagaagccaagaattatcctcgtgaaccagctgctcatgtggcaataagaactgtgagacgttttctggagaaacaaaaggacaaaataacagctattgtcttctgtacgatatcatcatctgacacagagatatataagaggttgcttccactatatttccctcgggacaagcaagaagaagagatagccgcattgaaacttccagctgatgttggggatgagaatggtgagacagtaatagatgaaaggaaaataagaataaagcccttgcctgctggggaagcaaatagcaaaacaccaattcctacacttgcagatatcccgcttcctgattcgagtttgacacgtagaaggaattctttcaagttggactcatatttggatcctgcttttatgtctataattaaggatcctgatctccgacgcaaggagcaatgggaaaaatctcaggcaaacaagggacttaacttggctaacatgcttgggtttggtgatcttggcagtccaccattatctgctgctgaagaatattcacttcattcacgataccttgctaaagcgaattctatgaatctgtcagatgttgctgaaatgaaaataatttaccgtggaggagttgatagtgaagggcgtccagttatggtcattgttggtgctcactttcttcttcgctgcttggatctggaacgatttgttctatatgtagtaaaggaatttgaatctctgattcagaagccttacacaattgtctatttccactctgtggcatcattacaaccacagcctgatttaggattcatgaaacggttacaacagatactaggtcggaagcataaaaaaaatcttcatactatatacatactccacccgacactgggactgagaacagccgttatggcgatgcaactttttgttgacggggaggtctggaagaaagttgtatatgtcgacagacttgtgcagctattcagatatgtaccacgtgaacagctcaccattcctgattttgtgttccagcatgaccttgaagtgaatggtggaaagggcataatcgttgacccaagaacaaagcatatctaccagagaccatctggttgatctgtcataaacctgcaaatgaacgcttcacagtaccactctcactatgcacagactctccatgaatgactctgtccagtcctctgtagaagagtacccttctagagctgtgcattttgtatctagttgacattgttgctctgtgctattccttcgcctttttgggaggcatatttatgtatcttaataactattctgtataaacaaaaaaaatgctaaatgtctctcaatttgcctatagctgggcgtgctcgttaggttctgtaaatttttgacaggtccatagatattgagaaataggattgcagtctgttccgtctgagtaattgatcgccttggaatgtcttaataggctgaagactgatctgtttgctgttgcaaacaataagtagcaagtcccaaaggcgaggaagcataaactctggtctattttgcttttggttaactgcatgagatagt

SEQ ID NO: 207500 - DNA, 2073 bp, Zea Mays
ttattgagaaatttaattgtactcatctatctaatctactttctctctcctcccccgtcccgtcgcttcgatcccccgagcttcgctcacaccggtcacctccgcctcctcccgcttcgcgcgcatctccttctatcgctccagcctccagcacacgtcctccatgccctcgcggttctgatccggccatagccatgcagcaccgctcgccggaggcggcttcggcatccgcctccccgacggccgcggcggtggaggccatggcgccgggcgtcggcggggttgagccggccgtgacgctcgaccaggttccgcgctggagcgacccggaccagcgcatctccctgctgtcccccaccgccgccggatccgagaccccggcctcgtccttcctctccttctccgacccgctcaccggcgacgacgcggccgcgggggccgggggccgtggcgcgtcgcggttccccgtcgattacgagatcaactcgaagatctacctctggcgaggccatccgtggaacctcgaggtcgacgccgtcgtcaactccaccaacgagaacttggacgaagctcatagcagtcctgggctccacgctgctgcaggttcggggctcgccgaggagtgcgccaccctgggtggctgccgcactgggatggctaagatgacaaatgcttatgatttgcctgccaggaaggtcatccatactgtgggcccaaaatatgctgtaaagtatcacacagctgcagagaatgcgcttagccactgctacaggtcttgtctagaactgctcattgagaatggccttgaaagcattgctactggctgcatttacacagaagccaagaattatcctcgtgaaccagctgctcatgtggcaataagaactgtgagacgttttctggagaaacaaaaggacaaaataacagctattgtcttctgtacgatatcatcatctgacacagagatatataagaggttgcttccactatatttccctcgggacaagcaagaagaagagatagccgcattgaaacttccagctgatgttggggatgagaatggtgagacagtaatagatgaaaggaaaataagaataaagcccttgcctgctggggaagcaaatagcaaaacaccaattcctacacttgcagatatcccgcttcctgattcgagtttgacacgtagaaggaattctttcaagttggactcatatttggatcctgcttttatgtctataattaaggatcctgatctccgacgcaaggagcaatgggaaaaatctcaggcaaacaagggacttaacttggctaacatgcttgggtttggtgatcttggcagtccaccattatctgctgctgaagaatattcacttcattcacgataccttgctaaagcgaattctatgaatctgtcagatgttgctgaaatgaaaataatttaccgtggaggagttgatagtgaagggcgtccagttatggtcattgttggtgctcactttcttcttcgctgcttggatctggaacgatttgttctatatgtagtaaaggaatttgaatctctgattcagaagccttacacaattgtctatttccactctgtggcatcattacaaccacagcctgatttaggattcatgaaacggttacaacagatactaggtcggaagcataaaaaaaatcttcatactatatacatactccacccgacactgggactgagaacagccgttatggcgatgcaactttttgttgacggggaggtctggaagaaagttgtatatgtcgacagacttgtgcagctattcagatatgtaccacgtgaacagctcaccattcctgattttgtgttccagcatgaccttgaagtgaatggtggaaagggcataatcgttgacccaagaacaaagcatatctaccagagaccatctggttgatctgtcataaacctgcaaatgaacgcttcacagctgaagactgatctgtttgctgttgcaaacaataagtagcaagtcccaaaggcgaggaagcataaactctggtctattttgcttttggttaactgcatgagatagt

SEQ ID NO: 207501 - DNA, 2338 bp, Zea Mays
ttattgagaaatttaattgtactcatctatctaatctactttctctctcctcccccgtcccgtcgcttcgatcccccgagcttcgctcacaccggtcacctccgcctcctcccgcttcgcgcgcatctccttctatcgctccagcctccagcacacgtcctccatgccctcgcggttctgatccggccatagccatgcagcaccgctcgccggaggcggcttcggcatccgcctccccgacggccgcggcggtggaggccatggcgccgggcgtcggcggggttgagccggccgtgacgctcgaccaggttccgcgctggagcgacccggaccagcgcatctccctgctgtcccccaccgccgccggatccgagaccccggcctcgtccttcctctccttctccgacccgctcaccggcgacgacgcggccgcgggggccgggggccgtggcgcgtcgcggttccccgtcgattacgagatcaactcgaagatctacctctggcgaggccatccgtggaacctcgaggtcgacgccgtcgtcaactccaccaacgagaacttggacgaagctcatagcagtcctgggctccacgctgctgcaggttcggggctcgccgaggagtgcgccaccctgggtggctgccgcactgggatggctaagatgacaaatgcttatgatttgcctgccaggaaggtcatccatactgtgggcccaaaatatgctgtaaagtatcacacagctgcagagaatgcgcttagccactgctacaggtcttgtctagaactgctcattgagaatggccttgaaagcattgctactggctgcatttacacagaagccaagaattatcctcgtgaaccagctgctcatgtggcaataagaactgtgagacgttttctggagaaacaaaaggacaaaataacagctattgtcttctgtacgatatcatcatctgacacagagatatataagaggttgcttccactatatttccctcgggacaagcaagaagaagagatagccgcattgaaacttccagctgatgttggggatgagaatggtgagacagtaatagatgaaaggaaaataagaataaagcccttgcctgctggggaagcaaatagcaaaacaccaattcctacacttgcagatatcccgcttcctgattcgagtttgacacgtagaaggatcctgatctccgacgcaaggagcaatgggaaaaatctcaggcaaacaagggacttaacttggctaacatgcttgggtttggtgatcttggcagtccaccattatctgctgctgaagaatattcacttcattcacgataccttgctaaagcgaattctatgaatctgtcagatgttgctgaaatgaaaataatttaccgtggaggagttgatagtgaagggcgtccagttatggtcattgttggtgctcactttcttcttcgctgcttggatctggaacgatttgttctatatgtagtaaaggaatttgaatctctgattcagaagccttacacaattgtctatttccactctgtggcatcattacaaccacagcctgatttaggattcatgaaacggttacaacagatactaggtcggaagcataaaaaaaatcttcatactatatacatactccacccgacactgggactgagaacagccgttatggcgatgcaactttttgttgacggggaggtctggaagaaagttgtatatgtcgacagacttgtgcagctattcagatatgtaccacgtgaacagctcaccattcctgattttgtgttccagcatgaccttgaagtgaatggtggaaagggcataatcgttgacccaagaacaaagcatatctaccagagaccatctggttgatctgtcataaacctgcaaatgaacgcttcacagtaccactctcactatgcacagactctccatgaatgactctgtccagtcctctgtagaagagtacccttctagagctgtgcattttgtatctagttgacattgttgctctgtgctattccttcgcctttttgggaggcatatttatgtatcttaataactattctgtataaacaaaaaaaatgctaaatgtctctcaatttgcctatagctgggcgtgctcgttaggttctgtaaatttttgacaggtccatagatattgagaaataggattgcagtctgttccgtctgagtaattgatcgccttggaatgtcttaataggctgaagactgatctgtttgctgttgcaaacaataagtagcaagtcccaaaggcgaggaagcataaactctggtctattttgcttttggttaactgcatgagatagt

SEQ ID NO: 207502 - DNA, 2392 bp, Zea Mays
ctcgaaataggatcgatactgtaaccctttaatgcaaatatggacagagattggggagcgtgaacaagataaagatcgcatgttccttgaactggaaacagagtgcatgcgtgtgtaccgtagaaaggttgatagtgccaatgctgagagagcccagctccgtcagtcactgatggccaaagaagcagagcttaaagctctagttgcttctatcggggaaaatggcccacgatttacggtggatgaaaagcacacatcgttgaaagatcaacttgctgcagtggcacctcttttggaagatcttagagtaaagaaacaagacagagtcaaacaaatctcaaatgtgcaatgtcaaatcgagaagataaaagcacaaatttctgatcacaattatcaggacagtgatggttccatcaaacaacttaacgatgaccatgacttatcgaccagaagaatttctgatcttcaaatgcaactgcgtaatctacagaaggagaagtccgatcgtcttcagaaggtttttatatatgtggatgaagtgcacagcctatgtgcagtgcttgggatggattttccaaagactgtaaaagaggtccacccgagtttgcatggatccaactctgaaaattcaacaaatattagtgatagcactcttgaaggtcttactcagactatcctgaagctcaaagcagaaaagaagacaagagttttaaagttgcaagagactgtagaaaaacttcacaagttatggaatctgatggagtcaactgagaaagagaggatacacttctctgaagtagctgctattcttggatctactgaggaagagatcaattctccaggcattctgtcattggagacaattcagaagactgaagaggaagtcgaaaagctaactgtacaaaaaactagtagaatgaaggagcttgttctcaagaaaaggttagaactagaaggcatctgtagaaatgcacacatggagcctgatatgagcacagcaccagagaagatcaccgcgctgattgattccggtttagtggatccttgcgaactcctttccagcattgaagtgcaaataacaaaagcaaatgaagagtccttaacgaggaaagatatcatggagagagtggataaatggctatcagcttgtgatgaagagacttggcttgaggaatataaccaagatgataataggtatagtgctggcaggggtgcccacttgaatcttaagcgtgcagagaaggcaaggataactgtccaaaagattccaactatgattgacagcttgatagccaaaacttttgcatgggaggatgaaagaaatgtgccatttttatatgatgggattcgtttggttgccattttggaagagcaaaaactcagaagggcacaaagggaggaagagaagagacgcagccgggatcagaggaagctgcacagtttattgcttaaggagaaggagttgattttcgggtccaaacctagtcctagaaagacaagcagcttcaataggaggaccagcaaccaccatccaaacgcaaatggcgctggattcatgactccggtgccacgccgagtttcagctggcagtgccaccccagagcttctgaccccacgctcgtattctggccggtacaacaactacttcaaggagaacaggcgcctgacagctgcaccactgaacttctcagttggttccaaggaggatagcatgtcatccttcgcatccatcagtggctcggaacctgattcgccattgtttttgcactaagtgttggttagggaggagacttcttggtgagaagggtggatagcctcaagatcggaccattgtgtgtgtgtgtgtgtggcagctgttaacattgctgattggtaacaacaggttgtgacaagtttagatgcgattgcttgtagatataatatctaacattcatggttctgctgtacttccaaatttaagttgtaagtcgtttggttaggaaggatgcaatgcccaagtgtgcaatgtatttgtttcgtgttaagtctgtatgttttgcatgtgaagaaagggtgatttttttttgtcaatgacgtagcagttcagccttcaaggttacagctacagcatcttgtcttgtactggtcgtttggatcacagctggcgtgtgctatatgggaatctaacacccatctttttgtcagaacaaagagtgtcttgcatgttggatctcagttcacacatgctgtcaatagaggtactttgaaagcgtcacatggatatccaggtcactcttcattcgatacttaggtgcccacgtcttcagtagcatgatgagttgcttgctgctgcaattggagttcaaagtgttacaaaagtttcacatgtgatcaatcccaaccggtgtggcag

SEQ ID NO: 207503 - DNA, 2271 bp, Zea Mays
gagagacagtcagacagcagctcgaacctcgaaaagcaggagagtccaaagccgaatggacaactggcaacaaatcaacagagccacagaggaaatgaatccgatagccaccgccgccctcacgccatcctcatttttcgcctcaaaccgccgcttcgcccctcgcctccgctccgtcctccccgccgctgccatgtcttacgccgccgtatccgcctccgccccaagccccagctccggcactggggaacaggtgaaggcggccccgctcccgcactcgaccctcgagatcgcgggcgcccgccggggcctcctctcaggcttcgccagcctccgcgccccgtaccgtgccttccccgtactcgcgtcgaaccgacacgtcgagaccatcttcgctgcgctcacgcgatcgctccccgccgttaagctgcggcgcgagtgcctccgcgcccctgacgacggagccgtcgcgctcgactgggtctctggcgacgaccgtgtgcttccgaatgatgctccggtgcttatactcttgcctggtcttacaggtggaagtgatgatacatatgtaaggcatatgcttatgagagctagaagcaagggatggcgtgttgtggtgtttaatagccgtggatgtgcagatagtcctgtgactacacccaagttctattctgcttcatttacaggggatctccgccaagttattggtcatattttaggacgttatcctcagtccaatgtctatgctaccggttggtctcttggagcgaatattcttgtgcgctaccttggcgaggaaactgataaatgccctttatctggcgcggtctccttgtgcaatccttttaatttggtaattgcagatgaagatttccacaaaggatttaacaacgtttatgataaagcattggctagggctttgacgactatatttaagaaggatttgaacaaaatttaggcatgctctccttttcgaagggctggagggtgaatatgatatacccaaggcagcgaatgcaagaactgttagagattttgatgaggggttaacccgagtttcatttggtttcaagtcagtggatgattattactccaattcaagcagctcggattctatcaaggatgtttgcatacccttactgtgcatacaggtcaaacttcactctatctgttctgtgcttcattagacgccaggacattaggaacaacagatacagtttaagagcctgatgtgtaccaccacttcttagttttggatcacgcgttactcagtactatgactgagctttaacccaaagctgttaaactacttaaattaagaatatggaagttcagttaatctgtggccttttggttctatcattggaataaaacctggagaaacatttcaacaccagcttaggtcttgcatatttagaaccctgacttgagaaagctggatcattttgcggtaaagttgtttgtaaaactctagaaagcagtatgcgtggtaattttagccaaaaaagagatttgtcagattcaattattagtgtgcctatgtgcatatattgtgaaggtcaaagcatgtcttttctgttataacttcaatcataatttagtatgtgcaggctgataatgacccaattgcaccatccaggggaattcctagagatgatatcaaggcaaataagaactgtctacttatagtaacaccacagggtggccatcttggatgggtagcaggcgacgaagctccattcggatgtccttggacagacccaatagtgatggaatatctagaacatctcgagaatgagaaggactctagtaccaaaaataacacatcctatgagggtgtttcagaggcatcagtatcccatctaactgtgcatggccaaagataataatatctctcttctcatagtactcattcgccacattatgttttatatggaaatagtttagtagagttcatttagccgtgttgtctgctgctgcctgctggttaattgagtacatggctcttcgtctacaggtctagtggtctacacatgtgcgagaagatttctgtgtcaaataagatgtctggttctgagatcaaaatagaacatgcgttatccaattgttcgttcttagggggtttcactttcatcccgtgtttgaaagggattctctgtaaatgcatgagctgttacggagttggcctttgtatccctcttctgcaacgcgtgaaagttgatggcgatgagcacggcagtgcatcatatgcacgcacactggatctcccaa

SEQ ID NO: 207504 - DNA, 1793 bp, Zea Mays
gagagacagtcagacagcagctcgaacctcgaaaagcaggagagtccaaagccgaatggacaactggcaacaaatcaacagagccacagaggaaatgaatccgatagccaccgccgccctcacgccatcctcatttttcgcctcaaaccgccgcttcgcccctcgcctccgctccgtcctccccgccgctgccatgtcttacgccgccgtatccgcctccgccccaagccccagctccggcactggggaacaggtgaaggcggccccgctcccgcactcgaccctcgagatcgcgggcgcccgccggggcctcctctcaggcttcgccagcctccgcgccccgtaccgtgccttccccgtactcgcgtcgaaccgacacgtcgagaccatcttcgctgcgctcacgcgatcgctccccgccgttaagctgcggcgcgagtgcctccgcgcccctgacgacggagccgtcgcgctcgactgggtctctggcgacgaccgtgtgcttccgaatgatgctccggtgcttatactcttgcctggtcttacaggtggaagtgatgatacatatgtaaggcatatgcttatgagagctagaagcaagggatggcgtgttgtggtgtttaatagccgtggatgtgcagatagtcctgtgactacacccaagttctattctgcttcatttacaggggatctccgccaagttattggtcatattttaggacgttatcctcagtccaatgtctatgctaccggttggtctcttggagcgaatattcttgtgcgctaccttggcgaggaaactgataaatgccctttatctggcgcggtctccttgtgcaatccttttaatttggtaattgcagatgaagatttccacaaaggatttaacaacgtttatgataaagcattggctagggctttgacgactatatttaagaagcatgctctccttttcgaagggctggagggtgaatatgatatacccaaggcagcgaatgcaagaactgttagagattttgatgaggggttaacccgagtttcatttggtttcaagtcagtggatgattattactccaattcaagcagctcggattctatcaaggatgtttgcatacccttactgtgcatacaggctgataatgacccaattgcaccatccaggggaattcctagagatgatatcaaggcaaataagaactgtctacttatagtaacaccacagggtggccatcttggatgggtagcaggcgacgaagctccattcggatgtccttggacagacccaatagtgatggaatatctagaacatctcgagaatgagaaggactctagtaccaaaaataacacatcctatgagggtgtttcagaggcatcagtatcccatctaactgtgcatggccaaagataataatatctctcttctcatagtactcattcgccacattatgttttatatggaaatagtttagtagagttcatttagccgtgttgtctgctgctgcctgctggttaattgagtacatggctcttcgtctacaggtctagtggtctacacatgtgcgagaagatttctgtgtcaaataagatgtctggttctgagatcaaaatagaacatgcgttatccaattgttcgttcttagggggtttcactttcatcccgtgtttgaaagggattctctgtaaatgcatgagctgttacggagttggcctttgtatccctcttctgcaacgcgtgaaagttgatggcgatgagcacggcagtgcatcatatgcacgcacactggatctcccaa

SEQ ID NO: 207505 - DNA, 1812 bp, Zea Mays
gagagacagtcagacagcagctcgaacctcgaaaagcaggagagtccaaagccgaatggacaactggcaacaaatcaacagagccacagaggaaatgaatccgatagccaccgccgccctcacgccatcctcatttttcgcctcaaaccgccgcttcgcccctcgcctccgctccgtcctccccgccgctgccatgtcttacgccgccgtatccgcctccgccccaagccccagctccggcactggggaacaggtgaaggcggccccgctcccgcactcgaccctcgagatcgcgggcgcccgccggggcctcctctcaggcttcgccagcctccgcgccccgtaccgtgccttccccgtactcgcgtcgaaccgacacgtcgagaccatcttcgctgcgctcacgcgatcgctccccgccgttaagctgcggcgcgagtgcctccgcgcccctgacgacggagccgtcgcgctcgactgggtctctggcgacgaccgtgtgcttccgaatgatgctccggtgcttatactcttgcctggtcttacaggtggaagtgatgatacatatgtaaggcatatgcttatgagagctagaagcaagggatggcgtgttgtggtgtttaatagccgtggatgtgcagatagtcctgtgactacacccaagttctattctgcttcatttacaggggatctccgccaagttattggtcatattttaggacgttatcctcagtccaatgtctatgctaccggttggtctcttggagcgaatattcttgtgcgctaccttggcgaggaaactgataaatgccctttatctggcgcggtctccttgtgcaatccttttaatttggtaattgcagatgaagatttccacaaaggatttaacaacgtttatgataaagcattggctagggctttgacgactatatttaagaaggatttgaacaaaatttaggcatgctctccttttcgaagggctggagggtgaatatgatatacccaaggcagcgaatgcaagaactgttagagattttgatgaggggttaacccgagtttcatttggtttcaagtcagtggatgattattactccaattcaagcagctcggattctatcaaggatgtttgcatacccttactgtgcatacaggctgataatgacccaattgcaccatccaggggaattcctagagatgatatcaaggcaaataagaactgtctacttatagtaacaccacagggtggccatcttggatgggtagcaggcgacgaagctccattcggatgtccttggacagacccaatagtgatggaatatctagaacatctcgagaatgagaaggactctagtaccaaaaataacacatcctatgagggtgtttcagaggcatcagtatcccatctaactgtgcatggccaaagataataatatctctcttctcatagtactcattcgccacattatgttttatatggaaatagtttagtagagttcatttagccgtgttgtctgctgctgcctgctggttaattgagtacatggctcttcgtctacaggtctagtggtctacacatgtgcgagaagatttctgtgtcaaataagatgtctggttctgagatcaaaatagaacatgcgttatccaattgttcgttcttagggggtttcactttcatcccgtgtttgaaagggattctctgtaaatgcatgagctgttacggagttggcctttgtatccctcttctgcaacgcgtgaaagttgatggcgatgagcacggcagtgcatcatatgcacgcacactggatctcccaa

SEQ ID NO: 207506 - DNA, 1473 bp, Zea Mays
agatacaaatgaaattaaatgaccacaaaagaattttcacctgaagcaaagcaaaaggcctggtcttacaggtggaagtgatgatacatatgtaaggcatatgcttatgagagctagaagcaagggatggcgtgttgtggtgtttaatagccgtggatgtgcagatagtcctgtgactacacccaagttctattctgcttcatttacaggggatctccgccaagttattggtcatattttaggacgttatcctcagtccaatgtctatgctaccggttggtctcttggagcgaatattcttgtgcgctaccttggcgaggaaactgataaatgccctttatctggcgcggtctccttgtgcaatccttttaatttggtaattgcagatgaagatttccacaaaggatttaacaacgtttatgataaagcattggctagggctttgacgactatatttaagaaggatttgaacaaaatttaggcatgctctccttttcgaagggctggagggtgaatatgatatacccaaggcagcgaatgcaagaactgttagagattttgatgaggggttaacccgagtttcatttggtttcaagtcagtggatgattattactccaattcaagcagctcggattctatcaaggatgtttgcatacccttactgtgcatacaggctgataatgacccaattgcaccatccaggggaattcctagagatgatatcaaggcaaataagaactgtctacttatagtaacaccacagggtggccatcttggatgggtagcaggcgacgaagctccattcggatgtccttggacagacccaatagtgatggaatatctagaacatctcgagaatgagaaggactctagtaccaaaaataacacatcctatgagggtgtttcagaggcatcagtatcccatctaactgtgcatggccaaagataataatatctctcttctcatagtactcattcgccacattatgttttatatggaaatagtttagtagagttcatttagccgtgttgtctgctgctgcctgctggttaattgagtacatggctcttcgtctacaggtctagtggtctacacatgtgcgagaagatttctgtgtcaaataagatgtctggttctgagatcaaaatagaacatgcgttatccaattgttcgttcttagggggtttcactttcatcccgtgtttgaaagggattctctgtaaatgcatgagctgttacggagttggcctttgtatccctcttctgcaacgcgtgaaagttgatggcgatgagcacggcagtgcatcatgtaaatttgacaatgtcattcagcgcaaaaaaaaaaaaaccccccgaaaaatgtgttggaagagtttttgtgtgcgcatgctaacaaatatctcatgtggtaaacatcatcttggattaacatatggcaatgtgatgaaatagtaacagttgttgaaatttt

SEQ ID NO: 207507 - DNA, 2935 bp, Zea Mays
gagagacagtcagacagcagctcgaacctcgaaaagcaggagagtccaaagccgaatggacaactggcaacaaatcaacagagccacagaggaaatgaatccgatagccaccgccgccctcacgccatcctcatttttcgcctcaaaccgccgcttcgcccctcgcctccgctccgtcctccccgccgctgccatgtcttacgccgccgtatccgcctccgccccaagccccagctccggcactggggaacaggtgaaggcggccccgctcccgcactcgaccctcgagatcgcgggcgcccgccggggcctcctctcaggcttcgccagcctccgcgccccgtaccgtgccttccccgtactcgcgtcgaaccgacacgtcgagaccatcttcgctgcgctcacgcgatcgctccccgccgttaagctgcggcgcgagtgcctccgcgcccctgacgacggagccgtcgcgctcgactgggtctctggcgacgaccgtgtgcttccgaatgatgctccggtgcttatactcttgcctggtcttacaggtggaagtgatgatacatatgtaaggcatatgcttatgagagctagaagcaagggatggcgtgttgtggtgtttaatagccgtggatgtgcagatagtcctgtgactacacccaaggtacttcaaataccttttccaattcttttattagcactgtaaagcttatttatagctcctatagctcttacaaagcttcgaagctatgcagtggaccatattttcccttttgatacttgtcagggaaaagtgctaagatctcatttatatggtttgattgattgagaagtgcactgcccacttttaagttaattatcagcaacagtagacacacccattttgttctggtaagctacacagaactgaacctctttctggcttatagcataacatgtgctgcctaaaagttggctcatcccagttcatatgtgcaaactgtccaaatatatattttttccatgttggcatctggtgtgataaatgcactctatatgatattgcttctgtgtactttttcctacttagggtgtaaccagaaactgactaaagggtgagtgaactggctcttactgtaaaacttgacagaattggagttttgaactgaaagtaggaaaaggttaaagaacattgaagtgtattattaacaataaattgcattgttgctcaatgttgaagggtttttttggtttttattttgtggctacttgctgccctagtaaaatacgacatattgtgtccttaaactgaattgtctgtcataaatttctaagcttcaccctgatgtgtacagcatatcaataaagtgtcgatatgcatgttggcaatcaacgtctttaaccatggggccttgaatcaaactcaatggataaacctttggaaacctaggggttaagtggttaacaaagagtacataataagtaaggagataaagatagcaaatgaaatcgaggctcgaagctgtaggggtccatcttctttttaggacatacgttgacttgcatcttctgtcatgtgcagttctattctgcttcatttacaggggatctccgccaagttattggtcatattttaggacgttatcctcagtccaatgtctatgctaccggttggtctcttggagcgaatattcttgtgcgctaccttggcgaggaaactgataaatgccctttatctggcgcggtctccttgtgcaatccttttaatttggtaattgcagatgaagatttccacaaaggatttaacaacgtttatgataaagcattggctagggctttgacgactatatttaagaaggatttgaacaaaatttaggcatgctctccttttcgaagggctggagggtgaatatgatatacccaaggcagcgaatgcaagaactgttagagattttgatgaggggttaacccgaggtttgcagcaacgtctaacccaactgtactagctgtaatttctatagtttcctgttcacattcaagaggacacttcaatggtttgcagtttcatttggtttcaagtcagtggatgattattactccaattcaagcagctcggattctatcaaggatgtttgcatacccttactgtgcatacaggctgataatgacccaattgcaccatccaggggaattcctagagatgatatcaaggcaaataagaactgtctacttatagtaacaccacagggtggccatcttggatgggtagcaggcgacgaagctccattcggatgtccttggacagacccaatagtgatggaatatctagaacatctcgagaatgagaaggactctagtaccaaaaataacacatcctatgagggtgtttcagaggcatcagtatcccatctaactgtgcatggccaaagataataatatctctcttctcatagtactcattcgccacattatgttttatatggaaatagtttagtagagttcatttagccgtgttgtctgctgctgcctgctggttaattgagtacatggctcttcgtctacaggtctagtggtctacacatgtgcgagaagatttctgtgtcaaataagatgtctggttctgagatcaaaatagaacatgcgttatccaattgttcgttcttagggggtttcactttcatcccgtgtttgaaagggattctctgtaaatgcatgagctgttacggagttggcctttgtatccctcttctgcaacgcgtgaaagttgatggcgatgagcacggcagtgcatcatgtaaatttgacaatgtcattcagcgcaaaaaaaaaaaaaccccccgaaaaatgtgttggaagagtttttgtgtgcgcatgctaacaaatatctcatgtggtaaacatcatcttggattaacatatggcaatgtgatgaaatagtaacagttgttgaaatttt

SEQ ID NO: 207508 - DNA, 2705 bp, Zea Mays
gagagacagtcagacagcagctcgaacctcgaaaagcaggagagtccaaagccgaatggacaactggcaacaaatcaacagagccacagaggaaatgaatccgatagccaccgccgccctcacgccatcctcatttttcgcctcaaaccgccgcttcgcccctcgcctccgctccgtcctccccgccgctgccatgtcttacgccgccgtatccgcctccgccccaagccccagctccggcactggggaacaggtgaaggcggccccgctcccgcactcgaccctcgagatcgcgggcgcccgccggggcctcctctcaggcttcgccagcctccgcgccccgtaccgtgccttccccgtactcgcgtcgaaccgacacgtcgagaccatcttcgctgcgctcacgcgatcgctccccgccgttaagctgcggcgcgagtgcctccgcgcccctgacgacggagccgtcgcgctcgactgggtctctggcgacgaccgtgtgcttccgaatgatgctccggtgcttatactcttgcctggtcttacaggtggaagtgatgatacatatgtaaggcatatgcttatgagagctagaagcaagggatggcgtgttgtggtgtttaatagccgtggatgtgcagatagtcctgtgactacacccaaggtacttcaaataccttttccaattcttttattagcactgtaaagcttatttatagctcctatagctcttacaaagcttcgaagctatgcagtggaccatattttcccttttgatacttgtcagggaaaagtgctaagatctcatttatatggtttgattgattgagaagtgcactgcccacttttaagttaattatcagcaacagtagacacacccattttgttctgttctattctgcttcatttacaggggatctccgccaagttattggtcatattttaggacgttatcctcagtccaatgtctatgctaccggttggtctcttggagcgaatattcttgtgcgctaccttggcgaggaaactgataaatgccctttatctggcgcggtctccttgtgcaatccttttaatttggtaattgcagatgaagatttccacaaaggatttaacaacgtttatgataaagcattggctagggctttgacgactatatttaagaagcatgctctccttttcgaagggctggagggtgaatatgatatacccaaggcagcgaatgcaagaactgttagagattttgatgaggggttaacccgaggtttgcagcaacgtctaacccaactgtactagctgtaatttctatagtttcctgttcacattcaagaggacacttcaatggtttgcagtttcatttggtttcaagtcagtggatgattattactccaattcaagcagctcggattctatcaaggatgtttgcatacccttactgtgcatacaggtcaaacttcactctatctgttctgtgcttcattagacgccaggacattaggaacaacagatacagtttaagagcctgatgtgtaccaccacttcttagttttggatcacgcgttactcagtactatgactgagctttaacccaaagctgttaaactacttaaattaagaatatggaagttcagttaatctgtggccttttggttctatcattggaataaaacctggagaaacatttcaacaccagcttaggtcttgcatatttagaaccctgacttgagaaagctggatcattttgcggtaaagttgtttgtaaaactctagaaagcagtatgcgtggtaattttagccaaaaaagagatttgtcagattcaattattagtgtgcctatgtgcatatattgtgaaggtcaaagcatgtcttttctgttataacttcaatcataatttagtatgtgcaggctgataatgacccaattgcaccatccaggggaattcctagagatgatatcaaggcaaataagaactgtctacttatagtaacaccacagggtggccatcttggatgggtagcaggcgacgaagctccattcggatgtccttggacagacccaatagtgatggaatatctagaacatctcgagaatgagaaggactctagtaccaaaaataacacatcctatgagggtgtttcagaggcatcagtatcccatctaactgtgcatggccaaagataataatatctctcttctcatagtactcattcgccacattatgttttatatggaaatagtttagtagagttcatttagccgtgttgtctgctgctgcctgctggttaattgagtacatggctcttcgtctacaggtctagtggtctacacatgtgcgagaagatttctgtgtcaaataagatgtctggttctgagatcaaaatagaacatgcgttatccaattgttcgttcttagggggtttcactttcatcccgtgtttgaaagggattctctgtaaatgcatgagctgttacggagttggcctttgtatccctcttctgcaacgcgtgaaagttgatggcgatgagcacggcagtgcatcatgtaaatttgacaatgtcattcagcgcaaaaaaaaaaaaaccccccgaaaaatgtgttggaagagtttttgtgtgcgcatgctaacaaatatctcatgtggtaaacatcatcttggattaacatatggcaatgtgatgaaatagtaacagttgttgaaatttt

SEQ ID NO: 207509 - DNA, 4299 bp, Zea Mays
ccaggccattccgcaccgccaaaattgctccgcgcgggaattccaatttcctccccacctccgcccgcttcccagttcccagtgcacagccgattcgtctccattcctatcttctcccattccctccccagtccgacctccgaccccccatttcgtcgccgccgccgtactcgccgagaacccgccccaaatccataggcccatcccttacccattaacccccaatgcctccgaagaagcgcgccgccgccgccgcctcttcaaagaagccgcagccatcgcagccatcgcagcccgccaagttcggtatcctccacttcttcgagcgccagacccaggcctcccagaacgccaagcgccagaagcccgacccccctgcgcctccccctcctcctccgccgccgcccgagaaggagccctcggaggtctcgccggaggttaccaagacgctggcgccgaagcgtgtcagattttctcccggaatgttgattaagcagagccaggacgatggggtcgcggaggtggtgacttggaagatctcgccggtgaaccatcgccttggtacgacgaagtcgaagcaatttctggggatggcgccccatccgtactcaagcgagaaaaattcctcccttgatgctatgaagaagtggcattcatctccattgggcttgtcaaggtgtactactttgggaagtaattcaggagttcttggatctgctatagttggttgtgatggtgtgggggatactcagagtccatttcggaccccaccatcgctttcctatggctgcaacgaggtaaccttcttgttccttgagcagcaagtgagcagtggtgtaacttctgagggaggtgccgaaccatcgggagcagggcagcacaaaaaggcattacttgatcttctagaccaagtagaggatgcaatcatggaagaagaattgcctgctgatcctggaaataaaggagggcaaaccacgaatgaggatatcaccaacaatagccgttctcctgttgctgatactgacttaactatcccatccaagaaaactattcatgtcccacccttcaatagttttcttgtcttggaggtgtccgaaaaacataaagctgatgattcatcatgtgatcgctaccctgttaaggttctgcgtctgctgaatgaacactctggtacagaatgtgccgtgcatctgtgtgatgagtggttcgacagtattgttgggcctggtgatactgtaaatgtcattggagaatttagtaaccatggaaaatgtattgttgaccatgacaataatcttgttattgtccatccagagcaactcatttccgggacacgggctgcttctagcttccaatgtttaagaaggtctgttctcgatgagaggctaaaaagcaatgaatattctaccagcgcgttgactggtactctgcttcaccaagtctttcaggctggattactcaatgatgctccttcatggcagtttttggaacaacaggcaaaggaagtacttctgaaaaatattgaaactttatatgcatgtggagtcaatgaaagcaacatgtactctacgctcattgaagctatccccaaaatgttgaattggttcaagtgtttcttaaagggttcaaaatgttctgatgttgattttggacataacgaagtgagaaagactgttggagtgactgaggtcatggatattgaggaaatggcatgggcaccaagatatggtatgaaaggggttatcgatgcttctgttagatcaagagttgagtcacacaatggtggttcatatgatagaataatgccactagagttcaaaactggcaaagcaactagtggccaggcagctatggaacactcagctcaggtgatgttatacacactgttgatgacagagagatacttgaatgaggatattgacttgggccttctgtattatcttcacacagaccagacattgggcattaaagtaaagaggactgatttaattgggctaataatgcgccgaaacgagcttgctactgagatcctgaaggcatcgatgtcacagagttttcctccaatgttacagagcccatcaacatgtaatagatgtcgacacctgatttcttgcaccatatatcacaaggcacacggaggcagtggtacaactagtgggcttggtgatctatttgacaaccttgtgaatcacttaacagtcacacatcataattttcttaaacattgggatagattgattgatcttgaagctagagcttctcaggtaaaaaagaacatcttgcagcctcataattcaaactatgggagtgggagttctgctgtaccttattttgttcttgacataaaaaatggacattcaatagattcttcaggaaaaagcaaaagatacatatataattttgttcagcaaaagatgcagcctgaaacagctgatcagttagatgctcaatttgacagcatagatttcagcctgaaagttggtgattttgtggtgcttagcactcagtctgggagaatagcagttgcaaatggatgtataagagaaataataagtcactctcacataacggtctctttgccacgccgtttgagaattccagatagcaattccttgtcagagcaagaggatctgacacgtgaaatttggcggatagacaaggatgaatttagttcttcatttggaataatgagactcaacattgtccaactatttgctcagaatccacaaaactctcacctgcgcaagttgattgttgatcttgaggcacccaggtttgatagcggaggtctgtttagccaagatcctgcactatcatacataaggtcactaccaaacttgaataatgaccaacaaaggtcactgcataaaattctaggagcaaaggattatgctcttattttaggaatgcctggaacaggcaaaacatacacaatggtgcatgctgtgaagtcattattgataagaggggaatctattttgctaacttcatatactaactcggctattgataccctgctcatgaagttgaagactgagggtgtagattttattcggattggaaggcctgaggctgtacatcctgatgtcagggcccactgcttgtcaacaactgaggcacaatcggttgatgccattaaagcaaggatggagcaagtacaggttgttggagttacttgcttgggaatgtatcatcctttattagcacataagaagtttgacacatgtatcatggatgaagctggacaaattacattgccggtttcactgggacctttgatgcttgcaacaaagtttgttctagtaggagaccattatcaacttcctccactggttcagagctctgaagcgcgagaaaatgggatgggcatcagcttattttggagattgtcagaagcacattcccaggcaatttcagcactgcgatgccaggttgtgctgtggttcattggaaattgcaaatgccaaactcaagttttctggtagagaaccaatgcagttgaagttaaaagagatcttgaatcccgatagggctgtgatctttgccaacacagatcaaatacctgcacttgaggcaaaggaacacagaactgtgaacaatcctacagaagcacacattatttcatggatcatcaaagaattactaagaaggggtgtagctcaagatgctattggtatcataaccccatataacgctcaagtgaatatcattcagcaatacactgattgtttggttgaggttcatacgatcgataaataccagggtagagataaggagtgtataatagtatctttcgtgcgctccactgcaaactcaagggctagtggttcttctctgcttggtgattggcacaggatcaatgttctgttgacacgtgcaaagaagaagctcatcatggtgggatcacgtggaacgctttcaacaatacctttgctcaggcttcttgtcgacaaagtagctgagattggtggcctgttggatttgacaaataaggatgcacattctttttcgagaacttgaagttcttgtttgaatgcacaataggatgcacggtagatgaatctggaaggtttttataaggccaagctgtaaataagaatatgctgtaaattttgtttttggaaatgtatagtaaacctagccaagagccacacagctagaggttaggttttgtatattccttccgttagttataacttatttcaatttcattaaagtaccataagtttactaatattatagaaaaactttcaaaaatttatgacatcaaatatacgtactataaaaatataattaatg

SEQ ID NO: 207510 - DNA, 631 bp, Zea Mays
gccggaagaaggaggcagtgaaatccggccaaatctcgacgcaatttttcttgccgattgctggtgcgtagtaagatcgtagctgaatccgtaggacgggcgctaatcggaggaacttgcatcgattcttgcgtgctgacggtaccggcaaggcggcaagataagagttggtgcctgccgattgcagggacagggacggtgtttgtggaattgcctccttggaggaggctggtgagagggagaaaggatgacgatgccatggggtctcgcggcctgcatcgtggacatggtgtgggcggtgctcgccggctgggtgtccacctgcctggtcatcgccaacgaggtcgcccgcggcatgcgcagtggcgagatcggtccgttcgttgtcggctgagttattcgatcggctttaggtggctcagttgttcctgcattctcgatagtgtatttttcgtaccggtacatttcatacacatcgctatgctgtacagacggcgttgaggactggaggatgacttttgtttctaggattttgagttgtagtgagtgtttgtgcaatcacacaagaacaaacatgtgaatatgtgatgtactttcagtggtatataaacgggatggtcctataaaataa

SEQ ID NO: 207511 - DNA, 1117 bp, Zea Mays
acctaacccttcggccttcgttgcggacccgccactcacttcttctctcgaccgcatcttttctccgcgccgccgctcgcctgcacttctacgtgtgaaccgcgtccgcgcctatggcctgcccgtgcccagctgccccctctccacacgagcctctctaggcgtcaagcgtgccattaagcaaccgtggcccccacccctcctcggctctctgcgtgagcacaagcacgtctctgtagcccatgttcaacggaagcgaaaggtgtcagtgctagaggatttggaaaggcgctgtttgataagaagacaaacccgtgtcctgcccattaattccactgaagaaaacatagaatgtgcatcataatgtcacagaaggcctaaaatgttgtagtgtgcggccattgctcacgaggaggcagagtgccgtgttgccgagtgccgctggaccacatacgattgttgatggtaaagaagttgtgaactttgcatcagcaaactacctcggtttaattggcaacgaaaagattattgattcttgcatcagttcattggagaaatatggtgttggttcttgtggtccacgtggcttttatggaacaattgatgtccatcttgactgtgagtcaaagatagctaaatttttggggactccagactccattctttattcatatgggatttctacaatattcagtgtgatacctgccttctgtaagaaagaagatatcatagtcgcttaactgtacatgggtagtttgatgtgattgcggtgacgagggtgttgactgtttggtgaaatgcttgggacaaagtggccaacaagaatggagtcatggaacatcgacaggaggggtgcggcagcagcaaccgatgtatcccttggacaatctggttttgacaagatgcaaatcaatccgctgtacactgtattccgcacttgcacagattgtttggttaattacaagattatctcagtgttttgattggtacacttatgtatgaaatattgattggtactcatctatattatatgaattatattattattaaatatatgtgtgtgtatttctctttcaaattattataatgtggtatctcaaatgaatataaattgaag

SEQ ID NO: 207512 - DNA, 1964 bp, Zea Mays
ggcagatctgggcctagtctgcatataccgagtagaatagagaggggagagggctagggttcagagcacgacgagccataacttcaacaagcagcgggcgggtctcggacgcatggctgtgtcgaccacttgcagacgacgccgacacagatccaggtccaggtccaggttaagtattgttttttggtgtgtggacgtgattcttctagtgagatatgttctgaagcggcaaggtaaaccctcttagtctacttgtttaacttttaaaatatacccatcggtttgaatgatgcaaaactacaataatcttcatgtacttgattgactaatgagttggatatgattcgtattctatttcttaaaaaagtaaggcagaagatagctagattcatgatttggcaaatacaacctcaaattaacttgcctattcatcgattatgttcaggaaataatgtatcaattaattgaaggaagtaatagtagtggctcatctagaactcattcgattcctagttctaactatgaccactaacttttgccttgctagctggctatgtacaagcctgcaacacattcttatgataccatcatgtcattaaatgtcaagggctgagtatccccggacagcagggcctcgactacgcagttcgtagtcgtgacccatcttctccggcgagattttgcccctcagccacaggttttgttggtgagtggagaggagagattagagagaataaactttgcttaatccttccagccggctggttacacatatatatatggccgatcggccctaataaactagagataattactccttgatcctagggatagctatctaatcattcctaacaaccagcccctcccccctaaatcttctccttaattctaggaacttgaaacaaaaagtaaccatgttctatctgtaacaaaccagtgcgtgcgcgcctaaccgcccacgcgtatcgcacgctcttttgcccggcgcacgtcgttggcgcgcctgcgcctggtgtaggtacgtccgcacatgacatatactagagtctaaagtccattgaaattttaaattatatactttcatgtatggatggtgtttggagtgcaaacgtgcctttttatgttccacaaaatcattttactattgatccattccatcttttatactctttaatctattatggcattgatttccttcagttgcgtgtttccattttctgccactagttctatagaagttcactgatgtgtttaaagttataatggttacctagactaggctaagtagagtatacgtattgtagttctactgccttgaacaagaaaattcttgtctttgatgatgtagtttcttggttttttttcatctacaacaaatttatgatttattctcatttccttttgcaagttcatggagcatggttaccaccttggtttgcggcacaatatgctcattacgcggaggttgtcgcaggtcactagaataaacaagggaaacctgctgtgcagaatgttttgcataagagaaaatggttgccctcaagaaaaatgtaggaccttatgtataaaaggtatcaacaagatgttaatgggataaacctcatattgagaccgctaagatgaaatggattcatgttaaggagaaattggttgtcctcaagaaaaatgcagaaccttatgtacaaatggattgtcttcaaaatgttgttcttgtagctacaacaaagagaaacaacaatggtggtgatgctatacgtgtagaagtagcaatgttggtcttgtagctccaagattttgttattttgttgttgatgaatgatatctatgataatatattgctaagtgtatgtgatgatcattggttgttgtttaattataatggtttgtgcttattgtgctacattgacattggtaataattaaaaaattaaaatggccttggttgggccaaatgttttgtgacaa

SEQ ID NO: 207513 - DNA, 1721 bp, Zea Mays
atataccgagtagaatagagaggggagagggctagggttcagagcacgacgagccataacttcaacaagcagcgggcgggtctcgggcggcgcgcgggcgcttggtggacgacgctcaagcggaggcgggcagcgcttgggagtcaggcgtgcgaccttgcggctgtgctcaggcggggcgttgcgtgaagcgctagggagtcgggtgtgcgacgggcggcgctcgttcctcaggcatgtgcggacgacgctcagacgcatggctgtgtcgaccacttgcagacgacgccgacacagatccaggtccaggtccaggttaagtattgttttttggtgtgtggacgtgattcttctagtgagatatgttctgaagcggcaaggtaaaccctcttagtctacttgtttaacttttaaaatatacccatcggtttgaatgatgcaaaactacaataatcttcatgtacttgattgactaatgagttggatatgattcgtattctatttcttaaaaaagtaaggcagaagatagctagattcatgatttggcaaatacaacctcaaattaacttgcctattcatcgattatgttcaggaaataatgtatcaattaattgaaggaagtaatagtagtggctcatctagaactcattcgattcctagttctaactatgaccactaacttttgccttgctagctggctatgtacaagcctgcaacacattcttatgataccatcatgtcattaaatgtcaagggctgagtatccccggacagcagggcctcgactacgcagttcgtagtcgtgacccatcttctccggcgagattttgcccctcagccacaggttttgttggtgagtggagaggagagattagagagaataaactttgcttaatccttccagccggctggttacacatatatatatggccgatcggccctaataaactagagataattactccttgatcctagggatagctatctaatcattcctaacaaccagcccctcccccctaaatcttctccttaattctaggaacttgaaacaaaaagtaaccatgttctatctgtaacaaaccagtgcgtgcgcgcctaaccgcccacgcgtatcgcacgctcttttgcccggcgcacgtcgttggcgcgcctgcgcctggtgtagttcatggagcatggttaccaccttggtttgcggcacaatatgctcattacgcggaggttgtcgcaggtcactagaataaacaagggaaacctgctgtgcagaatgttttgcataagagaaaatggttgccctcaagaaaaatgtaggaccttatgtataaaaggtatcaacaagatgttaatgggataaacctcatattgagaccgctaagatgaaatggattcatgttaaggagaaattggttgtcctcaagaaaaatgcagaaccttatgtacaaatggattgtcttcaaaatgttgttcttgtagctacaacaaagagaaacaacaatggtggtgatgctatacgtgtagaagtagcaatgttggtcttgtagctccaagattttgttattttgttgttgatgaatgatatctatgataatatattgctaagtgtatgtgatgatcattggttgttgtttaattataatggtttgtgcttattgtgctacattgacattggtaataattaaaaaattaaaatggccttggttgggccaaatgttttgtgacaa

SEQ ID NO: 207514 - DNA, 2130 bp, Zea Mays
atataccgagtagaatagagaggggagagggctagggttcagagcacgacgagccataacttcaacaagcagcgggcgggtctcgggcggcgcgcgggcgcttggtggacgacgctcaagcggaggcgggcagcgcttgggagtcaggcgtgcgaccttgcggctgtgctcaggcggggcgttgcgtgaagcgctagggagtcgggtgtgcgacgggcggcgctcgttcctcaggcatgtgcggacgacgctcagacgcatggctgtgtcgaccacttgcagacgacgccgacacagatccaggtccaggtccaggttaagtattgttttttggtgtgtggacgtgattcttctagtgagatatgttctgaagcggcaaggtaaaccctcttagtctacttgtttaacttttaaaatatacccatcggtttgaatgatgcaaaactacaataatcttcatgtacttgattgactaatgagttggatatgattcgtattctatttcttaaaaaagtaaggcagaagatagctagattcatgatttggcaaatacaacctcaaattaacttgcctattcatcgattatgttcaggaaataatgtatcaattaattgaaggaagtaatagtagtggctcatctagaactcattcgattcctagttctaactatgaccactaacttttgccttgctagctggctatgtacaagcctgcaacacattcttatgataccatcatgtcattaaatgtcaagggctgagtatccccggacagcagggcctcgactacgcagttcgtagtcgtgacccatcttctccggcgagattttgcccctcagccacaggttttgttggtgagtggagaggagagattagagagaataaactttgcttaatccttccagccggctggttacacatatatatatggccgatcggccctaataaactagagataattactccttgatcctagggatagctatctaatcattcctaacaaccagcccctcccccctaaatcttctccttaattctaggaacttgaaacaaaaagtaaccatgttctatctgtaacaaaccagtgcgtgcgcgcctaaccgcccacgcgtatcgcacgctcttttgcccggcgcacgtcgttggcgcgcctgcgcctggtgtaggtacgtccgcacatgacatatactagagtctaaagtccattgaaattttaaattatatactttcatgtatggatggtgtttggagtgcaaacgtgcctttttatgttccacaaaatcattttactattgatccattccatcttttatactctttaatctattatggcattgatttccttcagttgcgtgtttccattttctgccactagttctatagaagttcactgatgtgtttaaagttataatggttacctagactaggctaagtagagtatacgtattgtagttctactgccttgaacaagaaaattcttgtctttgatgatgtagtttcttggttttttttcatctacaacaaatttatgatttattctcatttccttttgcaagttcatggagcatggttaccaccttggtttgcggcacaatatgctcattacgcggaggttgtcgcaggtcactagaataaacaagggaaacctgctgtgcagaatgttttgcataagaaatgtattcctgttacagagaaaatggttgccctcaagaaaaatgtaggaccttatgtataaaaggtatcaacaagatgttaatgggataaacctcatattgagaccgctaagatgaaatggattcatgttaaggagaaattggttgtcctcaagaaaaatgcagaaccttatgtacaaatggattgtcttcaaaatgttgttcttgtagctacaacaaagagaaacaacaatggtggtgatgctatacgtgtagaagtagcaatgttggtcttgtagctccaagattttgttattttgttgttgatgaatgatatctatgataatatattgctaagtgtatgtgatgatcattggttgttgtttaattataatggtttgtgcttattgtgctacattgacattggtaataattaaaaaattaaaatggccttggttgggccaaatgttttgtgacaa

SEQ ID NO: 207515 - DNA, 4100 bp, Zea Mays
tgttggtttgcttctcaacaattaggcaatagactgttctaggacagattcaaccatgagccaagaactgccaatttccaacatttttgtttctgttgttaccaacaaagttgagatgcgttgatccgaggtatgcgcatcagatattcatagaaaaattccaatctgcagctgcacccgtcgctcgtgtcagcggctccggtcgaggtaggaggagcgtgttgcaatttgttgcgcgacggcgacggcaaaggatcactgcagctagcgccgggccgatggcagcggcaaccacggagggcggcggcgcgggcgaatctgaaccgagctaatctacacgacagcgcccccggcggcacgaccgcacgagtactaggcagtactagcctagcctagtactcctagtcctagtcctaagattaggtcccaggagatgaaggcacctacttggttggaagggtgaacggccgctccccctccctaagatccaaaccccggcacccgcggcgccggcgacgcagggaggaggcgatgcacggccggccgcggcgcccggccaagcctgaggacgacgaggcggcgtcagcgaaagccgccaagctccgggacctccaggcccaggtcctgcacaatcaccatgcccgcacgtacacaaaggagtcaattgggctgagcttcaagctgctcgagacaaatccagaggcctacacggcatggaactaccggaagcttgcgttgcagcacaatgtcaaggagctttctgacccacaggccatcaagtctgctattgatgatgagctgagagtggctgaggttgctttaaggcagaacccaaagtcctatggggcttggtatcaccggaagtggttgctaaaccaaaagctagcgcctgtggatttcaaatatgagcttggcctcttggataaactgttaaaggtggacgccaggaatttccatggatggaattaccgaaggttccttgcgagattcatgggtttgccagatgatgaggagcttaagtatacgatggataaaatcagtgacaacttcagtaattactcagcatggcataatcgtagagcaaaggttttgagtcaaagcagaagattttttccgaggagtttgaacttgttactcaagctctttttacagatccaagtgaccaaagtggatggttctatcacctctggcttttagctcaaacatctagtccagataacccacagctgattgcttcatggccttctaatgctgcaaagctcagtttctcttttatcaaggaaaaggctgagcagcacacactgtcatccgtctggtcaaggactgtacccattgttctttattttaatgagcctgtcaaaggattaaatcattcaagtgtgaacttaaagtctgatttggagttcggtaaggatatccaatggaggcccctcacaatggcagactctgggtactctaaatgttgggccacatatcttcaaattacaaatgaatgtagcagtttgcaggaatattctgttgaaatgagcataccctgctcggatgacattgtgtctagaagtggctctaactacaactgtcctgtgcattttacattttacattgaactgatcagcaacaacgcagcccagggtttagatacgtttgataagccagttgcctggaattgctcagactcattccagtctcatggaaaccgtgatcctatccctttggatctgctaaacattactagtgccttggtcgaacatgactcagattggcattttgaaaggctgtctgaggagatagatcttttcagagagttagctgatgacaataggttatgctctaaattcgttctgaatctccttttccatgattataacccaaatgccataacatactcccttttccagcaagtttgggaagttgacattagcccggctattgcttgcttgtgctgctataaaatcccgtggaagatctctaattgaaaggaagggatactgtgaagaggcactggggctcttcactgacttgattcacctggatccatctcataagcagtactatgaggatgaacggagcttagccctgatggataagttaacatgtgacatggagactttcacgaagcattgttctgttcaggttcaaccaaattcagctcccctgcatcatgtgcagtttcgcagattgtctgtaacacgcatcggatttgctgagcgcctgttgtgggttcaaatgctggacctaagccataatagtcttagatcagtcgaaggtttggaggctttgcagcgccttgtgttcttgaacatcagcaacaaccagatcagtagtttcacagcacttgaaccccttacgaagataatctcactgaaagttctggatttgtcgttcaacgagattggagctcactcaattgacacagcacggtatatctgcccgtctccgttctcacacaaaactgaagcaagtgaagcttttgaagagtaccaggaggtaaataatatcaacgtgacggaatactgggacgccatattgttcttcagatctttgaagctggcacagcttgatatcagaggaaatgcagttgccagcaaggacggcttcagaactcttgtcgtgacgctcattccttgtctaaaatggtttgatggtgaaggtgtcagttaatcggtggagttccacttaggagttgggcaatcttggtagtgtcaaggctcactatgtgaactattttttgctagaagccattgatttgcttcatatgcagtgctgtatttgtttatgcgaatctgagacatgatcatgatgttacagagttctgaattttcaggattgaactgtcataggtcatacaagaaagaagatgttatctaattgcaagttgttctactttcagaattctttaataagtttatttattaaaatagaacagagctacactgctaccatttacatttttgttgtgagcgttgctctcttccagaggttatctgacgatgatgttgtaattgaactttgggagttttgaatgcagtttatgtactacagattttctcccgttctcttttcacaaggcctgaagctaaaatcccttgtcagaggctcttgattctagtgtcgcagtcccagacttaactagtccaacaatctgtagtttctatttagatgcattcttctaaacttctgtttttgttgatagctgtagctctggagctaactaaagactatgtaaaataaactctgcatcatagtagaaaatagaaaagcttatgtatgaactctgaagttttctaataaacaatccttcaaaaataggaaacaccaatcatgcctctcagtttcagatagcagagatgagccccagtaacttagtacatgcgtagtgtattccctttgaagcacgattcactcaaaacacaggagcgacatcttctcttcaacggagcaatcgacctggcacgacgaccggcaggcggccgggatcaggatgagccccaggcaccgctgctccgtcggaggcgagcagtggcgggcgctgcggtactctacggcgtcctggaggatgatgttgccctgcttgtcgatgcagtggaacaggccgtggaagtagcggccgtcgttgacgccgatgagcatccgccggaacagcagcttccggagcttcgcgacagacggtgagctgctgcccacgggcgcggtggagctgttgcggtacgtgtctccagaatccgggatggcttgcgacggccctggtgctccttcttccattgtgctaaggatcccctctggtagtggtagatgagcatgggcatgggcatgtaacagggttaaagaaaatttggatatgggttctggtacgcagaattactaggcaagattttatgcctggtacttaaggatctcgatggcaggggtggataattttcgcagaaaatttcgaaactggtaggtaactgggtcagatccgaatacagatagcttagctatggttttgggtgctctgtttcgagaagtaggaagggaggagaaggatcgggcgtaccttctacgcgctcgtcgccggggaagacctggaggagggctgggtgctcgcgttcggggccggg

SEQ ID NO: 207516 - DNA, 3939 bp, Zea Mays
catggttgtccgtccctgttgactgctgagctgtagtgatgatctgatcacctttctgcacccgtcgctcgtgtcagcggctccggtcgaggtaggaggagcgtgttgcaatttgttgcgcgacggcgacggcaaaggatcactgcagctagcgccgggccgatggcagcggcaaccacggagggcggcggcgcgggcgaatctgaaccgagctaatctacacgacagcgcccccggcggcacgaccgcacgagtactaggcagtactagcctagcctagtactcctagtcctagtcctaagattaggtcccaggagatgaaggcacctacttggttggaagggtgaacggccgctccccctccctaagatccaaaccccggcacccgcggcgccggcgacgcagggaggaggcgatgcacggccggccgcggcgcccggccaagcctgaggacgacgaggcggcgtcagcgaaagccgccaagctccgggacctccaggcccaggtcctgcacaatcaccatgcccgcacgtacacaaaggagtcaattgggctgagcttcaagctgctcgagacaaatccagaggcctacacggcatggaactaccggaagcttgcgttgcagcacaatgtcaaggagctttctgacccacaggccatcaagtctgctattgatgatgagctgagagtggctgaggttgctttaaggcagaacccaaagtcctatggggcttggtatcaccggaagtggttgctaaaccaaaagctagcgcctgtggatttcaaatatgagcttggcctcttggataaactgttaaaggtggacgccaggaatttccatggatggaattaccgaaggttccttgcgagattcatgggtttgccagatgatgaggagcttaagtatacgatggataaaatcagtgacaacttcagtaattactcagcatggcataatcgtagtatacttctgtccaacctactaatccagcagagcaaaggttttgagtcaaagcagaagattttttccgaggagtttgaacttgttactcaagctctttttacagatccaagtgaccaaagtggatggttctatcacctctggcttttagctcaaacatctagtccagataacccacagctgattgcttcatggccttctaatgctgcaaagctcagtttctcttttatcaaggaaaaggctgagcagcacacactgtcatccgtctggtcaaggactgtacccattgttctttattttaatgagcctgtcaaaggattaaatcattcaagtgtgaacttaaagtctgatttggagttcggtaaggatatccaatggaggcccctcacaatggcagactctgggtactctaaatgttgggccacatatcttcaaattacaaatgaatgtagcagtttgcaggaatattctgttgaaatgagcataccctgctcggatgacattgtgtctagaagtggctctaactacaactgtcctgtgcattttacattttacattgaactgatcagcaacaacgcagcccagggtttagatacgtttgataagccagttgcctggaattgctcagactcattccagtctcatggaaaccgtgatcctatccctttggatctgctaaacattactagtgccttggtcgaacatgactcagattggcattttgaaaggctgtctgaggagatagatcttttcagagagttagctgatgacaatagcaagtttgggaagttgacattagcccggctattgcttgcttgtgctgctataaaatcccgtggaagatctctaattgaaaggaagggatactgtgaagaggcactggggctcttcactgacttgattcacctggatccatctcataagcagtactatgaggatgaacggagcttagccctgatggataagttaacatgtgacatggagactttcacgaagcattgttctgttcaggttcaaccaaattcagctcccctgcatcatgtgcagtttcgcagattgtctgtaacacgcatcggatttgctgagcgcctgttgtgggttcaaatgctggacctaagccataatagtcttagatcagtcgaaggtttggaggctttgcagcgccttgtgttcttgaacatcagcaacaaccagatcagtagtttcacagcacttgaaccccttacgaagataatctcactgaaagttctggatttgtcgttcaacgagattggagctcactcaattgacacagcacggtatatctgcccgtctccgttctcacacaaaactgaagcaagtgaagcttttgaagagtaccaggaggtaaataatatcaacgtgacggaatactgggacgccatattgttcttcagatctttgaagctggcacagcttgatatcagaggaaatgcagttgccagcaaggacggcttcagaactcttgtcgtgacgctcattccttgtctaaaatggtttgatggtgaaggtgtcagttaatcggtggagttccacttaggagttgggcaatcttggtagtgtcaaggctcactatgtgaactattttttgctagaagccattgatttgcttcatatgcagtgctgtatttgtttatgcgaatctgagacatgatcatgatgttacagagttctgaattttcaggattgaactgtcataggtcatacaagaaagaagatgttatctaattgcaagttgttctactttcagaattctttaataagtttatttattaaaatagaacagagctacactgctaccatttacatttttgttgtgagcgttgctctcttccagaggttatctgacgatgatgttgtaattgaactttgggagttttgaatgcagtttatgtactacagattttctcccgttctcttttcacaaggcctgaagctaaaatcccttgtcagaggctcttgattctagtgtcgcagtcccagacttaactagtccaacaatctgtagtttctatttagatgcattcttctaaacttctgtttttgttgatagctgtagctctggagctaactaaagactatgtaaaataaactctgcatcatagtagaaaatagaaaagcttatgtatgaactctgaagttttctaataaacaatccttcaaaaataggaaacaccaatcatgcctctcagtttcagatagcagagatgagccccagtaacttagtacatgcgtagtgtattccctttgaagcacgattcactcaaaacacaggagcgacatcttctcttcaacggagcaatcgacctggcacgacgaccggcaggcggccgggatcaggatgagccccaggcaccgctgctccgtcggaggcgagcagtggcgggcgctgcggtactctacggcgtcctggaggatgatgttgccctgcttgtcgatgcagtggaacaggccgtggaagtagcggccgtcgttgacgccgatgagcatccgccggaacagcagcttccggagcttcgcgacagacggtgagctgctgcccacgggcgcggtggagctgttgcggtacgtgtctccagaatccgggatggcttgcgacggccctggtgctccttcttccattgtgctaaggatcccctctggtagtggtagatgagcatgggcatgggcatgtaacagggttaaagaaaatttggatatgggttctggtacgcagaattactaggcaagattttatgcctggtacttaaggatctcgatggcaggggtggataattttcgcagaaaatttcgaaactggtaggtaactgggtcagatccgaatacagatagcttagctatggttttgggtgctctgtttcgagaagtaggaagggaggagaaggatcgggcgtaccttctacgcgctcgtcgccggggaagacctggaggagggctgggtgctcgcgttcggggccggg

SEQ ID NO: 207517 - DNA, 1983 bp, Zea Mays
cgaccggccgagagaaacaccgacccgaccgaactcaactcgttctcgacccgaagccccaaatccctctcagaaaacccttccctcccgatggcaaccgccgccaccgccatggtggtacccgagcagccgcgccgccggaagccggccccggggcgcgggggagtggccctccctgcgggtctctcggaggaggaggccagggtgcgggccatcgccgagattgtctcggcgatgggggagctctcgcggcgcggggaggacgtggacctcaacgcgctcaagtccgccgcgtgccggagatacggtctggcgcgagcgcccaagctggtggagatgatcgctgccgtgcccgaggccgaccgcgccgcgctgctgccgcggttgcgcgctaagcccgtgcgcacggcgtcgggtatcgccgtcgtcgccgtcatgtcgaagccgcaccgttgcccccacatcgctaccaccggtaacatctgtgtctactgcccgggcggtcccgactccgacttcgagtacagcacgcaatcctacactggatacgaacccaccagcatgcgtgccattcgggcaaggtataatccatatgtgcaagccaggagcaggatagatcagctcaagaggttagggcatagtgtggataaggtcgagttcatcttgatgggtgggactttcatgtccttaccagctgattatcgcgattattttatcagaaatcttcatgatgctttgtcggggcacacttcagcaaatgttgaggaggctatttgttattccgaacatagtgctgtcaaatgtattggtatgacgattgaaacgagacctgattattgcttggggcctcatctgcgccagatgctatcttatggttgtactcgcctggaaattggtgtccagagtacatatgaagatgttgcccgtgacacaaacagaggacacacggtggctgctgttgctgattgcttctgtttggcaaaagatgctgggtttaaggtggttgcccacatgatgccagatttacctaatgttggagttgaaagagacttagaaagtttcagagagttttttgaaagtccagcattccgggctgatggtctgaagatttatccaacacttgttattcgtggaactggtctttatgagctctggaaaactggcagaaattatccacctgagctcttggtggatatcgtggcaagaattctgtctatggttccaccatggacacgagtgtatcgggtccagagagatattcctatgcctcttgtcacttctggtgttgagaaaggtaaccttcgtgagctagctttggctcgaatggatgatctgggcctaaaatgccgagatgtcagaacccgtgaagcagggattcaggatatccatcacaagatcaggcctgatgaagtagagcttgttagacgtgactatgctgcaaatgagggctgggagacgttcctctcttatgaggatacacgacaggatatcctgatcggcctgttgcgcttgcgtaaatgtggccgtaatgttacatgccctgaacttgtagggaggtgttcaattgttcgtgagcttcatgtctatggaactgcagtccctgtgcatggccgtgatgtagacaagctacagcaccaggggtatggaactctgttaatggaagaagcagaaaggattgctcaaaaggagcaccgttcagagaaattggctgtcatttcgggggttggtactcgccactactaccgcaaactgggttatgagctagaaggaccttatatggtcaaatgtttggcataataccgtttcattttttttcgtgctcatgtagaacagactagtgtttataatgtaacttgtgtagttttttcaaaaaaaaaaaatttgttatacccttcttttaatattgagtcgtccaaatgaaaatggagacagctcagcgtgtaatattaaatgatagcaaaattccaccctagccccaaaaaa

SEQ ID NO: 207518 - DNA, 2653 bp, Zea Mays
gaagcttcctctgctcatagaggttctctccaagaagaatcttcaacaggaatttcttgaccatggagttctcactcttctaaaaaactggcttgagccattacctgatggaagcatgccaaacatgaatactcgatctgctgtactgaaattattagctgattttccaattgacttggaacaatatgaccgaagagagcagcttaagaaaagtggcctgggaaaggtcattatgtttttgtccaaatctgatgaggagaccactgcaaataggaaattggctaaggagcttgttgataaatggagtcgaccaatattcaacaagagcacgagatttgaagacatgaggagatatgatgatgaaaaagcaccttacaggcggccacaaatgaagaaaccatcaagtagctctggaatggaatccagagatgatgatgttgatgctgacttttcacaacgcaagtctgggcaaagtagttcaaggcagcatgcttctaggccagaagcctcgcctttggactttgtcattcgtccacagtccaaaattgaccctgagcagatacgagctcgtgctaagcaggctgtccaagaccagcgtcggctgaagatgaacaagaaattgcagcagctgaaagcgcccaagaagaaaaaccttcaggcgtcaaagctcagcgtggaaggccgtggcatgatcaagtacctgtagatcacccactgtggcatccgcagtcagcagtgtcctgcacatgatacagcgcctgcagggattgctgaattggtatgaagcatcctaccaccattccatggcaaacagctcggcatcagtaattgcttggatcttttatccaagtatttttcttgcctgcaacatccgtgcttcagaaaccagctgttggaaatgggggcactggaaaccagtaaagttaccaaagatcacgaagggtggcgcctcattacatgcatttggttgcatgctggagtcgtccacatactcgccaacatgttgagcctcttaatgatcggaatcaggctcgagaaggaatttggtttcataaggattggtacactgtatgtgatctctggtgttggtggcagcttgctgtcttctctatttatggtgtcaaatatatcagtcggtgcttcaggtgcattatttggactattgggctcaatgctgtcagagctcataacaaattggacgatatatgagaacaagtttgcagcactcttgactctagttatgatcattctcatcaacttagctgttgggatccttccacatgttgacaacttcgctcaccttggaggatttatgtcagggttctgtcttggttttgtgctgctaatgcgaccacagtttggatatattaaccaaaagaactctcctcttggatttcccatgggcgtaactaaacggaagttcaagacatatcaagtcatacttttggttatttctacaatgatactagtttctgggttcaccattggattggtgttgctatttcaagggttcaatgctagtgagcactgttcttggtgccattatatgagctgtgtgcctacttcaaagtggagttgcaacgcaccaaataactactgtatgtcttcacagctcggaaaccaactaaatctgacatgtgaaagcactggaaagaccgcatcatatgttctcagcgatccaaacaactcggaggcgattaaaaatctttgtgtcggtctttgcagttaatagtaatgtctgcattttctaacaggaaattaatgctagcatatctatggattatatgactagaagcctatgcttacattatgattctctgctctgccctgagcttctcgttctcagcaccgacgccacggttcagctccggcagttcattgccggctatggctttcacctctgtccattgacaaacacaggggcatcgcggcgctgctcctcggcggcaccggccaagctgggctccaagaggccgtgctcgagcgggtccggaggcggaccgctctcggtggctggaggcaaggaggtggccgccgacgagtcaaagatccaaggagcgggtgcgaccgtcggtgttcgtcgccgtcgaaccgccatcgccaagaagctgagaagatccacgacaccgacgaaggaaggtggggagaaacgcaagcgcatctcgacgccgccatcgtcatcgtcttccattcggtcgggtggtccagatccgaagacaaaaaggaaatttctttgtgctagaagctttgttcatataggaatcgagaccatggattcggagaacgcaaagctccgaagagcactcgctcatttaatcagagtagtggagcggcgttgtgccgacatcgtcgatgtcgtccacggtgccttccaaccagttagcggaccagtcctcaatgaaatgaatcgtgctttagttcagatcgaggacctcaccaaggaccttgatcaccttgcactggaaaaagactgggagatggagcacatggccccttctccaattgctgaatcatcagaaacagaggatgagcttctacttgattatgattcagagttgaatcctgacgatatcgtcggctacgacgacggacgcgactactccaccgacgacacctatccctactagattagcatgcacctaaggaatatgtg

SEQ ID NO: 207519 - DNA, 1871 bp, Zea Mays
caggtcgccaccgcgtctccgcccttccctcctccccaccatcttcagcacgaggcagcacgcgcggacgtccctcccgacacggagaaccccgctccgcgcgctcgcattcgtcgcgccgccacccaggtcccagccggccgcgcgcccgcgcccccccgccgccggccgtgccatgccgcggcggggcgagacggcggtggtccccattgacgtggcgtccgccggcggcgggcgaggcgatgagcggcccaagagagagcgccaccggagtcacggccccggccgccacggtccgcaccggagtcgcccgccgcccccgcccccgccggcgttccggccgttccggcggtggttcccgttccttgtgccgctattcatcgtcgccaacatcgtcctcttcgtgctcaccatgtacgtcaacgactgccccgcgcacgcgcgggccaccggcgccgcgataggcggatcggtcggcgagagcgccaccgcgcagggctgctggctcgcgcccgagctcgggaggttcgcgttccagtcgttcaaggagaacccgctcatcggcccttcctccgccacgctgttggaaatgggggcactggaaaccagtaaagttaccaaagatcacgaagggtggcgcctcattacatgcatttggttgcatgctggagtcgtccacatactcgccaacatgttgagcctcttaatgatcggaatcaggctcgagaaggaatttggtttcataaggattggtacactgtatgtgatctctggtgttggtggcagcttgctgtcttctctatttatggtgtcaaatatatcagtcggtgcttcaggtgcattatttggactattgggctcaatgctgtcagagctcataacaaattggacgatatatgagaacaagtttgcagcactcttgactctagttatgatcattctcatcaacttagctgttgggatccttccacatgttgacaacttcgctcaccttggaggatttatgtcagggttctgtcttggttttgtgctgctaatgcgaccacagtttggatatattaaccaaaagaactctcctcttggatttcccatgggcgtaactaaacggaagttcaagacatatcaagtcatacttttggttatttctacaatgatactagtttctgggttcaccattggattggtgttgctatttcaagggttcaatgctagtgagcactgttcttggtgccattatatgagctgtgtgcctacttcaaagtggagttgcaacgcaccaaataactactgtatgtcttcacagctcggaaaccaactaaatctgacatgtgaaagcactggaaagaccgcatcatatgttctcagcgatccaaacaactcggaggcgattaaaaatctttgtgtcggtctttgcagttaatatcaagggatgtaaatgctacaggagctgacggaatgatgcaagtaaatcaaaaacaaagaaatacagaagtgatttcgaatgctaactccgaatccattttacatccctggtttccgggggtgtaattcttgcatttggattttattctcctgatcacggcatgaaatttgtcagcacttgatatcgacagctaaattctatccatttgtgtctatggttttgctcccttcatatttatagtatagctgatgcttaatgagtactcttgtcactgtatgctactatgcttaaggagctaagggatttgattaactactaagcacggtatagcttctcgagctgagctgcttttgcgtttatcgctgccatttcttcctgaacagcgtgcatgtaagtgcatttgtatatgagttgggtgtttgtcgtgtgtgaaaacagatggtgcgag

SEQ ID NO: 207520 - DNA, 1984 bp, Zea Mays
cttctttctccgtcctttccatcccaggtcgccaccgcgtctccgcccttccctcctccccaccatcttcagcacgaggcagcacgcgcggacgtccctcccgacacggagaaccccgctccgcgcgctcgcattcgtcgcgccgccacccaggtcccagccggccgcgcgcccgcgcccccccgccgccggccgtgccatgccgcggcggggcgagacggcggtggtccccattgacgtggcgtccgccggcggcgggcgaggcgatgagcggcccaagagagagcgccaccggagtcacggccccggccgccacggtccgcaccggagtcgcccgccgcccccgcccccgccggcgttccggccgttccggcggtggttcccgttccttgtgccgctattcatcgtcgccaacatcgtcctcttcgtgctcaccatgtacgtcaacgactgccccgcgcacgcgcgggccaccggcgccgcgataggcggatcggtcggcgagagcgccaccgcgcagggctgctggctcgcgcccgagctcgggaggttcgcgttccagtcgttcaaggagaacccgctcatcggcccttcctccgccacgctgttggaaatgggggcactggaaaccagtaaagttaccaaagatcacgaagggtggcgcctcattacatgcatttggttgcatgctggagtcgtccacatactcgccaacatgttgagcctcttaatgatcggaatcaggctcgagaaggaatttggtttcataaggattggtacactgtatgtgatctctggtgttggtggcagcttgctgtcttctctatttatggtgtcaaatatatcagtcggtgcttcaggtgcattatttggactattgggctcaatgctgtcagagctcataacaaattggacgatatatgagaacaagtttgcagcactcttgactctagttatgatcattctcatcaacttagctgttgggatccttccacatgttgacaacttcgctcaccttggaggatttatgtcagggttctgtcttggttttgtgctgctaatgcgaccacagtttggatatattaaccaaaagaactctcctcttggatttcccatgggcgtaactaaacggaagttcaagacatatcaagtcatacttttggttatttctacaatgatactagtttctgggttcaccattggattggtgttgctatttcaagggttcaatgctagtgagcactgttcttggtgccattatatgagctgtgtgcctacttcaaagtggagttgcaacgcaccaaataactactgtatgtcttcacagctcggaaaccaactaaatctgacatgtgaaagcactggaaagaccgcatcatatgttctcagcgatccaaacaactcggaggcgattaaaaatctttgtgtcggtctttgcagttaatagtaatgtctgcattttctaacaggaaattaatgctagcatatctatggattatatgactagaagcctatgcttacattatgattctctgtcaagggatgtaaatgctacaggagctgacggaatgatgcaagtaaatcaaaaacaaagaaatacagaagtgatttcgaatgctaactccgaatccattttacatccctggtttccgggggtgtaattcttgcatttggattttattctcctgatcacggcatgaaatttgtcagcacttgatatcgacagctaaattctatccatttgtgtctatggttttgctcccttcatatttatagtatagctgatgcttaatgagtactcttgtcactgtatgctactatgcttaaggagctaagggatttgattaactactaagcacggtatagcttctcgagctgagctgcttttgcgtttatcgctgccatttcttcctgaacagcgtgcatgtaagtgcatttgtatatgagttgggtgtttgtcgtgtgtgaaaacagatggtgcgag

SEQ ID NO: 207521 - DNA, 2392 bp, Zea Mays
aaacgactattaaacgcgccccaccccgactcgggcacgcaactctaccgacctccgctcaccgccccctttcctcctatccctcccagagccccgacccggccggccggccggccggaaccctagccttatcgcccctccctttcccgcctcgcctccgcgcgatctcccgatcgccggattcgtgccgcggctggatggactccgacgtggagatgaacaccgccagcgatgaggaggtgatggacaacgatgactactacgactactgctacagcgacgtgggcgacgacggtgggagcaacagcgggagcgaggagctggtggccggggactacgacgagggcctcgaggccgaggggaccgacgaggtggtctctaggcgcgagcagacatttgtggttttaaacgaacaagttatatctgaacgtcaagccgaagatgtgagcaaggtatctgccgtcacactgattacaagggaggaggcgtgtgccctcctccatcactataaatggaacatcagcaagctgagtgacgaatggtttgcagatgaagaaaaagtccgccatactgttggcttacttttgaatggaaatcatgacccccgctctaggaagtctgtggaatatgttttgaggggtgttcttctgatatgatgagctctgctggttgtgctcatttttattgccatgaatgttgggaaggctacattagcgctgcaattggtgatggtccaggatgtttgtcattgcgatgccctgatccatcttgtagtgctatggttcttcaagggatgattaatgaattagctaaagatgaggatagaaaaaaatatgcacgatttctcttacgcgcatatgttgaaggtagcaagaagactaaatggtgtccagctcctgactgcacatgtgctgtggagttccttggtgatgaaaactatgatgtttcatgcaattgcatgttcagcttttgttggaattgcactgaggaagctcatcgaccagtgaactgtgagactgtttctaagtggatattaaaaaacagtgcagaatctgaaaacatgaactggatactggctaattctaagccctgtccaaagtgcaaacggccaatagagaaaaaccagggatgcatgcatatgacatgcacccctccttgtaaattcgaattttgctggttatgtctgggtgcatggtcagatcacggagagagaacaggtggcttttatgcttgcaatcgttatgaatcagcaaagaaagagggagtttacgacgagactgatgcaaggagggaaagagctaaaaactctcttgagagatatatgcattactatgagcgctgggcatccaatcagacatcgaggcagaaggcccaagcagatctgctaaaagcggaaaaggaccagattgcaaatttaactgacattttcgggataccagagacccagcttaagttcataatcgaagcttggtcacagattatagaatgcaggcgagtgttgaaatggacatatgcttatggctactatctggatgataagatcaagagtgaattttttgagtatctgcaaggtgaggctgagtctggtttggaacgcctgcatcagtgcgctgagaaagacttgcaaatttttttgccgtctgtgaaatctgacagcactgaaacaacgacacctacagtggctgaatttggtgaattccgcgtgaagcttgctggacttacaagcgtgactcggaattactttgagaaccttgttcaagctttggaagctgggttggaggatgtccgtgccacaggccaggctgctggtacatccagcactgccaccagctccaagaaaggaggaactaaatccaagaagaagcagcacactgcaccatcatctgaccacactgatgatgggtggccctgcgagcgctgcacatttcttaaccctcctacagtggatgcatgcagcgtctgcgaaaagagtaggtactagatgatggaatagctcaaagggagccagggaggcatcccaagaaaacctcaaagctcgtgagaagcatgcatgcatcggatgctgagaagaagagcttccagctgccgcaatgttgtacagagagttattttagggcctcggttggaaacggtgtggaggctcaagtggtcacatgtttgtgggggtcatttggttttctagttcttttctgttgttccttgtaaatatatttgttgtgatgtggtgacctgtgtttatgtgatgagtttttgtttctgacaaactgtgaaattaaactttaacaaaactgatgagaggtagctctgtttattccctcctaattgcgggcagggtctttgtctattcttccacattatttatctacggttacttgccaagtaaccatctgct

SEQ ID NO: 207522 - DNA, 2032 bp, Zea Mays
gctgctgacgcctgttttatatgcaccgacatttgtggttttaaacgaacaagttatatctgaacgtcaagccgaagatgtgagcaaggtatctgccgtcacactgattacaagggaggaggcgtgtgccctcctccatcactataaatggaacatcagcaagctgagtgacgaatggtttgcagatgaagaaaaagtccgccatactgttggcttacttttgaatggaaatcatgacccccgctctaggaagctagtctgtggaatatgttttgaggggtgttcttctgatatgatgagctctgctggttgtgctcatttttattgccatgaatgttgggaaggctacattagcgctgcaattggtgatggtccaggatgtttgtcattgcgatgccctgatccatcttgtagtgctatggttcttcaagggatgattaatgaattagctaaagatgaggatagaaaaaaatatgcacgatttctcttacgcgcatatgttgaaggtagcaagaagactaaatggtgtccagctcctgactgcacatgtgctgtggagttccttggtgatgaaaactatgatgtttcatgcaattgcatgttcagcttttgttggaattgcactgaggaagctcatcgaccagtgaactgtgagactgtttctaagtggatattaaaaaacagtgcagaatctgaaaacatgaactggatactggctaattctaagccctgtccaaagtgcaaacggccaatagagaaaaaccagggatgcatgcatatgacatgcacccctccttgtaaattcgaattttgctggttatgtctgggtgcatggtcagatcacggagagagaacaggtggcttttatgcttgcaatcgttatgaatcagcaaagaaagagggagtttacgacgagactgatgcaaggagggaaagagctaaaaactctcttgagagatatatgcattactatgagcgctgggcatccaatcagacatcgaggcagaaggcccaagcagatctgctaaaagcggaaaaggaccagattgcaaatttaactgacattttcgggataccagagacccagcttaagttcataatcgaagcttggtcacagattatagaatgcaggcgagtgttgaaatggacatatgcttatggctactatctggatgataagatcaagagtgaattttttgagtatctgcaaggtgaggctgagtctggtttggaacgcctgcatcagtgcgctgagaaagacttgcaaatttttttgccgtctgtgaaatctgacagcactgaaacaacgacacctacagtggctgaatttggtgaattccgcgtgaagcttgctggacttacaagcgtgactcggaattactttgagaaccttgttcaagctttggaagctgggttggaggatgtccgtgccacaggccaggctgctggtacatccagcactgccaccagctccaagaaaggaggaactaaatccaagaagaagcagcacactgcaccatcatctgaccacactgatgatgggtggccctgcgagcgctgcacatttcttaaccctcctacagtggatgcatgcagcgtctgcgaaaagagtaggtactagatgatggaatagctcaaagggagccagggaggcatcccaagaaaacctcaaagctcgtgagaagcatgcatgcatcggatgctgagaagaagagcttccagctgccgcaatgttgtacagagagttattttagggcctcggttggaaacggtgtggaggctcaagtggtcacatgtttgtgggggtcatttggttttctagttcttttctgttgttccttgtaaatatatttgttgtgatgtggtgacctgtgtttatgtgatgagtttttgtttctgacaaactgtgaaattaaactttaacaaaactgatgagaggtagctctgtttattccctcctaattgcgggcagggtctttgtctattcttccacattatttatctacggttacttgccaagtaaccatctgct

SEQ ID NO: 207523 - DNA, 1910 bp, Zea Mays
gtgggaaggcttcttaccaatgcgccaggaacatcagcaagctgagtgacgaatggtttgcagatgaagaaaaagtccgccatactgttggcttacttttgaatggaaatcatgacccccgctctaggaagctagtctgtggaatatgttttgaggggtgttcttctgatatgatgagctctgctggttgtgctcatttttattgccatgaatgttgggaaggctacattagcgctgcaattggtgatggtccaggatgtttgtcattgcgatgccctgatccatcttgtagtgctatggttcttcaagggatgattaatgaattagctaaagatgaggatagaaaaaaatatgcacgatttctcttacgcgcatatgttgaaggtagcaagaagactaaatggtgtccagctcctgactgcacatgtgctgtggagttccttggtgatgaaaactatgatgtttcatgcaattgcatgttcagcttttgttggaattgcactgaggaagctcatcgaccagtgaactgtgagactgtttctaagtggatattaaaaaacagtgcagaatctgaaaacatgaactggatactggctaattctaagccctgtccaaagtgcaaacggccaatagagaaaaaccagggatgcatgcatatgacatgcacccctccttgtaaattcgaattttgctggttatgtctgggtgcatggtcagatcacggagagagaacaggtggcttttatgcttgcaatcgttatgaatcagcaaagaaagagggagtttacgacgagactgatgcaaggagggaaagagctaaaaactctcttgagagatatatgcattactatgagcgctgggcatccaatcagacatcgaggcagaaggcccaagcagatctgctaaaagcggaaaaggaccagattgcaaatttaactgacattttcgggataccagagacccagcttaagttcataatcgaagcttggtcacagattatagaatgcaggcgagtgttgaaatggacatatgcttatggctactatctggatgataagatcaagagtgaattttttgagtatctgcaaggtgaggctgagtctggtttggaacgcctgcatcagtgcgctgagaaagacttgcaaatttttttgccgtctgtgaaatctgacagcactgaaacaacgacacctacagtggctgaatttggtgaattccgcgtgaagcttgctggacttacaagcgtgactcggaattactttgagaaccttgttcaagctttggaagctgggttggaggatgtccgtgccacaggccaggctgctggtacatccagcactgccaccagctccaagaaaggaggaactaaatccaagaagaagcagcacactgcaccatcatctgaccacactgatgatgggtggccctgcgagcgctgcacatttcttaaccctcctacagtggatgcatgcagcgtctgcgaaaagagtaggtactagatgatggaatagctcaaagggagccagggaggcatcccaagaaaacctcaaagctcgtgagaagcatgcatgcatcggatgctgagaagaagagcttccagctgccgcaatgttgtacagagagttattttagggcctcggttggaaacggtgtggaggctcaagtggtcacatgtttgtgggggtcatttggttttctagttcttttctgttgttccttgtaaatatatttgttgtgatgtggtgacctgtgtttatgtgatgagtttttgtttctgacaaactgtgaaattaaactttaacaaaactgatgagaggtagctctgtttattccctcctaattgcgggcagggtctttgtctattcttccacattatttatctacggttacttgccaagtaaccatctgct

SEQ ID NO: 207524 - DNA, 2418 bp, Zea Mays
ccacaatcgggtccccttcccctccgtccagctcgccgtctgagggaagcagggcgcagcagtcaccagtgaccagtcatggctcgctgcgttgccggcagctgccctcccgtcaccttcgcgtgttgcccccgccggactggacgaagtgctgttgttcagtgtggcactgcatcgagcacaccagcaatatctggaactggaccttcatcatctggatcctcggggcttgttcaagattgtactgcccctctggtctgtgcactgcaattaactgccagacaagatgtttcctgctttcacttcccaggacacaacagaggaaaagctgctccatcttccttgtcgaaactcattggctcaggggcatttctgcatgacttgcccgagctacccgagctcgatgatctcttctccccaaaaggtgtgattctagatgcccagaggcgagcagctcaactgtttgggtcatctaaaacttggttccttgtcaacggaacgacctgtggaatccaggcctcagtgatggctacctgttctcctggcgactacctcattgtgccacggaactgccacctttcagtgatctctgcgctggtcttgtctggtgtggtgcctaaatacataataccagaatataattctgggtgggacattgctggtggtatcaccccgctgcagctggatgaagcagtaaaagagctggaggaggatgggaagagggtaggcgctgttcttgttacttcacccacctaccatggtgtatgcagcaatgtgcaaggtattgtcagtgtttgtcatccacgaggcattccggttatagttgatgaagcgcatggtgcacatttcaggttccatgacagtttgccaagcactgcaattgagcaaggtgctgacctagctgtgcaatccacacacaaggtcctgtgctcccttacacagtcttcaatgcttcacatgtctggagatcttgtcgatgtagataaagtaagccagtgccttcagctcctccagagctcgagcccgagttaccttctactgtcatctttagatgccgcgagagatcagctgagccagaacacaaatatatttgatgagccattagctatagcatcggaaacaaaagacctgctggcgagaatccctgggatatctgttctagacttaccatgctttgcttctgatttccctgccattgatccgttgcgcatcacactcagtgcctcagatctgcaattatcgggatacgaagccgatgacattttatatgaaggccatcaaatcgtatctgagcttgttggcacaagggccgtgacatttgcagtcaacttaggaaccagagtgcaggacgctgagaagcttgtgcagtctgcaaagcatctatcagaaaaacatttctttgcaaatagcctgaaacccgtgaaggagaatcgtgtgcatggcccattagagaatatctctgtgcatctgagtccaagagaggccttctttacagagaagaggagagtgaaaatcgaggacagccttggtgaaatctgtggtgagctaatatgcccgtatccacctggtatcccagttctgattccaggcgaggtagtaacccatgattcactgtcctacttgatgagcgttagacaccaaggcatcacgatcagtggagcggctgatgctgagctaaattccattctggtgtgcgacttatgatgattgccctattgtttgtcacaagactgtgttgtcgcagagataccgtgggtgggagagatcaagtatggtttatgccaagtcaagagcacaatgtattgtccgcttgatggatgtaaaccaacggctggcggtttgtagccaccggccacttggccaaataatttagtctgtgttgtgttgtgtctcggtctcgtgagccgaaagagttgccaagctgcgacatatgatgccaaagcatgaataagggtctatagcatgtgatctcctgtgttgttgtttgaagtatgagttgctagggagggagggctacctttctatctgaagtgccgtgcaatgtaatggtttcctctttgcttctcttctgaactgggaggtccggtctgaactggcagtaaagctgaagcatcatatgcaggtctgcacacctccacggttgtgctacctccggctgcatgttttgcagggcttctgaaacaaattgtgcgggtttggtaaagggagccaaggacaagcatttgagggttaaggggcatgtcaggatccctactaaggttctccacatcaccactcgtgtgtccccttgcggtgaaagtatcaagctgttttctagcctctgctgttgaaactgtctcctggttggctttgtttaattttactgattgaatttttagtgctttcattaaaaggaatacataataaattgatctgttc

SEQ ID NO: 207525 - DNA, 1670 bp, Zea Mays
ggtagtttaggttagctttcacttgcttcaattgaccctttcaagagctgaaaatttcttgttaggtgagcaaaagcatcctttgtcaactaaactcgcctaatatgctgaatcctacttaggaaacagtcacatagccatgcttttagatttgtgattttgctgttttatgctgtcattgcttaatgccttaaaaggatatggaaacaatacaaataatagtcatactaataatttcattaccaacgttaggcatgttgttaacttcggtagtattcattatcattggtggtaggtgagtaggtctatgtgacatctgaccaccattttggaatttggctcatatgggcccatttgtatgtgttgatgtcagattgtgggggtttagtcccaccttggttgttgagtgtgggttagaccaacatataaggactgtacattgtgagaagggtgggtgctctcgccctgttccatttgagaagaggaagtgaaagaaagagctagctagatgagcaaaccaacaggttgcttccccttactttgcttgtccttgtccagcgtgagatgggtgaggcgagctgagacggtgacagatccaaaatgcccaaggagtaaaggcaatatatgacgtgtcaaacgacccagtcgtttactttcgtctagctcgaatggaaaggggaagatctcagttctatatccaaacaagactaccacccccaagtcagttaaagaccttgaatttgatggtttctccttgactactgaccttcgtgagaatttgcaggacggacctttcaattttgttttgcttgatggcacctggagcaattctgctgcactgtacagaaggttgaaggagagatggactgcagtatggggagatgaagctctaccttgtattgcactatctacacttagtgcctcagtgatgcataaactacgaccgcagcctgcctgggatcgtacctgcactgcagcagctgcagctggcctcctctgggagttgagctcgcggcctgagctcatctcatttgggttggaaaagcaagccgaggcggtggagtgctcgttagacaacttgctggatgctctcactgccaggcggcttcgtctgggccgatcgataactcggaaacagagacatagtaggaactgcatatagggaaagaagaaactcacagtaacagaggagcatggtgtgccatcaagtggaaggctgatttcattcttttttgtagaactcaggagctgatcattgtcaacaagttttctcccctttctatataggttactagatcttcagttcagtgctgtagattacttttaatggtcattgacatgagctgttaccgctgctactgtcgaagaggagggttaccaaatattagggtgctaaaacttgggttgtattctgacagattttgccataccatgaaatcaagttgttttctcatgccaataggttacagctgacaaacaatccctcccatcctctcttttccagtcgcgtattgtatggtatcgtgcccagtaagggcttattcggttttaccccaatccatatggattgagggggattgagggggtttcaatccctagtaagtcaaaatccctcccaatccgtatcaatcccctccaatccatatggattgaaaataaccgaacatgcc

SEQ ID NO: 207526 - DNA, 1122 bp, Zea Mays
agtttaggttagctttcacttgcttcaattgaccctttcaagagctgaaaatttcttgttagagtaaaggcaatatatgacgtgtcaaacgacccagtcgtttactttcgtctagctcgaatggaaaggggaagatctcagttctatatccaaacaagactaccacccccaagtcagttaaagaccttgaatttgatggtttctccttgactactgaccttcgtgagaatttgcaggacggacctttcaattttgttttgcttgatggcacctggagcaattctgctgcactgtacagaaggttgaaggagagatggactgcagtatggggagatgaagctctaccttgtattgcactatctacacttagtgcctcagtgatgcataaactacgaccgcagcctgcctgggatcgtacctgcactgcagcagctgcagctggcctcctctgggagttgagctcgcggcctgagctcatctcatttgggttggaaaagcaagccgaggcggtggagtgctcgttagacaacttgctggatgctctcactgccaggcggcttcgtctgggccgatcgataactcggaaacagagacatagtaggaactgcatatagggaaagaagaaactcacagtaacagaggagcatggtgtgccatcaagtggaaggctgatttcattcttttttgtagaactcaggagctgatcattgtcaacaagttttctcccctttctatataggttactagatcttcagttcagtgctgtagattacttttaatggtcattgacatgagctgttaccgctgctactgtcgaagaggagggttaccaaatattagggtgctaaaacttgggttgtattctgacagattttgccataccatgaaatcaagttgttttctcatgccaataggttacagctgacaaacaatccctcccatcctctcttttccagtcgcgtattgtatggtatcgtgcccagtaagggcttattcggttttaccccaatccatatggattgagggggattgagggggtttcaatccctagtaagtcaaaatccctcccaatccgtatcaatcccctccaatccatatggattgaaaataaccgaacatgcc

SEQ ID NO: 207527 - DNA, 1045 bp, Zea Mays
ggctgtggttgctacaaaagcaaggtttttaccttcgtaagaaaaaaaaagtactaatagtgaggcatggggcccaaaagtttcggcccaacgaggcctcggcctcggcctcggcgacggcgaaccacatccatccaggaaacgaatgaatcagagcaacggacaaccaactccccccctccaccatctacgaacgggggccgggaaaagatcggctacagacagatgaggctctgtctccggcaagcggcggccaccagctcacccctcgcagctaccctccgcggcaagggtgggcggtgcgcgtgctcccgctgacggaggagaacgtggagaaggtgctggacgaggtgcggccgagcctgatggcggacggcggcaacgtggcgctgcacgagatcgacggcctcgtcgtcgtgctcaagctgcagggcgcgtgcggctcctgccccagctccaccatgacgctcaagatgggcatcgagacgcgcctccgcgacaagatccccgacatcctcgaggtcgagcagatcgtcgacaccgagaccggcctcgacctcaccgccgacaacgtcgacaaggtgcttgatgagatcagaccgtacctctccggcactggaggtggaagcctcgagcttctccagattgacggatacgtcgtcaagatccggatcggcggacctgcagccggtgtaatgacagtacgagtagccgtgacacagaaactgagggagaaaataccttccatcttggctgttcagctcacagaatagaaatgcgagagctcacttgtgcatcatcacgacgaaactctggctttcaggcgaatgtgcagtgttcatcagtcttatatttctgtccttacagtacgtacagtgagttgcagaactgattaatacaattttcatgcaagaattctgccttgacaaaacaaaaaatcttagctctgaaagataatcaaattagcttctaagttacatctgttgataattcagtgtataatcattacattttgcactggatcataccagttttatatttcaag

SEQ ID NO: 207528 - DNA, 1817 bp, Zea Mays
gtgcaagatttatccctggatccaacttgcctcacctatatatcttccaagcaagacttgtgcacatagctggaccttctcttcttggtcatgcccttccctcccatcaattcttcaatgctgcgtaatccctactgaaagaggcaccaatcagccattctgcaacttgccttcccgtgcttgcctcactgacatgaactcatcgtctttcttcctctgatccataagatctggccaacaagatcggtggcgcacaggtatcgggtcatcacttggtctctgaattctcaggattggagttgaagaagagcatcatgcttggtgggcagagcgagaccgtcaagtacagggtctttgctggaacatggaacgtgggcggcttggcgccgccggatgacctggacttggaggattggctggacacgaagaacgactcctacgacatctatgttcttgggttccaggagattgtgccgctgaacgcgaggaacgtgcttggccccaagcagaggcgggcggccatgaagtggcagctgctcatcggcgacgcattgaacagcacgaggcatggagctgcaggaatgcatggtcaaggacaggggggcgcgttcaggtgcctcatgagcaagcagatggtcggaatcttcgtgtcggtctggacgaggagcagcctctgccggcacgtccgccaccccggcgtgtgcagcgtcggcgccggcgtcctcggccggctcggcaacaagggcgcggtgtccgtccggttcttgctccacggcacgagcttctgcttcgtctgctgccacctggcctcaggcggcgagaagggcgacgcgctgcgccggaacgccgacgccgcgggcatcctctccaggaccagcttcctcggcttcggcggcgtggcggcagcacccgccgcgtggtgttgctcggcgacctcaactaccggatcgccatggacgatgacgaagcacggcagctggtgagggccaggaaatggggcatgctgctggagggcgacgagctgctgctggagctctccagtggccgtcagttccacggctggcacgagggccacgtcaccttcgccccgacctacaagtatagccgcaactccgaccacctccactggtgcgctgacggcgtcgccgccggccgcgagaagcagcaccgcgcgccggcatggtgcgaccgcatcctctggcgcgggaaggggatgaagcaggtccggtacgagcgctgcggttgctaccggctctccgatcaccgcccggtcagggctttgttccacgccgtgtgcgaactggcggatggctaagctgtaggctagcttgcgtgctttgaatgaaaagcgtttaattaacaaacgagactcttaattttacaaagtgttcaaaaatttcggccagaaatttcacacggaactggttactggttcctgcatcgatgcgctttcaagctggtttgcgcctgattcctatctgctggagaaaattggagcacattttctgttctcggctgaggatatatggaaccaaaggatcattgaccaattaattatctgacaggttattgtccacacctgattcatgtgccggaggcatacaactttgtgcgccgggtcaactcgatgaaaccagtttttcgtggtttcaacaagatgcatgtcttcactatgatattgttattcgcatccatgaaaaagatgtatcaggtgtaaaccaagtttccatataaattttatacaaaccaactaacaaaagacataaaaaaattctcaaaacaattatagatatacttattgcctactctaccaccat

SEQ ID NO: 207529 - DNA, 1137 bp, Zea Mays
cttttccgtcgggcagatatgccccgccctggtctccaggccaatggaaacgagaagcagaaaggcaacaatagcaatatgaaggcttcttcgaaagtcaagaaagaagtcagttctgatgatgattttgtcatgccaacggcgcagaagaaaagtgcaggtgctgctggaagtaatgccaagacatccaaggttaaaaaaattaaagatgaagatttggaagatctcaaggaggacaagaaaaggaagaaacgagtgggtgtcaaagaagaggcaaagttggccttggccattgtaaagggagagaaggttaagaaagagaggaaagtgtatggtttgccagggcagaagcatgatcctcctgaagaaagggatccattgaggatattctatgaatcactctatgagcaggtccccaccagtgacatggctgcaacctggttgatggaatggggtttgctcccggtggatgtggctagaaaatgttttgagaagaaacaaggtcagaaggttaagtcaccagtcaaagcaattgtggcgaagagaattccttcttctccagccaagacactgccttcatctgcaaagaagttagttatgccttcaaacagtgctggaaagctgaagtctcagaagaaaaggaaggcaagtgatgacacagatgatgacgacgacgacgatgattttgtagcttctaaagcaaagaccaagaggcacaaggcctagttaggtcctagcatctcattatcctagtaatgagacgtgttcttcagacaatttctagctcggatgaccttggatgattgttccttccattggtttgctcatttggggcgcgcaactaaattatgtgaagtagcgtgttgtgttgtgtcaagaagtaccacttgtcgatggccttttcagatctggaatgaaggtaagttcctgcaaactttcacttggttagcatttgactccagtgaaacatctggttggttagcatttgactccagtgaaacatctggttggatgactgtatttgcacggggtaacatatttcgccgagctcgacgtaggcgcatccccaagcaaaacagaatttagaataattattaggttgccgtcgatgatacgtaattctgaaaagcttgaacg

SEQ ID NO: 207530 - DNA, 1093 bp, Zea Mays
gcgggcgtcgcagtgcgagtgacgctagggaaacgagaagcagaaaggcaacaatagcaatatgaaggcttcttcgaaagtcaagaaagaaccaacggcgcagaagaaaagtgcaggtgctgctggaagtaatgccaagacatccaaggttaaaaaaattaaagatgaagatttggaagatctcaaggaggacaagaaaaggaagaaacgagtgggtgtcaaagaagaggcaaagttggccttggccattgtaaagggagagaaggttaagaaagagaggaaagtgtatggtttgccagggcagaagcatgatcctcctgaagaaagggatccattgaggatattctatgaatcactctatgagcaggtccccaccagtgacatggctgcaacctggttgatggaatggggtttgctcccggtggatgtggctagaaaatgttttgagaagaaacaaggtcagaaggttaagtcaccagtcaaagcaattgtggcgaagagaattccttcttctccagccaagacactgccttcatctgcaaagaagttagttatgccttcaaacagtgctggaaagctgaagtctcagaagaaaaggaaggcaagtgatgacacagatgatgacgacgacgacgatgattttgtagcttctaaagcaaagaccaagaggcacaaggcctagttaggtcctagcatctcattatcctagtaatgagacgtgttcttcagacaatttctagctcggatgaccttggatgattgttccttccattggtttgctcatttggggcgcgcaactaaattatgtgaagtagcgtgttgtgttgtgtcaagaagtaccacttgtcgatggccttttcagatctggaatgaaggtaagttcctgcaaactttcacttggttagcatttgactccagtgaaacatctggttggttagcatttgactccagtgaaacatctggttggatgactgtatttgcacggggtaacatatttcgccgagctcgacgtaggcgcatccccaagcaaaacagaatttagaataattattaggttgccgtcgatgatacgtaattctgaaaagcttgaacg

SEQ ID NO: 207531 - DNA, 1011 bp, Zea Mays
ttccgaatttgagtggggaaaaggcatgggggcggcgtacgggacagccaagagtggcgtcggcgtggcgtccatgggtgtcatgcgcccagagctcgtcatgaagtccatcgtgcccgtggtcatggctggtgtgctcggtatctacggcctcatcatcgccgtcatcatcagcactgggatcaaccccaaggccaagccatactacctctttgacggctatgcccacctgtcgtctggccttgcctgtggtcttgctgggcttgctgcaggcatggccattggcatcgttggtgatgctggtgtcagggcgaacgctcagcagccgaagttgtttgttggcatgatcctcatccttatttttgctgaagcacttgccctctatggtctcatcgtcggcattatcctctcgtctcgtgccggccagtcccgcgcagattagaggcacgtttcagatgtcaacaccgtgccgccgacagttgcctggtcgtagctgggtcatgttctatatccatgagacaagaagctggagcactttgactctttgagaggcttacttttatgctgtctagttttccatcttctgttgagtcgagaaaacaagaaaggctgtgtagccaagggatgacttttacccttgtgccattcttttccctgtcgtggtggggggtgggttgcggttgatgcttatttatgcacagtttttgcttgggtcggggctggggctgggacgttggtgtaatgtggtgaataagcgagtgcatgcaacgcaattggaacttaagacatttttggtaaaatactctttcgtattctgttctctgttctatgaatattggtaatatgcgtggctcatgaactagtgtttgtttctcgcagccggtacgggttcttagtggtcctatcagtgttagtagagtggatggatcgcgatccaaatgttttacaatttattagtgctctaaattgatttttgttaaaaataaatagaaatagagcttgattctaatc

SEQ ID NO: 207532 - DNA, 1630 bp, Zea Mays
gactggagccccgagagcccagcactatttcttcccccgtcgtcactcctctccctctctcgtcactccactccagcccctcctctagatctctctcccccccctcctcacacgcactcactctcgtcactgaggctagctactagctggtactggaagcctggaacacgcactgtcacttgctcgtttcaaggacctgccctgtgccaattaagtagtacgccgtcgtacggtttgctctgagctagctcttcgtgttcgcgatggcgtcggagtgggaaatggccatgggggtggagctcggcatgggaatgggcggcacgtaccaccacaacgcctccagcatcaccaccgcgccgatgatgatgagcagccatccccacagccacagcggcggcgccgccagctactccacgccgcaccaccaccattactacggcgggatgccgcccatgggcgacgccatgcgcgtcgacgacctcctcgacctctccacccccggcgccggcgcccatgagttcttccccaccgcggcgccggccactgacaaggggcaccactcgtcgggggccatgggtgagccctcacccaccgccaactcgtcggatcaccggacgtcggccctctccttcgccgatgagttctacatacccaccgaggaagctgcggagctggagtggctatccaagttcgtggacgactcctattcggacatgccgaattactcgtccgccacgcatgcggcgatggcggcggcggctgctgctgctgctaacgcggcaggcaacggaggaggcaccacctcggccggtcaagacagcggcgtcgccgcggcgcctggccgcggcgcgcgcagcaggcggtcccgcgcgaccgccgcggctgccgcggtgtggcactccctcgtgccgcgcccgccgtctcagtcgtccccttcatcgtcgtcctgctcgtcctcggacttcccgtcgtcgaacaagccggcgcgcccgaacggcggcagccgcggcaagaaggtcccgggtccccccggcggcgggcccgctggcggggaggcgggcctggagggcggcggcgtgcggcggtgcacgcactgcgcgtcggagaagacgccgcagtggaggacggggccgctgggccccaagaccctctgcaacgcgtgcggcgtgcggttcaagtccgggcggctgatgcccgagtaccggccggcggccagccccaccttcgtgctcacgcagcactccaactcgcaccgcaaggtcatggagctgcgccgccagaaggagctcatcctcatccgcggaagccaccgcgacgccgccgcaggatccgccgccggcgggccgaggccggagctcatgttccgtgactacggcgtgtgttagcccgctgcccggcaaaccggcaccgaggaggctcgcgtcgtgcgttgcatgcatggagctttagatccttttgcgaaattctgccgtttctgccttttttttaatctttccctgcgcgttccagatatttccgtttctttctcttttgttaattcttaaattgttggtacctacctacctcatccctgcttgagagatcaatgaattctgttggtataaatcgtgatcgtttgtgagtaaaagaa

SEQ ID NO: 207533 - DNA, 2641 bp, Zea Mays
atggatggcatccccacgaccccaccccacctgcctgcgatagagaggcggagacaagggtacattaataattggctaaaagaaatgtcgctcgctggtacacccatgcggccatgcgccatggttcagcttgaacaggggaggagagcagagcgagagggccactcgggttggttagaagaacccaatgcaagtgtgagtgagctgacggcacggcggacgcgctcgcctctcctctcctctcctctcctctcctcttcttccggctctccctctccgcatgccattccaacgcattaccggtatttttagccgccggaggagacgggtagctgcgtagccactagcgagagagagagggaggggagaaaccatagctcctggccgttctgcctgcccatccaccgcggcgccggccgtccgtctcccgtccacatccctcctcctctcctgcaaggttcctgtgcgtagcgcagaggggtcggagtcggagtcggagtcggagaagatgatgggcgggttcctctccagggtcctcctgtaagcgctcccttgctccgaatcttgtaacgtcggtgttctttgtagattgacactttgaggttggagccttatcagaggcaccagtgttccggttttaataaatctgttttttttttcaaatttggatttgtggggacccattcggagagttcagcagcctctctcttggtttaacttcactcattcgctcctccttaatatgttgctttcttcaaaacaaaacaaaacaaaacaaaaagaggaggagatgcgttcgttattgtcgatttgcccaccctggcctcttcgccggaaaatgaggctgagagcacgcaaccattcggaagtattttattcttctcgaggagcatatgggggcaagtttttaattcattgcacaacggtcaatggttctgttcgtttattcttccggtccgactcattctttttgaagatgatgttctaacaatcatatctcttcaaatggttaagatcggaggatactctcgtatgagttaagataggtcaaactgctatgctcttttttaaaaaaaaatctttggcctgcttcatcaagaactagatttgatcctgttcatctctgtgttgatgaattatctacagtttagctataaacgcgtctgaaatgttagtctattgaaggatactttgatactgaagccatgcagctttaaattgccagcttttcttttttgtggtttattacggatgaataaaaggggaaaaacaaaataaatagtcttttactgaaacatcaacttactatacgaggaaggacatgcttttgtcacgatatgcaatcgctaacatgccatttatcttgtggcatttgatgtgccgatttcctgtaggttggcttttggctatgcctatcctgcctacgaatgctacaagactgttgaactgaacaaaccagagattgcgcagctcatattttggtgtcagtattggattttagttgccctgttgacagttttggagagattcggagatttcacaatatcatggctaccgttctactcggaagcaaagctgatgttctttgtatacttgtggtaccctaagacaaagggaactacgtatgtttatggaactttctttaaaccatatatttctcagcatgagaatgaaatcgaccggaatctccttgagctgagagctcgagccaccgacacggttgtactttattttcagaaggctgcttcggcaggacaaagtactttctttgacgttttaaaatatgttgctgcccagtcaccttctcagaaatcaaggcaacgccttcatcaggattcacagcagccgccacaacaacaacaaccacaagtgcaggtgcagcaggcgcaaccacaaaaacaagcagcacctgttatgcgcagagcatcatctattgctgctcggcaagcagcaatggcacagcaatctcaggagactaaacccgtttcatcttcgcccaagatcaagcgtcaaacatcagcgagatctggttcagtggcatccacaaagcctccggtagctgcatccgcgctaaaacctggtggtagcccaaagaaaggcgaggtcaaacctgctgccgacccagttcaaactccaaccacaggtgccgattcaccgaaacccgagcctagcgccccatcactccctggagccgaaggggtggacaagatggccatcgacgaggccagtggtgacgccccagagggcgcagaagagcttgaccctgcgctcgaagaggagacgccgatggaggagacgatccgtgtgacgcgcgccaagctaaggaggcgcacggccaccgaagatcctgctgggaattagctgttagcggcacgagcaaagaacgcatgcaattgcaacattatacacttcaatctggtcactccctgagtatcttcgggatgtcacatccagccgcaattttcagccggcagggaaacaagaacagctgtttttctatcattctctgtgtacatgtatctgtttgagtccctggtacacgctgcagttagtctggcagaagcttttcctatagtcattggaaggccctcagaactttaacatgtgatactaaaacttagtcaagttaattagagcacgg

SEQ ID NO: 207534 - DNA, 2638 bp, Zea Mays
caaggaagctatttttttgttggggcagatgatgatgatgagacacccatggatgttgatattaaaattaatcttgatgttgatttggaaagacagataactgcagcaattgatccaaagctacttcaacatttggtgaatgctctcttcagaggtacattaagcataaatgattctgatctgtctgaaccatcagatgctgaagtggatgctgtaggatgtatttgtgcttttcttcatgtcacattcaatacattccctctagagcgaattatgactgtactggcctaccggactgaaattgttcctgcactgtggaacttcataaagcggtgccatgcaaaccgaagatggccatttttttcgaagtttgcatcttcattacctgctgatgctcctggttggctccttcccatgtctgtattctgtcccatatacaagcacatgttgaagatcattgataatggggagttttatgagcaagagaaacccctttcccttaaagatttgaagtccttggttcttattttaaagcaggcattatggcaacttttgtggattattccatcctcttctactcagaaagtgtcatccaacccttcaggccttaagaagttgtcagtggagaatgtcaagatcagagctagggttgggttgtctgaattgctcacacagttgcaagactggaacaaccgacttccattcacttctgcaagtgatttctattcccaagaagcaacaagcgaaaattttgtgtctcaggcaatacttggtaatactcgagcatcagagatcataaagcttgctccttttttggctccatttaccagtcgagtcaaaatattcacttcccaattaacgagttctagacaatcaatatcacattctgcattgacaagacaacggttcaaaataagaagaaaccgacttctggaagatgcttttgatcagctaagtttgctttctgaagaagatctcaaaggaccgattcgagtttcatttattaatgaacatggcgaggaagaggctggaatcgatggtggtggaattttcaaggatttcatggaaaatattactcgagccgcttttgatgtgcagtacggtctcttcaaggagacggctgatcatcttttgtacccaaacccaggatcaggattggttcatgaactacatctgcaatatttcaattttcttggaagtctacttgggaaggcaatgtatgaaggcatacttgttgacttgccatttgcaacgttcttcttgagcaaggtgaaacaaaaatacaattttttaaatgatcttccttcattggatccagaattgtatcgacatcttctatttttaaagcattacaatggtgatatctcagagttggaactgtattttgttattgtgaataatgaatatggtgaacaatgtgaagaagaacttctccctggtgggagggacatgcgtgttacgaatgataatgttattacttttatccatcttgttgccaatcatcggttaaactaccagatccgtgcacaaagtacacacttcttgagaggttttcaacagcttataccaaaagactggattgatatgttcaatgaacatgaaattcaggttcttatatctggctctttagaaagcttggatattgatgacttgcggtcgaacaccaactattctgcaggatatcatccagatcatgagcttgttgagatgttttgggaggtcttgaagagcttaagttcagacaaccagaaaaaatttctcaagtttgtgactggatgttctcgtggccccctccttggatttcagtatctcgaaccgaaattttgcattcagagagctggtgttccaggtctggaggagcatgcagaccgcttgccgacatcagctacctgcatgaaccttctgaagctccccccctataaaagcaaggagcagatgcaaaccaaactattgtacgcgataaattcagaagctggttttgatctaagttgatcatgatcgggattcagtatttgcagttcagatagtcgctattaaaggcaccaagggccgaactcaaccaaccatcggccccatttgaagccccatgaatgaaggaaatgaaggaaaaaaagaaagaaacgcagttgtttctcagagtagttgaatgtctggagggaggctgcaatatagctgtctgctaactaagggcttcgttctccaagagaaataggcagacgctgtctaatcaatcatgggcatgtacatatgtgcatcattttatacagaaattttatatgtatctaatcaatgctggtttgcggtcatctggtcctttttggcgcatcacttgctcaccttatcccaatttagggctgatttgttaacaatagaattagatgggatacatgagaggaaatccattactatttaaaattaaataacaagggattttctctcatggatctcatccaattcttttgttaccaaatcagcacttagtctttggaaggaggggattgaggggtgtaatctagcttatcaattatataaacacttaatgacctatttatggattactataatctaggtatctagattatataatctacataataatctgtgttgtttgttagtatttttaacttttttaagctga

SEQ ID NO: 207535 - DNA, 2634 bp, Zea Mays
ttctttccaaaccaggcggctgacatcattgctgtttctacctcgttgttggataccttgccagcagtcacaacacctactgaaagggcagatgatgatgatgagacacccatggatgttgatattaaaattaatcttgatgttgatttggaaagacagataactgcagcaattgatccaaagctacttcaacatttggtgaatgctctcttcagaggtacattaagcataaatgattctgatctgtctgaaccatcagatgctgaagtggatgctgtaggatgtatttgtgcttttcttcatgtcacattcaatacattccctctagagcgaattatgactgtactggcctaccggactgaaattgttcctgcactgtggaacttcataaagcggtgccatgcaaaccgaagatggccatttttttcgaagtttgcatcttcattacctgctgatgctcctggttggctccttcccatgtctgtattctgtcccatatacaagcacatgttgaagatcattgataatggggagttttatgagcaagagaaacccctttcccttaaagatttgaagtccttggttcttattttaaagcaggccttaagaagttgtcagtggagaatgtcaagatcagagctagggttgggttgtctgaattgctcacacagttgcaagactggaacaaccgacttccattcacttctgcaagtgatttctattcccaagaagcaacaagcgaaaattttgtgtctcaggcaatacttggtaatactcgagcatcagagatcataaagcttgctccttttttggctccatttaccagtcgagtcaaaatattcacttcccaattaacgagttctagacaatcaatatcacattctgcattgacaagacaacggttcaaaataagaagaaaccgacttctggaagatgcttttgatcagctaagtttgctttctgaagaagatctcaaaggaccgattcgagtttcatttattaatgaacatggcgaggaagaggctggaatcgatggtggtggaattttcaaggatttcatggaaaatattactcgagccgcttttgatgtgcagtacggtctcttcaaggagacggctgatcatcttttgtacccaaacccaggatcaggattggttcatgaactacatctgcaatatttcaattttcttggaagtctacttgggaaggcaatgtatgaaggcatacttgttgacttgccatttgcaacgttcttcttgagcaaggtgaaacaaaaatacaattttttaaatgatcttccttcattggatccagaattgtatcgacatcttctatttttaaagcattacaatggtgatatctcagagttggaactgtattttgttattgtgaataatgaatatggtgaacaatgtgaagaagaacttctccctggtgggagggacatgcgtgttacgaatgataatgttattacttttatccatcttgttgccaatcatcggttaaactaccagatccgtgcacaaagtacacacttcttgagaggttttcaacagcttataccaaaagactggattgatatgttcaatgaacatgaaattcaggttcttatatctggctctttagaaagcttggatattgatgacttgcggtcgaacaccaactattctgcaggatatcatccagatcatgagcttgttgagatgttttgggaggtcttgaagagcttaagttcagacaaccagaaaaaatttctcaagtttgtgactggatgttctcgtggccccctccttggatttcagtatctcgaaccgaaattttgcattcagagagctggtgttccaggtctggaggagcatgcagaccgcttgccgacatcagctacctgcatgaaccttctgaagctccccccctataaaagcaaggagcagatgcaaaccaaactattgtacgcgataaattcagaagctggttttgatctaagttgatcatgatcgggattcagtatttgcagttcagatagtcgctattaaaggcaccaagggccgaactcaaccaaccatcggccccatttgaagccccatgaatgaaggaaatgaaggaaaaaaagaaagaaacgcagttgtttctcagagtagttgaatgtctggagggaggctgcaatatagctgtctgctaactaagggcttcgttctccaagagaaataggcagacgctgtctaatcaatcatgggcatgtacatatgtgcatcattttatacagaaattttatatgtatctaatcaatgctggtttgcggtcatctggtcctttttggcgcatcacttgctcaccttatcccaatttagggctgatttgttaacaatagaattagatgggatacatgagaggaaatccattactatttaaaattaaataacaagggattttctctcatggatctcatccaattcttttgttaccaaatcagcacttagtctttggaaggaggggattgaggggtgtaatctagcttatcaattatataaacacttaatgacctatttatggattactataatctaggtatctagattatataatctacataataatctgtgttgtttgttagtatttttaacttttttaagctga

SEQ ID NO: 207536 - DNA, 2730 bp, Zea Mays
cttagctagtttttcactgtccatatgtgtgatttatttgtttctaaatattttccatgcatattctttccaaaccaggcggctgacatcattgctgtttctacctcgttgttggataccttgccagcagtcacaacacctactgaaagggcagatgatgatgatgagacacccatggatgttgatattaaaattaatcttgatgttgatttggaaagacagataactgcagcaattgatccaaagctacttcaacatttggtgaatgctctcttcagaggtacattaagcataaatgattctgatctgtctgaaccatcagatgctgaagtggatgctgtaggatgtatttgtgcttttcttcatgtcacattcaatacattccctctagagcgaattatgactgtactggcctaccggactgaaattgttcctgcactgtggaacttcataaagcggtgccatgcaaaccgaagatggccatttttttcgaagtttgcatcttcattacctgctgatgctcctggttggctccttcccatgtctgtattctgtcccatatacaagcacatgttgaagatcattgataatggggagttttatgagcaagagaaacccctttcccttaaagatttgaagtccttggttcttattttaaagcaggcattatggcaacttttgtggattattccatcctcttctactcagaaagtgtcatccaacccttcaggccttaagaagttgtcagtggagaatgtcaagatcagagctagggttgggttgtctgaattgctcacacagttgcaagactggaacaaccgacttccattcacttctgcaagtgatttctattcccaagaagcaacaagcgaaaattttgtgtctcaggcaatacttggtaatactcgagcatcagagatcataaagcttgctccttttttggctccatttaccagtcgagtcaaaatattcacttcccaattaacgagttctagacaatcaatatcacattctgcattgacaagacaacggttcaaaataagaagaaaccgacttctggaagatgcttttgatcagctaagtttgctttctgaagaagatctcaaaggaccgattcgagtttcatttattaatgaacatggcgaggaagaggctggaatcgatggtggtggaattttcaaggatttcatggaaaatattactcgagccgcttttgatgtgcagtacggtctcttcaaggatcaggattggttcatgaactacatctgcaatatttcaattttcttggaagtctacttgggaaggcaatgtatgaaggcatacttgttgacttgccatttgcaacgttcttcttgagcaaggtgaaacaaaaatacaattttttaaatgatcttccttcattggatccagaattgtatcgacatcttctatttttaaagcattacaatggtgatatctcagagttggaactgtattttgttattgtgaataatgaatatggtgaacaatgtgaagaagaacttctccctggtgggagggacatgcgtgttacgaatgataatgttattacttttatccatcttgttgccaatcatcggttaaactaccagatccgtgcacaaagtacacacttcttgagaggttttcaacagcttataccaaaagactggattgatatgttcaatgaacatgaaattcaggttcttatatctggctctttagaaagcttggatattgatgacttgcggtcgaacaccaactattctgcaggatatcatccagatcatgagcttgttgagatgttttgggaggtcttgaagagcttaagttcagacaaccagaaaaaatttctcaagtttgtgactggatgttctcgtggccccctccttggatttcagtatctcgaaccgaaattttgcattcagagagctggtgttccaggtctggaggagcatgcagaccgcttgccgacatcagctacctgcatgaaccttctgaagctccccccctataaaagcaaggagcagatgcaaaccaaactattgtacgcgataaattcagaagctggttttgatctaagttgatcatgatcgggattcagtatttgcagttcagatagtcgctattaaaggcaccaagggccgaactcaaccaaccatcggccccatttgaagccccatgaatgaaggaaatgaaggaaaaaaagaaagaaacgcagttgtttctcagagtagttgaatgtctggagggaggctgcaatatagctgtctgctaactaagggcttcgttctccaagagaaataggcagacgctgtctaatcaatcatgggcatgtacatatgtgcatcattttatacagaaattttatatgtatctaatcaatgctggtttgcggtcatctggtcctttttggcgcatcacttgctcaccttatcccaatttagggctgatttgttaacaatagaattagatgggatacatgagaggaaatccattactatttaaaattaaataacaagggattttctctcatggatctcatccaattcttttgttaccaaatcagcacttagtctttggaaggaggggattgaggggtgtaatctagcttatcaattatataaacacttaatgacctatttatggattactataatctaggtatctagattatataatctacataataatctgtgttgtttgttagtatttttaacttttttaagctga

SEQ ID NO: 207537 - DNA, 2057 bp, Zea Mays
ccttggttcttattttaaagcaggccttaagaagttgtcagtggagaatgtcaagatcagagctagggttgggttgtctgaattgctcacacagttgcaagactggaacaaccgacttccattcacttctgcaagtgatttctattcccaagaagcaacaagcgaaaattttgtgtctcaggcaatacttggtaatactcgagcatcagagatcataaagcttgctccttttttggctccatttaccagtcgagtcaaaatattcacttcccaattaacgagttctagacaatcaatatcacattctgcattgacaagacaacggttcaaaataagaagaaaccgacttctggaagatgcttttgatcagctaagtttgctttctgaagaagatctcaaaggaccgattcgagtttcatttattaatgaacatggcgaggaagaggctggaatcgatggtggtggaattttcaaggatttcatggaaaatattactcgagccgcttttgatgtgcagtacggtctcttcaaggagacggctgatcatcttttgtacccaaacccaggatcaggattggttcatgaactacatctgcaatatttcaattttcttggaagtctacttgggaaggcaatgtatgaaggcatacttgttgacttgccatttgcaacgttcttcttgagcaaggtgaaacaaaaatacaattttttaaatgatcttccttcattggatccagaattgtatcgacatcttctatttttaaagcattacaatggtgatatctcagagttggaactgtattttgttattgtgaataatgaatatggtgaacaatgtgaagaagaacttctccctggtgggagggacatgcgtgttacgaatgataatgttattacttttatccatcttgttgccaatcatcggttaaactaccagatccgtgcacaaagtacacacttcttgagaggttttcaacagcttataccaaaagactggattgatatgttcaatgaacatgaaattcaggttcttatatctggctctttagaaagcttggatattgatgacttgcggtcgaacaccaactattctgcaggatatcatccagatcatgagcttgttgagatgttttgggaggtcttgaagagcttaagttcagacaaccagaaaaaatttctcaagtttgtgactggatgttctcgtggccccctccttggatttcagtatctcgaaccgaaattttgcattcagagagctggtgttccaggtctggaggagcatgcagaccgcttgccgacatcagctacctgcatgaaccttctgaagctccccccctataaaagcaaggagcagatgcaaaccaaactattgtacgcgataaattcagaagctggttttgatctaagttgatcatgatcgggattcagtatttgcagttcagatagtcgctattaaaggcaccaagggccgaactcaaccaaccatcggccccatttgaagccccatgaatgaaggaaatgaaggaaaaaaagaaagaaacgcagttgtttctcagagtagttgaatgtctggagggaggctgcaatatagctgtctgctaactaagggcttcgttctccaagagaaataggcagacgctgtctaatcaatcatgggcatgtacatatgtgcatcattttatacagaaattttatatgtatctaatcaatgctggtttgcggtcatctggtcctttttggcgcatcacttgctcaccttatcccaatttagggctgatttgttaacaatagaattagatgggatacatgagaggaaatccattactatttaaaattaaataacaagggattttctctcatggatctcatccaattcttttgttaccaaatcagcacttagtctttggaaggaggggattgaggggtgtaatctagcttatcaattatataaacacttaatgacctatttatggattactataatctaggtatctagattatataatctacataataatctgtgttgtttgttagtatttttaacttttttaagctga

SEQ ID NO: 207538 - DNA, 2942 bp, Zea Mays
cctcgtggcccaccccacctccttccgagctccgaggagcgatcggcagggcgcgcctctggccgctttgtcgcgacgcgcgttcgctccaatcctgtcgcggccattaaaagccttcccggctttcccgctcagctcgtctcttccagaaacgtacctcgtcatctcttcgccttcgctacgcaattccgatccacgctgcgggccacttgtgacgactggcggaacccgcgagaaacagaggcgggcgagcggcgatcggagatggcgccggagaagccccggaaggaacaggaggaggagttgatgctggaggatggaggcatcgaggagagcccgcgccgcagcttcgaggactgcggcgactccgaggaggaccgcggggagggcgatgacgaggaggagcgggacagcgaccgcgacggcgtcggttcgacgcgctccttcctgccccaaaagtggccgcagagctacagggaaacaactgacacctacacaatcgctgcatcaccgagctttggttacttaggttcttctacaagcaaatactcgctcctcgaccttggtcgcagtattctgggctctgacctgaagtcacctctaatatcggccaaggctgattctgtcagaaacttgccgaaaacccttggttcaatgagagatgggagagtctcgtttcaattgcaacacacgggagaaatctacattagtcaagggtgcaatgtgacgcaaacagtcttcaacgggattaatgtgcttgctggtgttggccttctttccactccgtttacaattcatgaagctggatggactggccttgcagttctagcatgctttgcgattgtttgctgttatactggaattcttctaaaacattgttttgagagcaaagatggtatctcaagttatccagacattggagaggctgcatttggaagaattggccgtgtgttgatatctattattttgtataccgagctatattcatactgtgtggaattcatcattttggagggtgataacctcacatcaatttttcctaaagctggttttgattggcttgggattcatgttgatggaaaacattttttcggagtgttaactgctattttagtcttgccaacagtatggctgcgagatcttcgagtactctcgtacctttcagcgggtggtgtgattgcaactcttctcgtattcctgtccgttggtttagtcggtgttaccgatggtataggcttccattcaactgggaaggcagtaaactggagtggcatgccttttgccattggtatttatggattttgctactccgggcattcggtatttccaaatatctaccagtcaatgtccgatagatctaagttccctaaggcactgttcatatgtttcgcaatttgcacagcaatatatggctcttttgctgtcattggctttctcatgtttggaaagaacactttatcacaaatcactttaaaccttccaaagcattcgtttgcctcagaagttgcactatggaccacggtgatcaaccctttcaccaaatttgccttgttgttaaacccattagctcggagtttagaagagttgcgtcctgaaggttttatgaacgaaacatcatgcgctattatactgaggactgcccttcttgcatcaactgtatgcattgcctttcttctgccgttctttggtcttgtgatgtctctcattggatctcttcttagtatacttgtgttcacagccgcgtacagagctatatgacaggactttctgatatgcaatgcgttgttatttcgtttgtggcctaagaaagaggaagcatggatgatagattaatcgtattttattatgcaatgcgattaattaacgaatgtatacttcccataatcacaggcagtcataatgccacccttgtgtttcctgaagatcgcgcagaacaaagcaacttgtgcacaggtaatcgcaagcatttgtatcgtaatgttgggcgtcatcagtgctgccctggggacatactcctccgtgaaaaagattgtagaaaactactaagctcttcgacaataattgcctgcctgcaccagactccacgtatggaactcgaaatggtcaggttttactgtacgaccaaatttttactagaactaccggatttcctgtacattattgctgctgttattattcggaccacactagcctactaaaaaggaacacttccaataatgtaatcttgcgcacctttacctgagttctttatcatttagttgtactgtagcaagttcctgtgctgccgattgttcctaggataagcttctgccttttacagttgaggcatctatatatacggcgacgactactgtacaatcagagtacaccttatgtacagtcaggatcagctagcactatattcttagaacttggtcgagtgcagcgaggatgcatgttcgttggccttttatggtgccaccatggtcgaagccatagcctgagcatgataatggcgccatgcactgttgtcttgtatcatatgcgctgttctatctcaagttctttttgaaggaagcaggcttgatttgtttgtagtgtgacgttctgtgtgtcaatgcaaaagaataatctggtgaaaaacaccgtgtcctagatgtttcatctcttttttttctttgctcaatttgctagtcaattaaccatatcatcgaactgaacatgtattggcttcggattggaacgcatacatacattctcctaatgttgcacgcaggacagaatgttacacagttacaagtagtgcaaatgtcagcacttcgctgagctgattgtatgtacactatcctaatgatgcacgcaagacaaactggcttggctttaggcatgccagggagcaatttccctgcaatgtacatttaagagggcgtcgatcttggcatctccaccgacacagagtgtgg

SEQ ID NO: 207539 - DNA, 2753 bp, Zea Mays
gtggcccaccccacctccttccgagctccgaggagcgatcggcagggcgcgcctctggccgctttgtcgcgacgcgcgttcgctccaatcctgtcgcggccattaaaagccttcccggctttcccgctcagctcgtctcttccagaaacgtacctcgtcatctcttcgccttcgctacgcaattccgatccacgctgcgggccacttgtgacgactggcggaacccgcgagaaacagaggcgggcgagcggcgatcggagatggcgccggagaagccccggaaggaacaggaggaggagttgatgctggaggatggaggcatcgaggagagcccgcgccgcagcttcgaggactgcggcgactccgaggaggaccgcggggagggcgatgacgaggaggagcgggacagcgaccgcgacggcgtcggttcgacgcgctccttcctgccccaaaagtggccgcagagctacagggaaacaactgacacctacacaatcgctgcatcaccgagctttggttacttaggttcttctacaagcaaatactcgctcctcgaccttggtcgcagtattctgggctctgacctgaagtcacctctaatatcggccaaggctgattctgtcagaaacttgccgaaaacccttggttcaatgagagatgggagagtctcgtttcaattgcaacacacgggagaaatctacattagtcaagggtgcaatgtgacgcaaacagtcttcaacgggattaatgtgcttgctggtgttggccttctttccactccgtttacaattcatgaagctggatggactggccttgcagttctagcatgctttgcgattgtttgctgttatactggaattcttctaaaacattgttttgagagcaaagatggtatctcaagttatccagacattggagaggctgcatttggaagaattggccgtgtgttgatatcttcatactgtgtggaattcatcattttggagggtgataacctcacatcaatttttcctaaagctggttttgattggcttgggattcatgttgatggaaaacattttttcggagtgttaactgctattttagtcttgccaacagtatggctgcgagatcttcgagtactctcgtacctttcagtcggtgttaccgatggtataggcttccattcaactgggaaggcagtaaactggagtggcatgccttttgccattggtatttatggattttgctactccgggcattcggtatttccaaatatctaccagtcaatgtccgatagatctaagttccctaaggcactgttcatatgtttcgcaatttgcacagcaatatatggctcttttgctgtcattggctttctcatgtttggaaagaacactttatcacaaatcactttaaaccttccaaagcattcgtttgcctcagaagttgcactatggaccacggtgatcaaccctttcaccaagtatccttttcatcaaaacctcggaatttcagttttctaagatattgttttgattttatttgttctaactctctttggaattccttcatccttaattataaccagatttgccttgttgttaaacccattagctcggagtttagaagagttgcgtcctgaaggttttatgaacgaaacatcatgcgctattatactgaggactgcccttcttgcatcaactgtatgcattgcctttcttctgccgttctttggtcttgtgatgtctctcattggatctcttcttagtatacttgtgttcacagccgcgtacagagctatatgacaggactttctgatatgcaatgcgttgttatttcgtttgtggcctaagaaagaggaagcatggatgatagattaatcgtattttattatgcaatgcgattaattaacgaatgtatacttcccataatcacaggcagtcataatgccacccttgtgtttcctgaagatcgcgcagaacaaagcaacttgtgcacaggtaatcgcaagcatttgtatcgtaatgttgggcgtcatcagtgctgccctggggacatactcctccgtgaaaaagattgtagaaaactactaagctcttcgacaataattgcctgcctgcaccagactccacgtatggaactcgaaatgttgaggcatctatatatacggcgacgactactgtacaatcagagtacaccttatgtacagtcaggatcagctagcactatattcttagaacttggtcgagtgcagcgaggatgcatgttcgttggccttttatggtgccaccatggtcgaagccatagcctgagcatgataatggcgccatgcactgttgtcttgtatcatatgcgctgttctatctcaagttctttttgaaggaagcaggcttgatttgtttgtagtgtgacgttctgtgtgtcaatgcaaaagaataatctggtgaaaaacaccgtgtcctagatgtttcatctcttttttttctttgctcaatttgctagtcaattaaccatatcatcgaactgaacatgtattggcttcggattggaacgcatacatacattctcctaatgttgcacgcaggacagaatgttacacagttacaagtagtgcaaatgtcagcacttcgctgagctgattgtatgtacactatcctaatgatgcacgcaagacaaactggcttggctttaggcatgccagggagcaatttccctgcaatgtacatttaagagggcgtcgatcttggcatctccaccgacacagagtgtgg

SEQ ID NO: 207540 - DNA, 834 bp, Zea Mays
gggtgcaccctgtcccagaacgcgtgctggtcgcggttgctgcacaccgtggcgttgggcaggcagtccgcctcggcgccgaacctcccgcccccgcagcacgcgtcggcgacgtccgtgtaccccgacgcccccgggtcgtcgaaggtggccatcgacaggccgtagtagtcggcgagcgagtaggtgaagcccggcaggcgggaggcgaggctggcgagcaggaccgcgagggcgtcgtccaggcccgacgcgagctcgttcaggccgtccaagcacgcgcccgtcttcgtcccgccggacagccgcgccacggggacgcagccgagcagccccacgttgatgatggcgaacttcctcgcgcccatggtgtgcagctcctgcagtgcatgaatgatggatgtaatacgcctgcgcggtggcgaagacgaataggtcgttgctgccgacgctgaagaggaagacggacctggagagcaggaggtgggtcgcacgggagcccagcttcgtgaccaactgtgccttggtggacttgaagtactgcacctgcttcgacaatgggatgttgttgcccgcgttctgcatttcagtggagtcgaggatcccagctcctccggaagcatagctgacaccgctgccacgagctgtgaggaccagacggccggtgctaggtgccaacgacaggtatggcggaggactagacgcgaaccccatgctctttgctgcacatccatgcaagcatgtatgtagcgcgtatacaaaaaaataaaaacatgcaggaaatgtattgttttgttaccgaggtagtcagcgatgttgtagccattgctgaat

SEQ ID NO: 207541 - DNA, 831 bp, Zea Mays
  misc_feature (830)..(831): n is a, c, g, or t
gttcgttgtggccttcggaggccgttgaatcctcttcgggctacgtggaacggacgttctctaggcggtgctgagttgtgtgcctgtgctgggtcgggagtgatgttcgtattgttctgggcgcagagcaggactattcccattgctcagatatggctgttcgaggaagcagtgctttcaagctacgtttctatcccaacttagaagtacaaaatattgcacaagaatgggttaaagagagccggaggctgttctatctaagaactgccaacaatgtcacaaataacatctataagggaaacactcctctatggactggaatggtacaaaatgaactctctgaagattgcaggggtttgaactacacttatttgaataatttgagggaacgcgtatcgtccaaatcaattgtaaatagacatggtaataaccgagaactgatcgggcatagtacgataaatcagcatgtgaaatcagtgccagctccagtacgtgttgttaatgatagtgtcaagtgtttcagcatgcctagagcctctaaggtggagattccttggcctgcctattcaccagcggaggatcctttgcttgataaatctaatacagaggtaattttggagcttgaggataaagttcatgatggtgatgacaaaaagaaaaaaactgttgtaaaaaaggtggtttcacctttcccaactaaagcggccttctctgaggaatctttgaaagcacgggaggcacttgctagcatctacgacaaagttttggtagttgacgatatcgagtcagctaggaacattgttaaactgctcactacaaagtacaagagnn

SEQ ID NO: 207542 - DNA, 771 bp, Zea Mays
  misc_feature (770)..(771): n is a, c, g, or t
cgtggatttgcgtctcgggagctcttctatttcatttccaactaattagctccatgtattgacctctgcaggactattcccattgctcagatatggctgttcgaggaagcagtgctttcaagctacgtttctatcccaacttagaagtacaaaatattgcacaagaatgggttaaagagagccggaggctgttctatctaagaactgccaacaatgtcacaaataacatctataagggaaacactcctctatggactggaatggtacaaaatgaactctctgaagattgcaggggtttgaactacacttatttgaataatttgagggaacgcgtatcgtccaaatcaattgtaaatagacatggtaataaccgagaactgatcgggcatagtacgataaatcagcatgtgaaatcagtgccagctccagtacgtgttgttaatgatagtgtcaagtgtttcagcatgcctagagcctctaaggtggagattccttggcctgcctattcaccagcggaggatcctttgcttgataaatctaatacagaggtaattttggagcttgaggataaagttcatgatggtgatgacaaaaagaaaaaaactgttgtaaaaaaggtggtttcacctttcccaactaaagcggccttctctgaggaatctttgaaagcacgggaggcacttgctagcatctacgacaaagttttggtagttgacgatatcgagtcagctaggaacattgttaaactgctcactacaaagtacaagagnn

SEQ ID NO: 207543 - DNA, 1858 bp, Zea Mays
cgttgtcttctctagcgacggcgaggcttgagcgctcacgtcccggcgttcccgtgccggtggccaagccagcggccgacgagatggactacctcaggacggtggttccgtcacaactcttggcagagcgcggctccaatcttgtcgtcatcaacccagatgggacgtgttgatggcttctcttcgcagcaaaacagagacgataataaattcacttggacagatgtgtcagagagaattattaagccatccacaccattcgataggtcagtatacaaggatgctgaggaagatactctgccaagcacatctgatgatgataatggacaggactttaaagagaataagtataaagaaatgatatttggagaagatgctctgaaaatccctccttcagagtcatactgtctgagtcgcccaattaggagaggccattttaatgtgtcccataattattcagtgcatcaggttttagaagatttacgcactatttggaactggatactgacagaaaagttgcatatcaacccaagagacagaggtctatattctgcaattcttgttcttggggagacatttgacaaccgagaaataaaagagatgctgtctattgtccttcatgatttggggttcagcactgcagttgtacatcaggaagctctatctgcagcgtttggaaatggtttatctacaacttgtgttgtcaacattggtgctcaagttacacaagtagtttgtgttgaggatggagtagctttgccccacacagctctggcgcttccatatggtggagatactgggagcattgatgcagctgtccttgttcattcatatgataatgaaaggtctggtggacatcagaagacaagactatcagcaattaatgttcctcctatgggtcttctttacccaagggttcttgttccagaagagtaccctccacctcctcgatcttggttccaagactatgatgacatgctggaggatacctggcaaacaagtgatggtctttaccctagtgggaatggtgggtttggcatgtgggacagttatccgatgtttcccactagattaaagaaatttgataacattggcctcgtagaggccattattagtagtgtactttcaacaggacgtgttgaccttcaaaagaagctgtttggtagcattcagttggttggtggtgcagcttctacagctggccttgcacaagtgctggagcaaagggttcgcactaaaatttcagcaaaccaatctattgagaaagttgaggtgttgcaatctaggacttatccattatttgttccatggaaaggtggagtgattttgggcgtccttgatattggtaaggatgcgtggattcatagagaagattggattaaaaatggtgtccacatcgggagtggcagaaaatataaggattcctattttcttcaggcgcaagtaatgtgctactacaacgtataacagtatcttatttccgagctacacacgaagacttgcacttatacaggttgttcgaccgtccaaaccatcctagaatatgattggtggactgcgattaaattgcgtacatgatgcatcagttctatgcatgctcgctgctgtctgttcggaggtcatcaactcgggacctggactaagggccttgtcgttcgctcaacccctatgaaaaagtttggctttctaaagatgtagtagaagtactcatttattccctgccaattgaacatttcaaatcttcgtatggtgttaatgaaaaatctgatgtttggattcgtatttatttccaatgataatgtatatgtgcattctcgactgttttggaaagaatgaaaaatcctcgtccgtttgcgta

SEQ ID NO: 207544 - DNA, 1996 bp, Zea Mays
cgttgtcttctctagcgacggcgaggcttgagcgctcacgtcccggcgttcccgtgccggtggccaagccagcggccgacgagatggactacctcaggacggtggttccgtcacaactcttggcagagcgcggctccaatcttgtcgtcatcaacccaggatcgggaaatgtgcgaatggggtttgctagtcaggatgtgccattcaatataccacattgcattgcccgacacatcaatccacaagagggcgaagaaccaagattctctgtgcgcgatcagatgctcaactgccatgctacttcatcgcagaatgcagagcgggagagtgcatatgatattattgcagcactgatgaaaatcccatttttggacgatgaagaaatgccttcaccgaaccaaccccttcctccaaagatgggacgtgttgatggcttctcttcgcagcaaaacagagacgataataaattcacttggacagatgtgtcagagagaattattaagccatccacaccattcggtcagtatacaaggatgctgaggaagatactctgccaagcacatctgatgatgataatggacaggactttaaagagaataagtataaagaaatgatatttggagaagatgctctgaaaatccctccttcagagtcatactgtctgagtcgcccaattaggagaggccattttaatgtgtcccataattattcagtgcatcaggttttagaagatttacgcactatttggaactggatactgacagaaaagttgcatatcaacccaagagacagaggtctatattctgcaattcttgttcttggggagacatttgacaaccgagaaataaaagagatgctgtctattgtccttcatgatttggggttcagcactgcagttgtacatcaggaagctctatctgcagcgtttggaaatggtttatctacaacttgtgttgtcaacattggtgctcaagttacacaagtagtttgtgttgaggatggagtagctttgccccacacagctctggcgcttccatatggtggagatgacatctccagatgcttgctttgggttcaacgtcgccatggcacgtggccaaacttccaaactgatccaatgagcaatcctatagatatgctaatgctcaacaaaatcaaagagtcatatagccaaataaagactgggagcattgatgcagctgtccttgttcattcatatgataatgaaaggtctggtggacatcagaagacaagactatcagcaattaatgacgtgttgaccttcaaaagaagctgtttggtagcattcagttggttggtggtgcagcttctacagctggccttgcacaagtgctggagcaaagggttcgcactaaaatttcagcaaaccaatctattgagaaagttgaggtgttgcaatctaggacttatccattatttgttccatggaaaggtggagtgattttgggcgtccttgatattggtaaggatgcgtggattcatagagaagattggattaaaaatggtgtccacatcgggagtggcagaaaatataaggattcctattttcttcaggcgcaagtaatgtgctactacaacgtataacagtatcttatttccgagctacacacgaagacttgcacttatacaggttgttcgaccgtccaaaccatcctagaatatgattggtggactgcgattaaattgcgtacatgatgcatcagttctatgcatgctcgctgctgtctgttcggaggtcatcaactcgggacctggactaagggccttgtcgttcgctcaacccctatgaaaaagtttggctttctaaagatgtagtagaagtactcatttattccctgccaattgaacatttcaaatcttcgtatggtgttaatgaaaaatctgatgtttggattcgtatttatttccaatgataatgtatatgtgcattctcgactgttttggaaagaatgaaaaatcctcgtccgtttgcgta

SEQ ID NO: 207545 - DNA, 1599 bp, Zea Mays
cgttgtcttctctagcgacggcgaggcttgagcgctcacgtcccggcgttcccgtgccggtggccaagccagcggccgacgagatggactacctcaggacggtggttccgtcacaactcttggcagagcgcggctccaatcttgtcgtcatcaacccaggatcgggaaatgtgcgaatggggtttgctagtcaggatgtgccattcaatataccacattgcattgcccgacacatcaatccacaagagggcgaagaaccaagattctctgtgcgcgatcagatgctcaactgccatgctacttcatcgcagaatgcagagcgggagagtgcatatgatattattgcagcactgatgaaaatcccatttttggacgatgaagaaatgccttcaccgaaccaaccccttcctccaaagatgggacgtgttgatggcttctcttcgcagcaaaacagagacgataataaattcacttggacagatgtgtcagagagaattattaagccatccacaccattcggtcagtatacaaggatgctgaggaagatactctgccaagcacatctgatgatgataatggacaggactttaaagagaataagtataaagaaatgatatttggagaagatgctctgaaaatccctccttcagagtcatactgtctgagtcgcccaattaggagaggccattttaatgtgtcccataattattcagtgcatcaggttttagaagatttacgcactatttggaactggatactgacagaaaagttgcatatcaacccaagagacagaggtctatattctgcaattcttgttcttggggagacatttgacaaccgagaaataaaagagatgctgtctattgtccttcatgatttggggttcagcactgcagttgtacatcaggaagctctatctgcagcgtttggaaatggtttatctacaacttgtgttgtcaacattggtgctcaagttacacaagtagtttgtgttgaggatggagtagctttgccccacacagctctggcgcttccatatggtggagatactgggagcattgatgcagctgtccttgttcattcatatgataatgaaaggtctggtggacatcagaagacaagactatcagcaattaatgttcctcctatgggtcttctttacccaagggttcttgttccagaagagtaccctccacctcctcgatcttggttccaagactatgatgacatgctggaggatacctggcaaacaagtgatggtctttaccctagtgggaatggtgggtttggcatgtgggacagttatccgatgtttcccactagattaaagaaatttgataacattggcctcgtagaggccattattagtagtgtactttcaacaggacgtgttgaccttcaaaagaagctgtttggtagcattcagttggttggtggtgcagcttctacagctggccttgcacaagtgctggagcaaagggttcgcactaaaatttcagcaaaccaatctattgagaaagttgaggtgttgcaatctaggacttatccattatttgttccatggaaaggtggagtgactattaccaaattggactgatg

SEQ ID NO: 207546 - DNA, 935 bp, Zea Mays
aactcacctgcgcggtgacagcacctcgccggcttttcttccctcaggcttgcactttgcacagcctctcacatcacatgccgctgatgcttcgcgtctcctactccttcctgcttccacctattaatccaccccactctcttccctccccgttccacccgcctctaccgccgcgagatccggctccgcttccagaagcttctggaacgcccgttccatgagcgtctgatcggccgccgccatgggctgcgctggatccacccccaaagtcgacgagaacagcaagaaactgaaaaggcctaaggcttggaagcatacccaaccaattacaccggcacggctgaaacagatgcgtgatgagttctgggacacggctccgcactacggaggccaaaaagagatctgggatgctctgagggttgccgcggagtccgatctagcccttgcacagaccatcgtggacagtgctggaatcatcgtgtcgaaccctgacatgacgctctgctacgacgagagaggcgccaagtacgagctgcccaagtatgtcttgagcgagccagcgaacctgatccgcgacgggtgattctggaccccaaaagggacagtgaaagctcgtttcagcgctggatgttgtatagtgatgttattggacacgatgtgtagtctctagacctgctactgctgaactcggtcattcagggacagtgaatgcagtgtcgtttaggctatatgctgcagacttattcacctcatatttcagacttcagacttaactgtatctatataaatagtgcagtttgcactcatatttcagacttcagacttcactgtatctatatagatagtgcagtttgcaatgcaaaaaaatgtatgctcagagtctacgagctcagcttgcaaagaaagagccatgtcacagaatcactgaagtgaaa

SEQ ID NO: 207547 - DNA, 809 bp, Zea Mays
aaaattttttagaaatgcgcggcacacgacaggaattttgatccgccttcctatgttggccgggcgcaaactcgtaggataacgcctactatacggaaccccgtcgggaattaatgcgcccgtcctcgccagtcgccacgaccgcagcaatccgccgcccttggccgtgccccgtgctgccgtactcgtaatccgtgagggaaagcgtccgcgctccgggccccgccgccgatagttccttcaagggagcgacgagcgcgcggtcgatggagacggtggaggaggacgtggaggagtacagctggcgggaggtggtgctgccgcacctcgtccccgtggttcccggcgcgcaaccggagctcgagcgggagaccggggagcggcgccgcggcagggacctcctcgtcgccgtcgacttcggcccgaactccaagcacgcctttgactgggcgctcgggcacatcgcgcgcatggccgacacggtccacctcgtccatgccgtctccagtgtgcaaaatgagattgtgtatgataaaagtcgggagctcatggaggatttagcagtcgaggcattcaagacgttactggtccggaccaaggccagaattgttgaaggagacgctggaaaagttatttgccgagaagcagatcgactgaagcctgccgctgtcattcttggtacacgtggtagaggccttattcaaagtgtgttgcagggaagtgtcagtgagtattgcttccacaactgtaaagcagccccaattatcattgtgcctgggaaagtgtagatacatgtaaatattgaaata

SEQ ID NO: 207548 - DNA, 461 bp, Zea Mays
ctcgtaggataacgcctactatacggaaccccgtcgggaattaatgcgcccgtcctcgccagtcgccacgaccgcagcaatccgccgcccttggccgtgccccgtgctgccgtactcgtaatccgtgagggaaagcgtccgcgctccgggccccgccgccgatagttccttcaagggagcgacgagcgcgcggtcgatggagacggtggaggaggacgtggaggagtacagctggcgggaggtggtgctgccgcacctcgtccccgtggttcccggcgcgcaaccggagctcgagcgggagaccggggagcggcgccgcggcagggacctcctcgtcgccgtcgacttcggcccgaactccaagcacgcctttgactgggcgctcgggcacatcgcgcgcatggccgacacggtccacctcgtccatgccgtctccatcctgctctgtctgaatgcgaatt

SEQ ID NO: 207549 - DNA, 3307 bp, Zea Mays
ggcactcggccccgggcaaattgggaccctacaatattgccagctgaaacacaccaccgtgcccagccccagccctacctcacatgatcgcaccgcacctaaagggagggccaaatccaatctcaatctcccacggccaagtaccatcacccccaccccaacgaaagggagccgggctcccctatctatatccacccgtccttctccctatatatatggattgggaaatttttcaggagggcagagaagcgaaagggacgcgcaagctccttcacccaccctcccccacgccacacgctcctcctacataaccacgctgcttcgattcactcctcatcggtggctcacgaccgagctgctgaggcaaagcttgtcccgcagtccttcccttagccttaacactcggagttgatcccgtctccgggggaagcagctggtaataatggcgcggtgccaggggaccgttgagagcctctgccaggggctgctcgacctcgacgacgacaagttcggtgcaatgtgcagcgccttcggctacctccaggagtggccggacctgggtgccgccatgtgcggcgccaatctcgccgtgccgcctgccgtggcgacgccgagcgccggcgacggcaacgattcctcctcttgcagcgtcagcggcgggttgaggaagaggaggccggacgcgtacctcgatgccaagggtggtgcgaacggcatgaacaagagacccagagggaagcagcagccgtctggcctctctgagatcgcggcggcgcccgggaaagggaagcaggagaggccaaaggctggcaccaagaagaaggccgaggctgcggcggcggcggcggctgccggccagaagaccgactacatccacgtccgggcccgccgcggccaggccacggacagccacagcctcgccgagcgggtgaggagggagaggatcagcgagcggatgcggtacctgcaggagctggtgcccgggtgcagcaaggtcacgggcaaggccggcatgctcgacgagatcatcaactacgtccagtccctgcagaagcaagtcgaggtgaatggaactgctgctgcctgggatattggctcccagaatttgttcagcggatttgatgcacaatttcagtcggtagaaagtggctgcttgctagacaacctcaaaatggaaatgtgagaagaattaatcctcattgctggagttttaaccacgggaaaaaaaacttgtggctgaagattctttattcatatcaactgtactaatgaagtattctgtcagcaatggcaatacaagtacatttcttgtgttatatgtttgtctgctactctcccggtttctaagcattccttcataaccaagccagacagagggttcagagcttcagattacaagcaaagcaaagcacttaaggacatgttcccacaacaaaccagcaccaatatacaacactttatcacctaaactgacagtacaacgaacaggaacaactctcctactcatcttccttcaaagcacagactgttcaccagcttctgtaaagacatgattcaaccttgtaacagaagtaaaggataattcgcttgcacaatatataatgacagtgaccaccacaaaggatttgagtgcattgagatatcagatgaatcttatttcaatatttacatgtatctacactgacatggcacatgatttgagtgcgttaggttacttgatacccagtctattttcgtgaaatgcttgagacgaagtaaagaacctgaactaacctttcccaggcacaatgataattggggctgctttacagttgtggaagcaatactcactgacacttccctgcaacacactacagtacaaaggcaaagttagagatatgcttataaatgcaatctacagctcacctccagcaataagatataaactaggcaccaaaagatgattctgcaactatcaagttatctaaagaggcactctagtcactgttctttccatgcatttgtacaagcatctcaccataattcagccaaagtcgctttttatactgaacaatcagacctaccttctcgaattattgaatctgagcatgggctcagcactcagcatttttcagcaagcttccaaagtaagagatccaggcacaaattatgaagatgttgttttacatcaaaagggaaaaaggcaaaaaggcaaagatatttcatatctgaatctcgcaagatctttttccttaaaatggtgatgtttacttttccaaacatcaggaccacgcctgccctgatttcagtttcatgcaaacaataatggcgttagttagacagatcccttggcattctaaagccagtaaagaatcccttagggcatgtacatttctgagccaccagttcggtttccaagtataaaagacgattgagaggttacatggtaaaatcctgagaccttggatcatcaatgcagttaagagacaacgtgtatgaaaagttgtgaagaaacatgctcttcgcgaagagtccaggtcttatattttttccacttggcctcttaaagaccactcaagagatcccatattaaatggggttgtacatgcccttagcatcaagacgtctcttgctgttgacatcataccagaactgaaaacacgtggttttattactgagatgaagtttctttttcttggagtaattcttttagatggtgaactggtgatcaaatatttgtattcgttacttgcaagtaacaagacatgcatattgcaggaacataatcacagaagtgttccaaagaagagatccctgattttgaataaaaatgacataaaggcaattgaatgacaacttttatggattacatgcaccatgcaaaaaaatgaaggtagcagcagaatcatgacttcgaattatacgatttttttcacttgcaaagttggctggacataaaactaagtcaaacgaccgtagatataatgttaattcaaaaggctgaatatctaaatgtaccacagatatataatgatttggagtttaaaagagtcaggtacctttgaataaggcctctaccacgtgtaccaagaatgacagcggcaggcttcagtcgatctgcttctcggcaaataacttttccagcgtctccttcaacaattctggccttggtccggacctaaggaattctcaattaaaggcacatgtatcaattccttgatgaatatatggaaaagaaaccaaaacagaaattcacaaatgtgcatacacagtaataaaaaatttctagaaaaatttctagaaaaccacgtagtaactgaggtctggg

SEQ ID NO: 207550 - DNA, 3046 bp, Zea Mays
agcagagccagcagagggccagggcagctagtagctgttaatcgcaattagtgcgcgctaatcaaatgctcatctgtcctcccgaccgttgctaccccatatcccccccacaccgccggctccactccactccgatcgactcgcctgagattctcgcagggactagtttgtggcggaatctcaaacccaggaacctgtgaatcctcgacacttgtgaaacatgagaaggttctttttcttcgggtcccctgctgcaaacgctggtgagggagccgggcaaccggtcaatgatagcaggactggacatagaaagacagatgagggaaaggacatctccaccgcgagattgtcgagatccagaagccgtcgtcagaagcggaataaggaggaaccggctaaccccaaacaactcaggaggtccatgtccttctcatccccggccagaagcagctgtgtggaggaacgatgctttagcttctcgggtgatgttccgtgctctttgtacgatgaatctgatgcaccccaccatgccaaagatgtcgctcccgacatgtggtctccagaagggaatccgttctctagagaatatgcaataagaaccccgaaagatcattctgccatggaaaatgattctcctcgttcaaaatactgttcttgctcagcagggcactctcctgttagctctcctgtcgctatacagtgcagatcaacaagactaggcaatttattaaacaggaacgaagtactagatcgttacattgatagagggcatggagatgcaatcgtagatgagaaacagaagcagtgcgtacctacggtttctaatttgggaaggccacctcgaccccactctacagtaccatccataccgagaccattcaaagagacaacggaaagctacccagatgtggacttaaacgacgccttcctttggcgacttgctcaagagggtataggagatacccacaagattacaactatgtgcagtgcatctagacgccacataaacatgtcagatgcttctgaaagagaaagtgcaacaactgttgaagatatttatgaagatttgcaagatgtgagacttccaaatgttatctgcccctccacttgtcctaactcagcggtagaagaaactgatgacatgttgcttcaaagagttaaggaagttgagtcaaggtttactattccttgtggagatgaatatgaatttagcatgctcaggtataaatcatcaacctcaaatgacatgtttcagttgatccagcaattgactgaagataggaaacagttagcatatgaattgtcttcagagatcaaagcacgtgttacagaaagatttgctgccaaagagcaatacaaacaattaaagaaagaattggacaacagaactagaaggctggagaaggagaagagtgaagtacaaactacactggaaggagagatggatagaaggtcagatgattggtctatcaggctatcaagatttcaatctgaagaagagagactacatgaacgggtgagagaacttgcagagcagaatgtgtcatttcagagagaagttacttctcttggagcaactaaggctgaagctttaatgaaagctgcgagtttggaaacgcaaaatagcaaactaaatgacgatctagagaaactaaaaaatgagcatgagaaactgcattattcctcaacagatttgcaggctcgctttgctgagattgtagaggaaagggaccacatccgagaatatttgaaggccaaggagggagagaacaaagcattgcacaaagtaattgcaagactacaaacaacatgtaatgagcaggaaagaacaatcacaggcatgagacaaggatgcatagacgaattaggtaggaaatttgttgagtacagcaccaatgataaaacgagaaaattacaaatggaacttattagactgactggggtggagcaaaagttgagaggtgaaattcgatcttgtaatcttgaagtaaaatctctcagacaagagaacattgcactcttaaatcgtttacaaggtgctggaaatggagcaagcttctcctcgattcgacttgatcaggagcttcaagctagggtggacaacctgcaaatgcaaggcttgtcactacttgataagattagccaactttgtaccaaattgctggatctgatgaaacataagagacatgaaaatgaatatttgtgtggcaatgatgtgtcaacattcagtgattacatatttgagtaccagagcatcaaaggaggaattgaagctgaaggtagtccttccaaagatcaaacggatgattttggactcaagctgaaagaagaggctatgctgaatagagtactgaaggaggcagtcttgtcaaaagaagttgccattgaacaattgcaatctgatctggcatcttcacttcgcatccaagacgttatgagaaacgagatccagagggttcaggatgagctttcttgcataacccacaaagctaagcagttggagcttcaggtatccaagaaggatgagtcaatcgatgagatccaacaggatttccaggaatctgcaaaggagctggctgctcttcgtggaacactgaaaacagtgacggaggagagggacctgtcgtggcaggaggcgaagcagctgagacgaaacatcagcatcatgcaggacgaggttgtatcgctgaagaagaagatcgaagccctggacgaagacatacttgtgaaggaggggcagatcacaatattgcaggacagcatcgacaagccgttcgacatcatctgcagcccaagatcgatgagggagttcgatatggcgtgaagacggctgctgttttgtagcgtatgcatgaaggattttttgcatcaagggcaagatgcatggagtataatgtgttggaagttgacagtagacccaacaacacattgcattctggtcaattgtttctgtctggtgggacagcacaagcgaagacagatgtattagcactttgtggatctcaagtaaaagaggcctgctgttggaaggtcaggaagaaggtgg

SEQ ID NO: 207551 - DNA, 3151 bp, Zea Mays
gttaatcgcaattagtgcgcgctaatcaaatgctcatctgtcctcccgaccgttgctaccccatatcccccccacaccgccggctccactccactccgatcgactcgcctgagattctcgcagggactagtttgtggcggaatctcaaacccaggaacctgtgaatcctcgacacttgtgaaacatgagaaggttctttttcttcgggtcccctgctgcaaacgctggtgagggagccgggcaaccggtcaatgatagcaggactggacatagaaagacagatgagggaaaggacatctccaccgcgagattgtcgagatccagaagccgtcgtcagaagcggaataaggaggaaccggctaaccccaaacaactcaggaggtccatgtccttctcatccccggccagaagcagctgtgtggaggaacgatgctttagcttctcgggtgatgttccgtgctctttgtacgatgaatctgatgcaccccaccatgccaaagatgtcgctcccgacatgtggtctccagaagggaatccgttctctagagaatatgcaataagaaccccgaaagatcattctgccatggaaaatgattctcctcgttcaaaatactgttcttgctcagcagggcactctcctgttagctctcctgtcgctatacagtgcagatcaacaagactaggcaatttattaaacaggaacgaagtactagatcgttacattgatagagggcatggagatgcaatcgtagatgagaaacagaagcagtgcgtacctacggtttctaatttgggaaggccacctcgaccccactctacagtaccatccataccgagaccattcaaagagacaacggaaagctacccagatgtggacttaaacgacgccttcctttggcgacttgctcaagagggtataggagatacccacaagattacaactatgtgcagtgcatctagacgccacataaacatgtcagatgcttctgaaagagaaagtgcaacaactgttgaagatatttatgaagatttgcaagatgtgagacttccaaatgttatctgcccctccacttgtcctaactcagcggtagaagaaactgatgacatgttgcttcaaagagttaaggaagttgagtcaaggtttactattccttgtggagatgaatatgaatttagcatgctcaggtataaatcatcaacctcaaatgacatgtttcagttgatccagcaattgactgaagataggaaacagttagcatatgaattgtcttcagagatcaaagcacgtgttacagaaagatttgctgccaaagagcaatacaaacaattaaagaaagaattggacaacagaactagaaggctggagaaggagaagagtgaagtacaaactacactggaaggagagatggatagaaggtcagatgattggtctatcaggctatcaagatttcaatctgaagaagagagactacatgaacgggtgagagaacttgcagagcagaatgtgtcatttcagagagaagttacttctcttggagcaactaaggctgaagctttaatgaaagctgcgagtttggaaacgcaaaatagcaaactaaatgacgatctagagaaactaaaaaatgagcatgagaaactgcattattcctcaacagatttgcaggctcgctttgctgagattgtagaggaaagggaccacatccgagaatatttgaaggccaaggagggagagaacaaagcattgcacaaagtaattgcaagactacaaacaacatgtaatgagcaggaaagaacaatcacaggcatgagacaaggatgcatagacgaattaggtaggaaatttgttgagtacagcaccaatgataaaacgagaaaattacaaatggaacttattagactgactggggtggagcaaaagttgagaggtgaaattcgatcttgtaatcttgaagtaaaatctctcagacaagagaacattgcactcttaaatcgtttacaaggtgctggaaatggagcaagcttctcctcgattcgacttgatcaggagcttcaagctagggtggacaacctgcaaatgcaaggcttgtcactacttgataagattagccaactttgtaccaaattgctggatctgatgaaacataagagacatgaaaatgaatatttgtgtggcaatgatgtgtcaacattcagtgattacatatttgagtaccagagcatcaaaggaggaattgaaggtctgaagctaagtttgaaagcaataaattctatactagctgaaaagcaaaatgctaaagaaaaatctggtgaaattgtagctgaaggtagtccttccaaagatcaaacggtgagttacacatggatgattttggactcaagctgaaagaagaggctatgctgaatagagtactgaaggaggcagtcttgtcaaaagaagttgccattgaacaattgcaatctgatctggcatcttcacttcgcatccaagacgttatgagaaacgagatccagagggttcaggatgagctttcttgcataacccacaaagctaagcagttggagcttcaggtatccaagaaggatgagtcaatcgatgagatccaacaggatttccaggaatctgcaaaggagctggctgctcttcgtggaacactgaaaacagtgacggaggagagggacctgtcgtggcaggaggcgaagcagctgagacgaaacatcagcatcatgcaggacgaggttgtatcgctgaagaagaagatcgaagccctggacgaagacatacttgtgaaggaggggcagatcacaatattgcaggacagcatcgacaagccgttcgacatcatctgcagcccaagatcgatgagggagttcgatatggcgtgaagacggctgctgttttgtaggtgagtcggtggatgaaaaatcaagttattgtagaagaccacacatttcttggcttattacagcctgctctgctgttttgaactatgactgatgccactttttgtggctttggggattggaagcgtatgcatgaaggattttttgcatcaagggcaagatgcatggagtataatgtgttggaagttgacagtagacccaacaacacattgcattctggtcaattgtttctgtctggtgggacagcaca

SEQ ID NO: 207552 - DNA, 734 bp, Zea Mays
agttaaccacattcaatgatatgctgggcattttcaatctatttggaggcagtggctattctcccacaattagtgttgctccagagaagcagaaatgtggataacttaactggacaatatgttttcttccttggggcctaccgtgcgttttacattctaaactggatttatcgttatttcacggagggtcatcgcagcagatggatcccttggcttgctggtttggtgcaaacagctctgtatgcagatttcttttactattatttcttaagttggaagaacaatgtgaagctcgagttgcctgcttgagcatgcttcgttttgccagaaagcgtgcaagctacgtgactcaagttttatagaatttagttgattatatgggcatggagagacttggtaatgacgtgagcagttgcagttgatgccaaacccttgatcttgtctgcgaaaattggcatttgtgtttcccatggccaagacgatacgattccaaagctaacagatgctgctgcacagaagtaggctagttcctttttgtacctcaatacttttgatatggaaaatcatatacagttcagttggtctgtttaacattcgatttcacttgctccaaacgaaaaatgcgatccaatgttcgtgcgatttctgtgtaaaactgttacacttttgactgtcctcaacaatccattttttatatataatgtcttggtgttactttggcctagtcttcagct

SEQ ID NO: 207553 - DNA, 1149 bp, Zea Mays
cagggttttcttgacctgcgtgataagaaatcaggatgatgcaccagaaaacaaccctagacgcctgcgtcctgggaaagtatctccacgccttagtgttcccaatcatatacaacggcctccatatgtcaattctcgtcaacaacgacctggtatgaataatggacctgaaatacatgatgagaacgggatcgagtgcatgagagcttctggaaagcttgctgcacaggttttgaaatttgctgggactcttgtaaaggcataacgactgatgaaattgataaagcagtgcaccaaatgataattgataatggagcatatccttcacctcttggttattgtggatacccaaagagtgtctgcacttcagtgaatgaatgcatctgtcatgggattccggattctcgtccccttgaggatggagatatcatcaatattgatgttactgtctacctcaatggctaccatggtgatacatctgctacatttctttgcggtgatgttgatgacgaagctaagaaattagttaaggtgacaagagaatgtctcgacaaggctatatcgatttgttcacctggggtggagatcaaacaaattggtagaactatacaggatcatgcagacaagttcaagtttggtgtagttagacagtttgttggccatggggttggcaaagtttttcatgctgagcctgttgtgcttcatttcagaaacaatgaatggggacgtatgatgttgaatcaaacatttactatagagcccatgctaaccatagggagcatcaaccctgtcatgtggtccgatgactggaccgcagtgacagaagacggcagcttgtcagcacagtttgagcacacgatacttattaccgaagatggccctgaaatactgacacagtgttaatggaaggccaaataacaaagaacaatcgttagtcagctggcaagatcctgcatttctttttggggactaattggtccaacctaaactctgatgcaaaatggcaaactcacattgtaatctcggttcatcggtacaacgatatatgtatagaaattgtactattttcgaagttatatttgagagtgtgttttgttggtgctcgggtgagatgtcatcggtctgccgacgccgagtggttgcaagtag

SEQ ID NO: 207554 - DNA, 1913 bp, Zea Mays
gcaggggcccaccgccccaccccaaaccacacacaagccgctcgcccgcaccgccgcacccgcacgccagaaacagctctcgcgttgcttccgcacgccgcccatggcgagcctgtcgtcgccgagtctcctctcttccttcctcggcgaccgcctcgcactctccactaggcctctccttctccgctccgctgtcccaggcagcaggcggctggcgtatcaagcaacgagaacgctatgcaacttggtggatatcctatttaacaggagaaatcaggatgatgcaccagaaaacaaccctagacgcctgcgtcctgggaaagtatctccacgccttagtgttcccaatcatatacaacggcctccatatgtcaattctcgtcaacaacgacctggtatgaataatggacctgaaatacatgatgagaacgggatcgagtgcatgagagcttctggaaagcttgctgcacaggttttgaaatttgctgggactcttgtaaaggcataacgactgatgaaattgataaagcagtgcaccaaatgataattgataatggagcatatccttcacctcttggttattgtggatacccaaagagtgtctgcacttcagtgaatgaatgcatctgtcatgggattccggattctcgtccccttgaggatggagatatcatcaatattgatgttactgtctacctcaatggctaccatggtgatacatctgctacatttctttgcggtgatgttgatgacgaagctaagaaattagttaaggtgacaagagaatgtctcgacaaggctatatcgatttgttcacctggggtggagatcaaacaaattggtagaactatacagtatgtaatttctgagtaaccaagcttttaaacagatgcacatatttttttattatctttatcttaaaaaacaacattcagtttatcgataagctgtattgtcttaatttgtatgcgtaacagatctggtaatcaaaacgaactcttgttccaactactatacttacgacatttaatctttgaagggatcatgcagacaagttcaagtttggtgtagttagacagtttgttggccatggggttggcaaagtttttcatgctgagcctgttgtgcttcatttcagaaacaatgaatggggacgtatgatgttgaatcaaacatttactataggtacacctttccacagcttgcccgtgttctattaacctgtgattaaaattgctgctctttttctattgacctgtgattaaaatttcacactgtggaacctagagataacatttaaaaaaaaacaggtacattattttgtggttctttcagccatgatctaataacattgcatttggtcactgtcatctttctgcacataagtactagctttttttttgtcttgagcatattttttacactgatgccatgcgatgttttttcattggctagtaaacaaggtaaagcatatgaagctatctcacttcatcacccttttctatcattccatgtcatcagagcccatgctaaccatagggagcatcaaccctgtcatgtggtccgatgactggaccgcagtgacagaagacggcagcttgtcagcacagtttgagcacacgatacttattaccgaagatggccctgaaatactgacacagtgttaatggaaggccaaataacaaagaacaatcgttagtcagctggcaagatcctgcatttctttttggggactaattggtccaacctaaactctgatgcaaaatggcaaactcacattgtaatctcggttcatcggtacaacgatatatgtatagaaattgtactattttcgaagttatatttgagagtgtgttttgttggtgctcgggtgagatgtcatcggtctgccgacgccgagtggttgcaagtag

SEQ ID NO: 207555 - DNA, 2035 bp, Zea Mays
agtctggaccgagaccccggatcgccacgctccttacgccgccgccgttgcccacgagccgggatgctccgcggcgccatctcccgcctcggtgctcgcctccgcctccacgccgacccctctccggcctctcctcgcctccgcgtcctctccacccgccgcggtaaacgctcctcccccaccctgtcgcccgcggactgcgatgacgagggacccctgcgcggcctcttcgtgctatcccgcgaccccgagtgcccaccgcggctgctggtggtgcagccgcgcctccgccccggaagcctcctcgagtccaagctcgccgaggcactcaacctcgccaactccctcgaggagcgccgcgacggcttctaccacagcgagttcggcgccaagggcgcgccgccgcacctcgtcgtccagaaccccgcctcccgcggtcgctcacacgctggaagatgtggatgcagtttttgtcaatgcgattctctctggaatccaacagagaaacttggaggttgcctggggaaagtcggttttggatcgtgttgggcttataattgaaatattcaatgctcatgctgaaacaaaagaagcgaagttacagtcagagttggcagctctcatgtacatgaagactaggcttgtccgtgtacgtggcccaggtggacgactaacttttggtccaagtggggaggctgaggttgtcagtgcaagagggagaggtagtggggggaggggattcatgagtggtgctggtgaaacagagcttcaactacaacggaggagaatccaagaacgccgtgtgagcttgttagctcaaattgaagatgtacgccgcactagagcgatacaacgttcaagtcggaaaagacatggtggctcgtttggtcaagagcttgtaactgttgcagtcgtcggatatacaaatgctgggaaatctacgcttgtgagtgcactttctgaagctgatttatacagtgatgacaggctgtttgcaacagtagatccccggttacgaagtgtgattcttccatcagggagaaaagcacttcttagtgataccgttggcttcatctcagatttaccagtacagcttgtggaagcatttcatgcgaccctagaagaagttgttgaagcagacatgttagtgcatgtgttggattcaagtgcatctaatcttgaagagcatcgatctactgtattgcaagtactgcagcagataggggtttctcaggagaagatcaacaatatgattgaagtttggaacaagattgatcttgtggacgagaatgttaaatctgatgggattgacgatgaagtcttcctgaccgaaggtgaacaggaggatgacatattctctgaagatgatgctccatcagaacaaacatcttttgattctgtagatgtagatgacggagcagattcagaatatttatcagaagaaaattctgaagatagcaatgaactgccatctaaaaagtcatttgctgagccaactgagatgggagcaatgaaagagttgtcatcaaaagaatgttttggagaacttcgtgtcctagatacaaatggacacactttcccacaaccagcttccacttgtcatgtaaaaacttctgctgtgacggggacaggattgcaagagttgttagcattgatagagaggaaactgactgaacaacaaactgtcgtgcaaagaagctatggacctttcgacagaaaatggagacctacctctatggattgtgaaaaggctgcagagccgtagaacatgaagaaactgtaggaagggaccgtatgagttttgatcaatgtcagtcactttaacagacattttgtactcatgcttcatgttgctagatagcatcttatctttatcttatattctgatgagtatgttggttgctgtagatgtatttatgttgctccttttgtatggccttattttgttcattccctctaatcgattttctgtacctttattttggtcgcatggtggggctaatgatgtctccaacaagaaccagtaaagggtctc

SEQ ID NO: 207556 - DNA, 2354 bp, Zea Mays
ctctcacaatcactcaaccactgcctccagctccagcagcagctagctcagctcgatcgtcctcccgacccgatccatccaccccactccccgtgctccaccatctcggcatctcgctcgctcacttagctcgagctgcggcaaacagccggccggcagtccggcacacgggagatgatgaccgggaggctgaacgtggccacgtcgtcctcgccaggaggagacgacttcctgttcatgcccatgcagcagcatcagccgccgccgcctcctcctccgccctacgtcgggttcgagcacggccacggcgtggcgggaggcggcagccagcgcgttgccggaggggtgcagcaccacctctacgacggcctcgacttcgccgcctcggcgctgcagttccagcaggcggaggcgccgcacctgcaccagcagcagctgctcacgctgccgtccagtctcggccccatggcgccgcctccgccgccgccgccgctgcccatgcctatgcccgtgcccgggatgcccggcgaccacgtgtacccggcgctcgggatggtgaagcgcgagggcggcggcgcggacgggaggatcgggctcaacctcggccgccgcacctacttctccccaggggacatgatggccgtggaccgcctcctgatgcggtcccgcctcggcggcggcggcggcgccttcgggctcggcttcggcttcggcttcggcggcgcgcaccacctgcaggctcccccgcgctgccaggccgagggctgcaaggccgacctctccggcgccaagcactaccaccgccgccacaaggtctgcgagtaccacgccaaggcctccgtcgtcgccaccggcggcaagcagcagcgcttctgccagcaatgcagcaggtttcacgtgctgtcggagttcgacgaggtcaagaggagctgccggaaacggctggccgagcacaaccgccgccgccggaagccgcccaccaccgcctcatccaaggacgccgcgtcgccgccggctaacaagaagcccaactgcggctccatcacaagctcttactccactgacaacaagagtaagcatatatacatatctatacgcgtacttagttttcctgtcatggatcaataataacactcgatcgatcagcactctatactacacgcacgcactcttgttgccttgcttgtcttgacgtaatatctgatggatcgacctacctgctctcgttgttcctgacctgggcatgcaacgcaacttgtgtgtggatggatgggcaccataatgcagacctgaacacggccaagtcgaccatgtcatcgaacacgggcagcgtgatcagctgcctggaccaggccgcgggcaacaagcagctgcaggcgaggccgacgctgaccctcggcgcgtcgccggacagggaccagctccaccaccagctgagagccatgctccaggcccaagcagcggccggcggcggccaccaccaccaccaggagcagcacttcataacctctctgcaggttcacaacaacgacggctgcggcggcggcaacagcagcagcagcaacaacaacatcatcctgtcgtgctcctcggtgtgctccagcgcgctgccgtcggccaacggcgaggtctcggaccagaacaacggcaacgctggtggtatgcataacctgttcgaggtggacttcatgtagaccgtccagatcggtgcaaagcaaaaggcaagcacgggagtacgtccttctggcaaggtgtccttggtgtgtatcagtgtaggtaaaaaggaataggagagagagagagagagagcaaaacagctaggcatggagtgggaggagaaacaaggcgagaaaagacacagatagagagagagaagggcgcaaggattctatccatccatctatctatccatcagtccatcacactccatgcatcagtagctagctaggtagcagcaagctgcagagcctgcagcaggctgctgctggtctacaacctcttgttgcaaggttcaatggccatagcaaagccatgcgtccgtcccgttgcattggctctctctctctgtctctatacctgtacgtactatgctgcagctgctgccattgcaagcctttctacctttccatttcaagcggggaataatgtgtctgctatttcactattttttttttgtctttactagttttgttttcttgctgcaaggttgcgtgaggggtgtagtgtgttgtacacttgtactgatactccctgtttctttttagttgtcgatagatagttcaattttgcattatccagcgacaactaaaaaaacggaaggagtaccaaactacctgttgtgttttactgtctcc

SEQ ID NO: 207557 - DNA, 2759 bp, Zea Mays
aaacttggccgcagtgaagggaggggaggagaaagggttttggaattaggcatcggccgccgttgcgttggtgtgagcaagtgaaccaggccgaaaccgaagctaccgccaccaccaccccgccctcgtctccctgtccccgagtcccagtaggggatcccggcggtgaggatgagcggcggcggagctggagggaagggggcggcggcgcctgttccgcccgggtcgaggaagctggtgcagggccttaaggagatcgtgaaccgccccgaggcggagatctacgccgcactgcgcgagtgcggcatggaccccgacgagacggtcagccgcctcctctcccaagatactttccaagaggtaaagagcaagcgcgacaagaagaaagagattaaagaggttcctgagacaagatatcgatcagcaaatagttctactaatcgaggccttagaagtggtgtagatcgtggtggacggaacaattctatgcactccagctctactgataacatgacctcaaggccaccagggtctggtactgcatcaggtacttccagtcagaggcaaacagttgcaagtccttctgcaaacaaacatatggttgctgatggaccagctgcatcattgcaatcatcgtctgggtttcagcatggtggttggtctgggacacctggtcagttgtcgatggctgacattgtgaaaatgggccggcctcagggaaagacttctatcaaacctgtggtcacagctgacagaggttatgctggacagtacccatctttgccaagcacaaaccagaatctgaaacaatctggaagcatggttcccccaacagagcttgacaaggggttacaacctgcccaagattcggttcaggttaaggatcatgatcattctactgctgacagcaagctcccatatggtactgactggtctccacaagatggcccgacatttgcgaaccaatcttcccttcctgagccatctggtgatccgtccttgtatgaggcatcgtttcagtcatctacattggttactgatgtagttaattcacatgaaaattcacacttggatgaaaacgacacctttgcaatgggaccagcacctgcctctgagagacacctggatcctagtgacggtatttctgagtacaatgatgtaatattgaacaactcaagttcctatcagcctcataattactcttacacagaacaacaagaagttgaggattccagtgctgatgtatcagcagcagcagcaaacttccagagtttaagcctacataatgatgagttagctgcaaaaaagtctgcagaagataaccctgcagtgataattcctgaccacttgcaagttacaaatacagaatgtgtcaagttgagctttggcagttttggatctggtgcattttctgggttactcccacaaaataccactgatagcaatgtggaattccctgctcgagaggaatctgcaccagtagatcaaatagatgccaggaatcaagattactatgaaagtggtgctgtaacttcaccagcagacgaaaatcttgaggccatgcttggagctaacatggagaatgtagatgcgccttctgtttcacaggctaatgagctcaggcaggacgtacttgatccttctgaacttcaatatgacgtcccatcagttccaagtcatgcttattcaaacacggacactttacagcctagcacaattgaggagccacaaggaaacaaccaagcacatactctttcccatttgtcaaacttaatgcaagcaaatcctttgagcaccagcagcctattggggtcaaatcaaaatcatgcaactcttcatggcttagagtttgatttaccgccttatctgggagcaaaatataacgcaggctcaactacaaatcctagaccacccatatccatgcagcaggaggcactgaaagcaggggttttctccaacgcccagtctacacagagtcttccaagtactagcattcagacggggcttcctctgccacagcaattagcacatcacccttactctcagccaactttaccaatcacacattttccaaatatggttgggtatccgtatttgccacaaaactatgctacttacctatcttcaggcaccttccagcaagcatacccgagtagcggaccattccatcagtctgctgctgctgctttgctggcatctggtatgaagtactcgactccagagtataagaacaacctgtctgccacaggcttacaacagcaacatcagccacaaccacaaccactttcatcagtcatctctggttatggaggctttggaagctcaagtaatatacaaggaaattttacccttagtcagagtaccggctctgcatcagctcttgggtttgatgaagcattgagcagacagtacaaaaacaccagtcaatacatggctctccagcagggcgacaactctggaatgtgggttcatggctctggttcaagagcggcctcgacgcttccgcctaaccacttctatggttaccagggacagagtcagctgggtggctttgctcgggcgcagcagccacagccttcccaatttggaggccatgggtacccaactgtctaccagtctcagggacaggagcacccccagaaccttgctgagggcagcctgaacggcttccaggtcacaccgtctcagccatctcatccgagctggcagcatcagcacacttttggtcatgattttactgcttcaaaaacatttccaat

SEQ ID NO: 207558 - DNA, 3122 bp, Zea Mays
gaacactcagacttttctgtagttgttgctccgaggaggaggatgcggcgatagcgtggacaatgtctggacactggaagctcgggagaaaatactttccaagaggtaaagagcaagcgcgacaagaagaaagagattaaagaggttcctgagacaagatatcgatcagcaaatagttctactaatcgaggccttagaagtggtgtagatcgtggtggacggaacaattctatgcactccagctctactgataacatgacctcaaggccaccagggtctggtactgcatcaggtacttccagtcagaggcaaacagttgcaagtccttctgcaaacaaacatatggttgctgatggaccagctgcatcattgcaatcatcgtctgggtttcagcatggtggttggtctgggacacctggtcagttgtcgatggctgacattgtgaaaatgggccggcctcagggaaagacttctatcaaacctgtggtcacagctgacagaggttatgctggacagtacccatctttgccaagcacaaaccagaatctgaaacaatctggaagcatggttcccccaacagagcttgacaaggggttacaacctgcccaagattcggttcaggttaaggatcatgatcattctactgctgacagcaagctcccatatggtactgactggtctccacaagatggcccgacatttgcgaaccaatcttcccttcctgagccatctggtgatccgtccttgtatgaggcatcgtttcagtcatctacattggttactgatgtagttaattcacatgaaaattcacacttggatgaaaacgacacctttgcaatgggaccagcacctgcctctgagagacacctggatcctagtgacggtatttctgagtacaatgatgtaatattgaacaactcaagttcctatcagcctcataattactcttacacagaacaacaagaagttgaggattccagtgctgatgtatcagcagcagcagcaaacttccagagtttaagcctacataatgatgagttagctgcaaaaaagtctgcagaagataaccctgcagtgataattcctgaccacttgcaagttacaaatacagaatgtgtcaagttgagctttggcagttttggatctggtgcattttctgggttactcccacaaaataccactgatagcaatgtggaattccctgctcgagaggaatctgcaccagtagatcaaatagatgccaggaatcaagattactatgaaagtggtgctgtaacttcaccagcagacgaaaatcttgaggccatgcttggagctaacatggagaatgtagatgcgccttctgtttcacaggctaatgagctcaggcaggacgtacttgatccttctgaacttcaatatgacgtcccatcagttccaagtcatgcttattcaaacacggacactttacagcctagcacaattgaggagccacaaggaaacaaccaagcacatactctttcccatttgtcaaacttaatgcaagcaaatcctttgagcaccagcagcctattggggtcaaatcaaaatcatgcaactcttcatggcttagagtttgatttaccgccttatctgggagcaaaatataacgcaggctcaactacaaatcctagaccacccatatccatgcagcaggaggcactgaaagcaggggttttctccaacgcccagtctacacagagtcttccaagtactagcattcagacggggcttcctctgccacagcaattagcacatcacccttactctcagccaactttaccaatcacacattttccaaatatggttgggtatccgtatttgccacaaaactatgctacttacctatcttcaggcaccttccagcaagcatacccgagtagcggaccattccatcagtctgctgctgctgctttgctggcatctggtatgaagtactcgactccagagtataagaacaacctgtctgccacaggcttacaacagcaacatcagccacaaccacaaccactttcatcagtcatctctggttatggaggctttggaagctcaagtaatatacaaggaaattttacccttagtcagagtaccggctctgcatcagctcttgggtttgatgaagcattgagcagacagtacaaaaacaccagtcaatacatggctctccagcagggcgacaactctggaatgtgggttcatggctctggttcaagagcggcctcgacgcttccgcctaaccacttctatggttaccagggacagagtcagctgggtggctttgctcgggcgcagcagccacagccttcccaatttggaggccatgggtacccaactgtctaccagtctcagggacaggagcacccccagaaccttgctgagggcagcctgaacggcttccaggtcacaccgtctcagccatctcatccgagctggcagcatcagcacacgtactgagccctcctgtactccctggttagggtggctcttgtgctgtcacaagccaagtttcgcgtgcttgtgccctcactcgatgcagagtatgctgctcggattcagtgagcgctgagagggtcccaggcatacaacagttagagcgttttaacatgttgcgtgtgttgccagactgatgcattgcggtttgttttcgatagtgagttatatgtgcggaggcgcagtcctgtataactgagacatgataacctaacaagcagtcgtttctgtttcccaagagttggctgctcttagcttgagctgatgattgactgtttgcttgcagttttggtcatgattttactgcttcaaaaacatttccaattccaccatattggcatcgcgtgaggttagcacaggcaacatttcatcatctgacagggagtgtccatatgtgacacgaatgttcacttcgtcgatgaattgatgatgatccgtatgactactctacgccaagcggaacgattatatcgacatgtactatgtcgagtgcatctggctctgtcgttgtgtatttatctcttgctcaagctcaatatgtaataggtttttggatcaatttcgttttagttagtattctctatatgtttatatctcacattatctatttctgg

SEQ ID NO: 207559 - DNA, 2027 bp, Zea Mays
ttgttgacagcagagtagcagaccaaagttaacaacataatctcacagttatacatagcaggaaaggaacaaaaaagtggcagtcatccaaactttcaggaatttaatatgtactacatagcaataaatataaaataatctcaaccattgaaacaataccaaaatttgagataaaccctctaatagcaaatatattggtaatatgtttggcagctcctataatgctaacctctttctttggtgctgaccaaaatgtatctcacagaaacgccaaagtctaaacctaaaacaagtgttatgaaatactccgtattattaacattaaacaactactgctagcactagcacaaaatgaactagtgcagcttgttgagatcaatttggtgaataacataaagaatccatcaaagttaaattttctagtatcgtcagttcatcacctcagcactagtatgaactgtaaggacactagagtttggaacaaaaccgacgaagtacctaggactaatggtgctgcaatcaaggcaccaaattagtgaagcacagtatggtatccactccatctactcgattagttctgcaaagcagcagggaccagaaatctgttgctaaatccacaagctgctaaagccttcgaccaagctttgaagagtagcaaagccgattcagtgaagcgagacgagaccttggaggagggcgcggcgcggcgcatccccgcggaggttgcggagggagaagagcgcccggaagcgctccgcgatgggctgctccgtgttcagcagccgctcgcagaggaaccgctccatctccggggacgactcgaacgcggaggtggccgtcatctcacgcgggcgactccgtacggttcacacgctccggtcggcaaggtggtcactgggggcggcggcggcgaaggaaatcccgcctctcggaaagaaaaagaaaaggagaagacgagggacgagctcgcgtcgagtcgacgccgaccgtccgatcggaacgcgccacgtcacctctccaaacggacggacgacagcgaccagaggctcctcttgtcttgatgccggtgggtcccaatggctttacccagattctggcccacatggcagttacacgctacgtgtgtaatctcgcgtcggcgaagcgcgtagcattccttttcctcctcccctttgcggcttctcgcagcgctgcgaatcccaatccgcaccgatccgacgcgaatcgatcgagaggcagggggcagcactaatcgaatcgagactagcgccatgaacccgagaggccatcgtagcaacagaacttctctcttcgatggcattgaggagggtggaatccgagcaacatcctattcttctcatgagatagatgagcaagaaaatgatggagctattgatggactgcaggatcgtgtcagcattctcaagcggttgtcaggcgatatccatgaagaggtggagactcataacagaatgctggaccgaatggggaacgatatggatacttcaaggggttttctgtctgggaccgtggacaaattcaagatggtatttgagaccaaatcaagccggaggatgggaaccctcgtcgcatcattcgtcgccctttttctgctggtttactacttgaccaggtagaagacatgacatgctggaaatggtcatctcatcatctgcgtgccgtgccgtatagatagataccttgaaaacccaccgtcctgagtgccaaagtatatgttgatgtgggtgtttcgtcaactctgcactgtacaacacgactacagcgtgcgtgctgggtcgatcctatgttctcttgttgcgggattcaagtttgttgtccgttccttccctttggcatgtcatgtgtatggtatttagtagcataacaacaacaaaaaaactgtataaagaagctttgattgagcactatgtgaggtcgacacgtgtcccgcagcatctggcaaaacgaatccagatgcaaggaatgataatgaatcataaccaacgcagtgatcaaggatgcaatta

SEQ ID NO: 207560 - DNA, 2415 bp, Zea Mays
aggagactccatcatcacgagtgaggcggaggagtcgaccctgccccttcttcttcctctccatgccgcgccttcacagggagatcaacggccagtagagcttctcttacgcccgaccaagcccgcggtggtgcctcgtcggcgtatggacatctcttgccccggcgcgctaccttcaaggagaacggtgctacacatacatgagaacatggcgaacaagttcaagggaatattaccacggattgtcgctcaggtgacgccggccacggcgaggagtggcaccgcgggggagtgggaactccaacgaggaattctcgaggtttcgctgaccccaaagctcgaagatgcctcgcacagggaagaaagtcctggtgccggggtccacctgccagcgagagggcttcccagcgtgagcccatgcagggagaccggccaatggtcctgcgacccagttgtcggtgccaggacagggtgtggcaacgtgcgggttgagaccgacacgaggggcccacaactaaacaacggtgaaagactgaaagactatgaacaatttacttgcaatggatctgtcgatatcagaggttacccagcgtccaaacggcatacggggaactggagagcctgctactcaattcttgggggtgaattttgtggcgctatggcctactacggagttgggacaaacctggtgagctacttgaccaaggcgcagaagaaaagcaatgtcgctgcagcgagcaacatcgcttcctggcagggaacatgctacctgactgccctcctcggagctttcctggcagattcatatctgggaaggcaccggacaatcgtggtgtccctaatggtagttaccatgggagtgctcctactgacactttcagcaaccataccagcaagcattcatgtaatggcgacggcgacctcaaactctcaggaagccttgtcttctctgggcctcttcctgaccgctctgggtttgggtgggatctggccttgtgtccccacgtttggagccgatcagttcgacgacaccgacgcggccgagaaggagcagaagcagctctactacaactggtactacttcgctgtcaacggaggcttcttgttcgcgagcacggtcctcgtgtgggtgcaggacgaccatggctggggctggggttttggcatccctgctgcggtttccgcggtcggagtcgctggattccttgcctgcatgaagctgtacaggtaccagaaaccaggaggcagcgcgttgactaggatctgccaggttgtggtggcagccgcccgcaaggtgaacgtggatgtgccgacggacagctctcttctgcatgagatgccgccgggggaggagtcggcgattgtcgggagccggaagctgatgcacactgatggactaaagttctttgatcgagctgctaccatcaccacctctgaagacaaatctaccgatgcaactaacccgtggaagctttgcacggtgacccaagtggaggagctcaagatcctggcaagaatgcttcctgtctttctgacaggcatagtcttcaacaccgctgaagctttcttcccgttgttcatagagcaaggacaggtcatggacaaccacatcatcgagcagctctggataccttcagccactctgacgaccttcaactgcctctgcatcatcatcctggcaccagcgtatgacaaagttgtgatgcccgtggtgagtaggatcaccggcatgaagcgagggctgtccgagctgcaacgcatcggcgtcggcatggtcttcgccatgttttcgatggtttcggcagcactagttgagacggtgcgccttgacaccgccaagaacaggctcctgatgagtatcctgtggcaggctccgcagtacatgtttgtcggagtagccaaggttttcagcatagttggttttatcgagttcgcttatgaacagtcgccggacgccatgaggagcttgtgccaggcttgctccctcctcatggttacgcttggaagctaccttgtctctatcatgttaaagatgatcgattcagtgacagccggaagggggagccatggctggatacctgaggacctcaacgaagggcgtcttgatctgctcttctggttgatggctgtactgcacttgctgaacctgcttgcattcgcatattgcgctgcgaggtacaagtgcaaactagctacttgaatttcttctcatacttagaggatgggaggagagtgcctaagtaaagttggtgagaatttacaatttgtaattatctatttgctagcagctcatgttttggaagttctcttattaaatctttagtgcagtattggaacatgttgttcggtaaaaggatggaaacaatgtataattaatccctcatcttgtgatttgtgatgaattacaacgagcat

SEQ ID NO: 207561 - DNA, 1424 bp, Zea Mays
ccggactggccatcccttttcccgcaactgaaaagaaaatgcaacagaaaaaatgacacgatcgcaggagaaaccaaagaaaagttcctttttctttattttcttcgtcctcttgttctcgactcgctgcccactgcgtcacccgaatcccttcgatccaatctccaaaccctaggcagcccgccatcagattgttaggtcctccttccttaaaccgcggcggccggccatgtcccacggcggcggcggcgggagggcgaaagtgacgccgaacctggcggtggacggcgagggcacgcggacgctcaatctcaccgtgctgcagcgcctcgaccacgccgttgaggacatcctcatcaccgcggctcacgtcacgctctacgacttcgacaccgacatcaaccagtggagccggaaggacgtggaggggtcgctctttgtcgtcaagaggaatgctcaacccagattccagttcattgtcatgaatcgcaggaatacagataatctagttgaagatcttttgggagattttgaataccaactacaagctccttatataatgtaccgcaatgctgctcaagaagttataggaatctggttttacaattcccaggagtgtcaacaggttgcaaatcttttcagcaggattctgaatgctttctcaaaggtggcaccaaagccgaaaattccttctgtccaaagtgaatttgaagagctggaagcagcaccttcgttggttgatggtcctctggaagcgcaaacgtcaaatatcatgtcaactactactcacgttcaagaggatcctttatctgcatttttcagtgcagctgcaaatgttggtggcaactctgctgtagctgttgcaaggcaaccaattcagccttttggtgctactccggtggctgcacatgcagctactagtatcactacaacacaatcgccaggcttgcattatttgcttccttcacaagcctcatcggtttctgggaggcctgctgatgctcatggtggcactggttctataggaaggtccacaagccttgtatatccgtcacttttctcaccattgacatcttcacagacgaaaatggtgcacactaattctgcagtaccaactgctccacctcaacatcctcggattgctcagcagccgcaaagtgctcccttgcttcagccttttccgttacctacggcttcatctccaccatatgggactccattacttcaaccgtttccgccacctaatccgtcgccatctcttgcatctgcaccagtcttgagcccagcgctgactagagacaaagtcagagatgcattattgagacttgtggagaatgatgaattcgtcgatttagtctaccgcgagatcatgaacagacagtaatggatttacaagcttttctagaggagccaaaatcattatt

SEQ ID NO: 207562 - DNA, 2974 bp, Zea Mays
ttctctcgcgtcgttctcccgtagtcccgtgccctcgcgtgcgctctatctgtttctggtggcgacgacttggcggtccccgctgccgccgtgcccaggcctctacttcgggaccttcaccggcgacgagcacccatcgggttgcttcgcaaaacttccaacatccaggatacaattaattacgattccttcaactttatctcgatttataggaggttgcacagagcccatccaacagggtgtctcagacatactgatggatggggtgcccaatatccttgagaaatcatcacatgaatgcatgtactcttggtacttcaccagggaagaactagagaaattttctccatcaaggaaagatggtattactgaaaacaaggaatcagaaattcggcatttatattgttcatttatccgggatgttggcatcaggctgaagctacctcagatgacactagcaacagcagtcatgctttgccatcgcttctatttacaccagtcccttgccaaaaatggatggcaggtgagagattatattgttgtgccagtgatggttgctgatgtctatgaaaagcgacaagagtgcagagtttcattgccaagcatttgttggaaatatgttctccaccatgtctaacttaacattacagattaaccccgaccagccaactgggttgcaacttactgttacaacttaagcaagtttgacatactttgacggatcatcttgtaaattacatattcaccaacagttgcaacagtatgtgtatttctggcgtcgaaagttgaagatactccttgtcccctggaccatgtagttagagtggcctatgaaacaatgtataggcgggacactgctgcggctcaaaggatccgtcagaaggatgtttttgagaagcagaaagcgctcattttgatcggagagagattgcttcttacaactattcgatttgatttcaacattcagcatccttatagaccacttcttgatgccatgcaaaatcttggcatcaatcaaaaagaagtgaaacaagtagcatggaactttgtgaatgactggcttaaaacaacattgtgtctacagtataaaccccagtacatagctgctggttccctttatctggctgcaaagcttcacaatatcaagcttcccttgcatggagcgcatgtttggtggcaccaatttgatgttgcaccaaagcctctggaagccgtcattcatcaaatgatggagcttgcggctttgaaaaagttgatgcctgctcgacccaatccggttaagctgaaggaaactttatgtgaagctaaactgagcttatctaatagcccagactctgtgttgaatcaatcaaacttgttaataagcagctcaagtcctgatattggcgagcccagtgacaaagtgcaggtggattcctgccaatacttgataagcagtcacatgggtgattgtagggtctcaggtcctgacagcagttcgttgaatacttgtgctaatagaaatgtctcttgtaaagcacatgatgaagagagcttggatcaggccttaataatcaaacatgacagtgggatgatgccttctagtaatcagacatcattatatgctactgtaggcactgagggcagtgctgaactgaagcaggatgtaagccattgtaatgacttcaatatcagagtcaatgacgaaagcttgaaccaggtgttaagaaatcagcatggtgatgctatcccattacctgacgtggtatcgctggatgccaaggtggacaaggaaaggagttggtgtgtggaaccattaattgcaaactctgattgctgtactgacagtgttaatgtggatagcttgtgcactgatcagagattggctgatgctccttcaggccccacagctgatgcaccatccatgctggccgaggaggaatcttatccttttagtgcaaagcttgaaaatattgatgttgccaggatcaaaggtttattgatgaagaggaagagccggagagagatccaagaccgagccattgcttcagatggtctaagtgaagaagactggatcgagagggagcttgaatctgggattgttacaaaccaagaagccaattgtgctgccatctcagacgagctaagtgacgaagcctggattgagagagaactcgagtcagggattgtggtcggaccaagaaatgagcaagcgatcacttttgatggtttgagtgaagatgattggatcgagagagagctggagtctgggatcatcgttgagccagcacctgctaccaagaagcggaagctggagtcaagctgttagctctgcattcgaaggccagattccaagcaggtgaataataacagatggttgcgagtaggaccacatcgaagccaagagatacatgtcgcacagatgggaggatcaatattatcctttttttatttctttataaccaaacaccttggagtactttgacacaaggggtgtgttcacagtgggatctccccagtttcttgaatgcagaaccgtatccgttgtatttgttccttcttgtcgtgagtgtaaatctagcgtgtccgaagttcggttttagattgtaggtgtaactgtagcagggattatctggtgttaagcccaacgagaaaatgattcagtgtaactgttactgtaaggaaagaagttattcagtgtagatttatggttaacacaagaagaggcaattactggtgtatgatgtttataaattgatgatgaatgttactggcagctcaaaagaaaagacagttactggtaactaaagaaaagtacgtttaacggagctgatcacattcaatcccctattgagctgcccttggtcgtcaattgtataacaactttctgcgtgaccatcaaaaaatttctcatggtatatatcttgtggagctaaaatcctcttattttttaatggcaatggaatttcagtccctctaaccctctctgtatctt

SEQ ID NO: 207563 - DNA, 2654 bp, Zea Mays
ttctctcgcgtcgttctcccgtagtcccgtgccctcgcgtgcgctctatctgtttctggtggcgacgacttggcggtccccgctgccgccgtgcccaggcctctacttcgggaccttcaccggcgacgagcacccatcggacctcagatgacactagcaacagcagtcatgctttgccatcgcttctatttacaccagtcccttgccaaaaatggatggcaggtgagagattatattgttgtgccagtgatggttgctgatgtctatgaaaagcgacaagagtgcagagtttcattgccaagcatttgttggaaatatgttctccaccatgtctaacttaacattacagatgggttgcaacttactgttacaacttaagcaagtttgacatactttgacggatcatcttgtaaattacatattcaccaacagttgcaacagtatgtgtatttctggcgtcgaaagttgaagatactccttgtcccctggaccatgtagttagagtggcctatgaaacaatgtataggcgggacactgctgcggctcaaaggatccgtcagaaggatgtttttgagaagcagaaagcgctcattttgatcggagagagattgcttcttacaactattcgatttgatttcaacattcagcatccttatagaccacttcttgatgccatgcaaaatcttggcatcaatcaaaaagaagtgaaacaagtagcatggaactttgtgaatgactggcttaaaacaacattgtgtctacagtataaaccccagtacatagctgctggttccctttatctggctgcaaagcttcacaatatcaagcttcccttgcatggagcgcatgtttggtggcaccaatttgatgttgcaccaaagcctctggaagccgtcattcatcaaatgatggagcttgcggctttgaaaaagttgatgcctgctcgacccaatccggttaagctgaaggaaactttatgtgaagctaaactgagcttatctaatagcccagactctgtgttgaatcaatcaaacttgttaataagcagctcaagtcctgatattggcgagcccagtgacaaagtgcaggtggattcctgccaatacttgataagcagtcacatgggtgattgtagggtctcaggtcctgacagcagttcgttgaatacttgtgctaatagaaatgtctcttgtaaagcacatgatgaagagagcttggatcaggccttaataatcaaacatgacagtgggatgatgccttctagtaatcagacatcattatatgctactgtaggcactgagggcagtgctgaactgaagcaggatgtaagccattgtaatgacttcaatatcagagtcaatgacgaaagcttgaaccaggtgttaagaaatcagcatggtgatgctatcccattacctgacgtggtatcgctggatgccaaggtggacaaggaaaggagttggtgtgtggaaccattaattgcaaactctgattgctgtactgacagtgttaatgtggatagcttgtgcactgatcagagattggctgatgctccttcaggccccacagctgatgcaccatccatgctggccgaggaggaatcttatccttttagtgcaaagcttgaaaatattgatgttgccaggatcaaaggtttattgatgaagaggaagagccggagagagatccaagaccgagccattgcttcagatggtctaagtgaagaagactggatcgagagggagcttgaatctgggattgttacaaaccaagaagccaattgtgctgccatctcagacgagctaagtgacgaagcctggattgagagagaactcgagtcagggattgtggtcggaccaagaaatgagcaagcgatcacttttgatggtttgagtgaagatgattggatcgagagagagctggagtctgggatcatcgttgagccagcacctgctaccaagaagcggaagctggagtcaagctgttagctctgcattcgaaggccagattccaagcaggtgaataataacagatggttgcgagtaggaccacatcgaagccaagagatacatgtcgcacagatgggaggatcaatattatcctttttttatttctttataaccaaacaccttggagtactttgacacaaggggtgtgttcacagtgggatctccccagtttcttgaatgcagaaccgtatccgttgtatttgttccttcttgtcgtgagtgtaaatctagcgtgtccgaagttcggttttagattgtaggtgtaactgtagcagggattatctggtgttaagcccaacgagaaaatgattcagtgtaactgttactgtaaggaaagaagttattcagtgtagatttatggttaacacaagaagaggcaattactggtgtatgatgtttataaattgatgatgaatgttactggcagctcaaaagaaaagacagttactggtaactaaagaaaagtacgtttaacggagctgatcacattcaatcccctattgagctgcccttggtcgtcaattgtataacaactttctgcgtgaccatcaaaaaatttctcatggtatatatcttgtggagctaaaatcctcttattttttaatggcaatggaatttcagtccctctaaccctctctgtatctt

SEQ ID NO: 207564 - DNA, 4213 bp, Zea Mays
gttctctcgcgtcgttctcccgtagtcccgtgccctcgcgtgcgctctatctgtttctggtggcgacgacttggcggtccccgctgccgccgtgcccaggcctctacttcgggaccttcaccggcgacgagcacccatcgggttgcttcgcaaaacttccaacatccaggatacaattaattacgattccttcaactttatctcgatttataggaggttgcacagagcccatccaacagggtgtctcagacatactgatggatggggtgcccaatatccttgagaaatcatcacatgaatgcatgtactcttggtacttcaccagggaagaactagagaaattttctccatcaaggaaagatggtattactgaaaacaaggaatcagaaattcggcatttatattgttcatttatccgggatgttggcatcaggctgaagctacctcagatgacactagcaacagcagtcatgctttgccatcgcttctatttacaccagtcccttgccaaaaatggatggcaggtgagagattatattgttgtgccagtgatggttgctgatgtctatgaaaagcgacaagagtgcagagtttcattgccaagcatttgttggaaatatgttctccaccatgtctaacttaacattacagaatatccttcaaaccatttgaagtattttatcttgtaataatattactgtattagttttctgattacatgctaattgctgattcatcttgatgctactctacctcaagagtcatgatcacttcgtgattggacatttcaaagggatcatttacctgctacaatgtgtcaagggcaccagggctcagagtagctggaccttgactactggacctcgactacatagttcgtagtcatggccgggaatggggtgaaggtttctcccctctgcaccctatgttgagggaggagattagcagtagaaagtttaatcattgcttaatcgtcaagtgttccaatacaagatgtaaataggcacgtagcctctaacgaacaatagatggaaaagctcctcaaattgaggcaccgtagtttcctaccaactaaactatgcaggcctgacactagctgcagtgatcatgcctacagcgcgtttgacacgcgctgcgtgttcttggcggcatctctggcatgggtctggtgcgtgtaccagggattaccttcccggtcggtaaccagcaaatttcggtagtttttctcgttttcgatgtctaccgagaaatgaaaaccggtgtgattttttatgtatttcgatttcaaatttgaaaatataatagtcaaattttggtcaacaaaacggtttttgaaatcacgaaacgagaatgtaatccctggcgtgtactggtggccccacatgacacatgttattggaaaacttctttttagaacttttaagtcctgattgacttctcctagtatactaaaaagttttgaggtagttaagagttattttcagtttacctaggaagtttgtgtttgtcagatatgatactattgtgattaagtacaatacttcgtcataactgggcaaatgcattcagaactttcctattgaagttacttaaccccgaccagccaactgggttgcaacttactgttacaacttaagcaagtttgacatactttgacggatcatcttgtaaattacatattcaccagtaagttttatagaaatggcttacttcactgcatttcttttcttagttttgtaagatctgtttagttcatatttacaagatcacttttccagaaatcatctcactgttatcatgcaacccctagttatgtcgaacaccagtagtaatttctgttttattctgtatgttcgtaatatttactctgtttcaagtacataatctatttgtggtatgcttattgtggaccagtagttcttctggaacttacttttatttccttttactggttttaatggttccttttgtcattaccctatttcagacagttgcaacagtatgtgtatttctggcgtcgaaagttgaagatactccttgtcccctggaccatgtagttagagtggcctatgaaacaatgtataggcgggacactgctgcggctcaaaggatccgtcagaaggatgtttttgagaagcagaaagcgctcattttgatcggagagagattgcttcttacaactattcgatttgatttcaacattcagcatccttatagaccacttcttgatgccatgcaaaatcttggcatcaatcaaaaagaagtgaaacaagtagcatggaactttgtgaatgactggcttaaaacaacattgtgtctacagtataaaccccagtacatagctgctggttccctttatctggctgcaaagcttcacaatatcaagcttcccttgcatggagcgcatgtttggtggcaccaatttgatgttgcaccaaagcctctggaagccgtcattcatcaaatgatggagcttgcggctttgaaaaagttgatgcctgctcgacccaatccggttaagctgaaggaaactttatgtgaagctaaactgagcttatctaatagcccagactctgtgttgaatcaatcaaacttgttaataagcagctcaagtcctgatattggcgagcccagtgacaaagtgcaggtggattcctgccaatacttgataagcagtcacatgggtgattgtagggtctcaggtcctgacagcagttcgttgaatacttgtgctaatagaaatgtctcttgtaaagcacatgatgaagagagcttggatcaggccttaataatcaaacatgacagtgggatgatgccttctagtaatcagacatcattatatgctactgtaggcactgagggcagtgctgaactgaagcaggatgtaagccattgtaatgacttcaatatcagagtcaatgacgaaagcttgaaccaggtgttaagaaatcagcatggtgatgctatcccattacctgacgtggtatcgctggatgccaaggtggacaaggaaaggagttggtgtgtggaaccattaattgcaaactctgattgctgtactgacagtgttaatgtggatagcttgtgcactgatcagagattggctgatgctccttcaggccccacagctgatgcaccatccatgctggccgaggaggaatcttatccttttagtgcaaagcttgaaaatattgatgttgccaggatcaaaggtttattgatgaagaggaagagccggagagagatccaagaccgagccattgcttcagatggtctaagtgaagaagactggatcgagagggagcttgaatctgggattgttacaaaccaagaagccaattgtgctgccatctcagacgagctaagtgacgaagcctggattgagagagaactcgagtcagggattgtggtcggaccaagaaatgagcaagcgatcacttttgatggtttgagtgaagatgattggatcgagagagagctggagtctgggatcatcgttgagccagcacctgctaccaagaagcggaagctggagtcaagctgttagctctgcattcgaaggccagattccaagcaggtgaataataacagatggttgcgagtaggaccacatcgaagccaagagatacatgtcgcacagatgggaggatcaatattatcctttttttatttctttataaccaaacaccttggagtactttgacacaaggggtgtgttcacagtgggatctccccagtttcttgaatgcagaaccgtatccgttgtatttgttccttcttgtcgtgagtgtaaatctagcgtgtccgaagttcggttttagattgtaggtgtaactgtagcagggattatctggtgttaagcccaacgagaaaatgattcagtgtaactgttactgtaaggaaagaagttattcagtgtagatttatggttaacacaagaagaggcaattactggtgtatgatgtttataaattgatgatgaatgttactggcagctcaaaagaaaagacagttactggtaactaaagaaaagtacgtttaacggagctgatcacattcaatcccctattgagctgcccttggtcgtcaattgtataacaactttctgcgtgaccatcaaaaaatttctcatggtatatatcttgtggagctaaaatcctcttattttttaatggcaatggaatttcagtccctctaaccctctctgtatctt

SEQ ID NO: 207565 - DNA, 2649 bp, Zea Mays
cttgcttctgttctctcgcgtcgttctcccgtagtcccgtgccctcgcgtgcgctctatctgtttctggtggcgacgacttggcggtccccgctgccgccgtgcccaggcctctacttcgggaccttcaccggcgacgagcacccatcggacctcagatgacactagcaacagcagtcatgctttgccatcgcttctatttacaccagtcccttgccaaaaatggatggcaggtgagagattatattgttgtgccagtgatggttgctgatgtctatgaaaagcgacaagagtgcagagtttcattgccaagcatttgttggaaatatgttctccaccatgtctaacttaacattacagatgttacaacttaagcaagtttgacatactttgacggatcatcttgtaaattacatattcaccaacagttgcaacagtatgtgtatttctggcgtcgaaagttgaagatactccttgtcccctggaccatgtagttagagtggcctatgaaacaatgtataggcgggacactgctgcggctcaaaggatccgtcagaaggatgtttttgagaagcagaaagcgctcattttgatcggagagagattgcttcttacaactattcgatttgatttcaacattcagcatccttatagaccacttcttgatgccatgcaaaatcttggcatcaatcaaaaagaagtgaaacaagtagcatggaactttgtgaatgactggcttaaaacaacattgtgtctacagtataaaccccagtacatagctgctggttccctttatctggctgcaaagcttcacaatatcaagcttcccttgcatggagcgcatgtttggtggcaccaatttgatgttgcaccaaagcctctggaagccgtcattcatcaaatgatggagcttgcggctttgaaaaagttgatgcctgctcgacccaatccggttaagctgaaggaaactttatgtgaagctaaactgagcttatctaatagcccagactctgtgttgaatcaatcaaacttgttaataagcagctcaagtcctgatattggcgagcccagtgacaaagtgcaggtggattcctgccaatacttgataagcagtcacatgggtgattgtagggtctcaggtcctgacagcagttcgttgaatacttgtgctaatagaaatgtctcttgtaaagcacatgatgaagagagcttggatcaggccttaataatcaaacatgacagtgggatgatgccttctagtaatcagacatcattatatgctactgtaggcactgagggcagtgctgaactgaagcaggatgtaagccattgtaatgacttcaatatcagagtcaatgacgaaagcttgaaccaggtgttaagaaatcagcatggtgatgctatcccattacctgacgtggtatcgctggatgccaaggtggacaaggaaaggagttggtgtgtggaaccattaattgcaaactctgattgctgtactgacagtgttaatgtggatagcttgtgcactgatcagagattggctgatgctccttcaggccccacagctgatgcaccatccatgctggccgaggaggaatcttatccttttagtgcaaagcttgaaaatattgatgttgccaggatcaaaggtttattgatgaagaggaagagccggagagagatccaagaccgagccattgcttcagatggtctaagtgaagaagactggatcgagagggagcttgaatctgggattgttacaaaccaagaagccaattgtgctgccatctcagacgagctaagtgacgaagcctggattgagagagaactcgagtcagggattgtggtcggaccaagaaatgagcaagcgatcacttttgatggtttgagtgaagatgattggatcgagagagagctggagtctgggatcatcgttgagccagcacctgctaccaagaagcggaagctggagtcaagctgttagctctgcattcgaaggccagattccaagcaggtgaataataacagatggttgcgagtaggaccacatcgaagccaagagatacatgtcgcacagatgggaggatcaatattatcctttttttatttctttataaccaaacaccttggagtactttgacacaaggggtgtgttcacagtgggatctccccagtttcttgaatgcagaaccgtatccgttgtatttgttccttcttgtcgtgagtgtaaatctagcgtgtccgaagttcggttttagattgtaggtgtaactgtagcagggattatctggtgttaagcccaacgagaaaatgattcagtgtaactgttactgtaaggaaagaagttattcagtgtagatttatggttaacacaagaagaggcaattactggtgtatgatgtttataaattgatgatgaatgttactggcagctcaaaagaaaagacagttactggtaactaaagaaaagtacgtttaacggagctgatcacattcaatcccctattgagctgcccttggtcgtcaattgtataacaactttctgcgtgaccatcaaaaaatttctcatggtatatatcttgtggagctaaaatcctcttattttttaatggcaatggaatttcagtccctctaaccctctctgtatctt

SEQ ID NO: 207566 - DNA, 2965 bp, Zea Mays
cttgcttctgttctctcgcgtcgttctcccgtagtcccgtgccctcgcgtgcgctctatctgtttctggtggcgacgacttggcggtccccgctgccgccgtgcccaggcctctacttcgggaccttcaccggcgacgagcacccatcgggttgcttcgcaaaacttccaacatccaggatacaattaattacgattccttcaactttatctcgatttataggaggttgcacagagcccatccaacagggtgtctcagacatactgatggatggggtgcccaatatccttgagaaatcatcacatgaatgcatgtactcttggtacttcaccagggaagaactagagaaattttctccatcaaggaaagatggtattactgaaaacaaggaatcagaaattcggcatttatattgttcatttatccgggatgttggcatcaggctgaagctacctcagatgacactagcaacagcagtcatgctttgccatcgcttctatttacaccagtcccttgccaaaaatggatggcaggtgagagattatattgttgtgccagtgatggttgctgatgtctatgaaaagcgacaagagtgcagagtttcattgccaagcatttgttggaaatatgttctccaccatgtctaacttaacattacagatgggttgcaacttactgttacaacttaagcaagtttgacatactttgacggatcatcttgtaaattacatattcaccaacagttgcaacagtatgtgtatttctggcgtcgaaagttgaagatactccttgtcccctggaccatgtagttagagtggcctatgaaacaatgtataggcgggacactgctgcggctcaaaggatccgtcagaaggatgtttttgagaagcagaaagcgctcattttgatcggagagagattgcttcttacaactattcgatttgatttcaacattcagcatccttatagaccacttcttgatgccatgcaaaatcttggcatcaatcaaaaagaagtgaaacaagtagcatggaactttgtgaatgactggcttaaaacaacattgtgtctacagtataaaccccagtacatagctgctggttccctttatctggctgcaaagcttcacaatatcaagcttcccttgcatggagcgcatgtttggtggcaccaatttgatgttgcaccaaagcctctggaagccgtcattcatcaaatgatggagcttgcggctttgaaaaagttgatgcctgctcgacccaatccggttaagctgaaggaaactttatgtgaagctaaactgagcttatctaatagcccagactctgtgttgaatcaatcaaacttgttaataagcagctcaagtcctgatattggcgagcccagtgacaaagtgcaggtggattcctgccaatacttgataagcagtcacatgggtgattgtagggtctcaggtcctgacagcagttcgttgaatacttgtgctaatagaaatgtctcttgtaaagcacatgatgaagagagcttggatcaggccttaataatcaaacatgacagtgggatgatgccttctagtaatcagacatcattatatgctactgtaggcactgagggcagtgctgaactgaagcaggatgtaagccattgtaatgacttcaatatcagagtcaatgacgaaagcttgaaccaggtgttaagaaatcagcatggtgatgctatcccattacctgacgtggtatcgctggatgccaaggtggacaaggaaaggagttggtgtgtggaaccattaattgcaaactctgattgctgtactgacagtgttaatgtggatagcttgtgcactgatcagagattggctgatgctccttcaggccccacagctgatgcaccatccatgctggccgaggaggaatcttatccttttagtgcaaagcttgaaaatattgatgttgccaggatcaaaggtttattgatgaagaggaagagccggagagagatccaagaccgagccattgcttcagatggtctaagtgaagaagactggatcgagagggagcttgaatctgggattgttacaaaccaagaagccaattgtgctgccatctcagacgagctaagtgacgaagcctggattgagagagaactcgagtcagggattgtggtcggaccaagaaatgagcaagcgatcacttttgatggtttgagtgaagatgattggatcgagagagagctggagtctgggatcatcgttgagccagcacctgctaccaagaagcggaagctggagtcaagctgttagctctgcattcgaaggccagattccaagcaggtgaataataacagatggttgcgagtaggaccacatcgaagccaagagatacatgtcgcacagatgggaggatcaatattatcctttttttatttctttataaccaaacaccttggagtactttgacacaaggggtgtgttcacagtgggatctccccagtttcttgaatgcagaaccgtatccgttgtatttgttccttcttgtcgtgagtgtaaatctagcgtgtccgaagttcggttttagattgtaggtgtaactgtagcagggattatctggtgttaagcccaacgagaaaatgattcagtgtaactgttactgtaaggaaagaagttattcagtgtagatttatggttaacacaagaagaggcaattactggtgtatgatgtttataaattgatgatgaatgttactggcagctcaaaagaaaagacagttactggtaactaaagaaaagtacgtttaacggagctgatcacattcaatcccctattgagctgcccttggtcgtcaattgtataacaactttctgcgtgaccatcaaaaaatttctcatggtatatatcttgtggagctaaaatcctcttattttttaatggcaatggaatttcagtccctctaaccctctctgtatctt

SEQ ID NO: 207567 - DNA, 2774 bp, Zea Mays
cttgcttctgttctctcgcgtcgttctcccgtagtcccgtgccctcgcgtgcgctctatctgtttctggtggcgacgacttggcggtccccgctgccgccgtgcccaggcctctacttcgggaccttcaccggcgacgagcacccatcgggttgcttcgcaaaacttccaacatccaggatacaattaattacgattccttcaactttatctcgatttataggaggttgcacagagcccatccaacagggtgtctcagacatactgatggatggggtgcccaatatccttgagaaatcatcacatgaatgcatgtactcttggtacttcaccagggaagaactagagaaattttctccatcaaggaaagatggtattactgaaaacaaggaatcagaaattcggcatttatattgttcatttatccgggatgttggcatcaggctgaagctacctcagatgacactagcaacagcagtcatgctttgccatcgcttctatttacaccagtcccttgccaaaaatggatggcaggtgagagattatattgttgtgccagtgatggttgctgatgtctatgaaaagcgacaagagtgcagagtttcattgccaagcatttgttggaaatatgttctccaccatgtctaacttaacattacagatgttacaacttaagcaagtttgacatactttgacggatcatcttgtaaattacatattcaccaacagttgcaacagtatgtgtatttctggcgtcgaaagttgaagatactccttgtcccctggaccatgtagttagagtggcctatgaaacaatgtataggcgggacactgctgcggctcaaaggatccgtcagaaggcttaaaacaacattgtgtctacagtataaaccccagtacatagctgctggttccctttatctggctgcaaagcttcacaatatcaagcttcccttgcatggagcgcatgtttggtggcaccaatttgatgttgcaccaaagcctctggaagccgtcattcatcaaatgatggagcttgcggctttgaaaaagttgatgcctgctcgacccaatccggttaagctgaaggaaactttatgtgaagctaaactgagcttatctaatagcccagactctgtgttgaatcaatcaaacttgttaataagcagctcaagtcctgatattggcgagcccagtgacaaagtgcaggtggattcctgccaatacttgataagcagtcacatgggtgattgtagggtctcaggtcctgacagcagttcgttgaatacttgtgctaatagaaatgtctcttgtaaagcacatgatgaagagagcttggatcaggccttaataatcaaacatgacagtgggatgatgccttctagtaatcagacatcattatatgctactgtaggcactgagggcagtgctgaactgaagcaggatgtaagccattgtaatgacttcaatatcagagtcaatgacgaaagcttgaaccaggtgttaagaaatcagcatggtgatgctatcccattacctgacgtggtatcgctggatgccaaggtggacaaggaaaggagttggtgtgtggaaccattaattgcaaactctgattgctgtactgacagtgttaatgtggatagcttgtgcactgatcagagattggctgatgctccttcaggccccacagctgatgcaccatccatgctggccgaggaggaatcttatccttttagtgcaaagcttgaaaatattgatgttgccaggatcaaaggtttattgatgaagaggaagagccggagagagatccaagaccgagccattgcttcagatggtctaagtgaagaagactggatcgagagggagcttgaatctgggattgttacaaaccaagaagccaattgtgctgccatctcagacgagctaagtgacgaagcctggattgagagagaactcgagtcagggattgtggtcggaccaagaaatgagcaagcgatcacttttgatggtttgagtgaagatgattggatcgagagagagctggagtctgggatcatcgttgagccagcacctgctaccaagaagcggaagctggagtcaagctgttagctctgcattcgaaggccagattccaagcaggtgaataataacagatggttgcgagtaggaccacatcgaagccaagagatacatgtcgcacagatgggaggatcaatattatcctttttttatttctttataaccaaacaccttggagtactttgacacaaggggtgtgttcacagtgggatctccccagtttcttgaatgcagaaccgtatccgttgtatttgttccttcttgtcgtgagtgtaaatctagcgtgtccgaagttcggttttagattgtaggtgtaactgtagcagggattatctggtgttaagcccaacgagaaaatgattcagtgtaactgttactgtaaggaaagaagttattcagtgtagatttatggttaacacaagaagaggcaattactggtgtatgatgtttataaattgatgatgaatgttactggcagctcaaaagaaaagacagttactggtaactaaagaaaagtacgtttaacggagctgatcacattcaatcccctattgagctgcccttggtcgtcaattgtataacaactttctgcgtgaccatcaaaaaatttctcatggtatatatcttgtggagctaaaatcctcttattttttaatggcaatggaatttcagtccctctaaccctctctgtatctt

SEQ ID NO: 207568 - DNA, 2979 bp, Zea Mays
cttgcttctgttctctcgcgtcgttctcccgtagtcccgtgccctcgcgtgcgctctatctgtttctggtggcgacgacttggcggtccccgctgccgccgtgcccaggcctctacttcgggaccttcaccggcgacgagcacccatcgggttgcttcgcaaaacttccaacatccaggatacaattaattacgattccttcaactttatctcgatttataggaggttgcacagagcccatccaacagggtgtctcagacatactgatggatggggtgcccaatatccttgagaaatcatcacatgaatgcatgtactcttggtacttcaccagggaagaactagagaaattttctccatcaaggaaagatggtattactgaaaacaaggaatcagaaattcggcatttatattgttcatttatccgggatgttggcatcaggctgaagctacctcagatgacactagcaacagcagtcatgctttgccatcgcttctatttacaccagtcccttgccaaaaatggatggcaggtgagagattatattgttgtgccagtgatggttgctgatgtctatgaaaagcgacaagagtgcagagtttcattgccaagcatttgttggaaatatgttctccaccatgtctaacttaacattacagacccgaccagccaactgggttgcaacttactgttacaacttaagcaagtttgacatactttgacggatcatcttgtaaattacatattcaccaacagttgcaacagtatgtgtatttctggcgtcgaaagttgaagatactccttgtcccctggaccatgtagttagagtggcctatgaaacaatgtataggcgggacactgctgcggctcaaaggatccgtcagaaggatgtttttgagaagcagaaagcgctcattttgatcggagagagattgcttcttacaactattcgatttgatttcaacattcagcatccttatagaccacttcttgatgccatgcaaaatcttggcatcaatcaaaaagaagtgaaacaagtagcatggaactttgtgaatgactggcttaaaacaacattgtgtctacagtataaaccccagtacatagctgctggttccctttatctggctgcaaagcttcacaatatcaagcttcccttgcatggagcgcatgtttggtggcaccaatttgatgttgcaccaaagcctctggaagccgtcattcatcaaatgatggagcttgcggctttgaaaaagttgatgcctgctcgacccaatccggttaagctgaaggaaactttatgtgaagctaaactgagcttatctaatagcccagactctgtgttgaatcaatcaaacttgttaataagcagctcaagtcctgatattggcgagcccagtgacaaagtgcaggtggattcctgccaatacttgataagcagtcacatgggtgattgtagggtctcaggtcctgacagcagttcgttgaatacttgtgctaatagaaatgtctcttgtaaagcacatgatgaagagagcttggatcaggccttaataatcaaacatgacagtgggatgatgccttctagtaatcagacatcattatatgctactgtaggcactgagggcagtgctgaactgaagcaggatgtaagccattgtaatgacttcaatatcagagtcaatgacgaaagcttgaaccaggtgttaagaaatcagcatggtgatgctatcccattacctgacgtggtatcgctggatgccaaggtggacaaggaaaggagttggtgtgtggaaccattaattgcaaactctgattgctgtactgacagtgttaatgtggatagcttgtgcactgatcagagattggctgatgctccttcaggccccacagctgatgcaccatccatgctggccgaggaggaatcttatccttttagtgcaaagcttgaaaatattgatgttgccaggatcaaaggtttattgatgaagaggaagagccggagagagatccaagaccgagccattgcttcagatggtctaagtgaagaagactggatcgagagggagcttgaatctgggattgttacaaaccaagaagccaattgtgctgccatctcagacgagctaagtgacgaagcctggattgagagagaactcgagtcagggattgtggtcggaccaagaaatgagcaagcgatcacttttgatggtttgagtgaagatgattggatcgagagagagctggagtctgggatcatcgttgagccagcacctgctaccaagaagcggaagctggagtcaagctgttagctctgcattcgaaggccagattccaagcaggtgaataataacagatggttgcgagtaggaccacatcgaagccaagagatacatgtcgcacagatgggaggatcaatattatcctttttttatttctttataaccaaacaccttggagtactttgacacaaggggtgtgttcacagtgggatctccccagtttcttgaatgcagaaccgtatccgttgtatttgttccttcttgtcgtgagtgtaaatctagcgtgtccgaagttcggttttagattgtaggtgtaactgtagcagggattatctggtgttaagcccaacgagaaaatgattcagtgtaactgttactgtaaggaaagaagttattcagtgtagatttatggttaacacaagaagaggcaattactggtgtatgatgtttataaattgatgatgaatgttactggcagctcaaaagaaaagacagttactggtaactaaagaaaagtacgtttaacggagctgatcacattcaatcccctattgagctgcccttggtcgtcaattgtataacaactttctgcgtgaccatcaaaaaatttctcatggtatatatcttgtggagctaaaatcctcttattttttaatggcaatggaatttcagtccctctaaccctctctgtatctt

SEQ ID NO: 207569 - DNA, 3924 bp, Zea Mays
ggccttgcttctgttctctcgcgtcgttctcccgtagtcccgtgccctcgcgtgcgctctatctgtttctggtggcgacgacttggcggtccccgctgccgccgtgcccaggcctctacttcgggaccttcaccggcgacgagcacccatcgggttgcttcgcaaaacttccaacatccaggatacaattaattacgattccttcaactttatctcgatttataggaggttgcacagagcccatccaacagggtgtctcagacatactgatggatggggtgcccaatatccttgagaaatcatcacatgaatgcatgtactcttggtacttcaccagggaagaactagagaaattttctccatcaaggaaagatggtattactgaaaacaaggaatcagaaattcggcatttatattgttcatttatccgggatgttggcatcaggctgaagctacctcagatgacactagcaacagcagtcatgctttgccatcgcttctatttacaccagtcccttgccaaaaatggatggcaggtgagagattatattgttgtgccagtgatggttgctgatgtctatgaaaagcgacaagagtgcagagtttcattgccaagcatttgttggaaatatgttctccaccatgtctaacttaacattacagaatatccttcaaaccatttgaagtattttatcttgtaataatattactgtattagttttctgattacatgctaattgctgattcatcttgatgctactctacctcaagagtcatgatcacttcgtgattggacatttcaaagggatcatttacctgctacaatgtgtcaagggcaccagggctcagagtagctggaccttgactactggacctcgactacatagttcgtagtcatggccgggaatggggtgaaggtttctcccctctgcaccctatgttgagggaggagattagcagtagaaagtttaatcattgcttaatcgtcaagtgttccaatacaagatgtaaataggcacgtagcctctaacgaacaatagatggaaaagctcctcaaattgaggcaccgtagtttcctaccaactaaactatgcaggcctgacactagctgcagtgatcatgcctacagcgcgtttgacacgcgctgcgtgttcttggcggcatctctggcatgggtctggtgcgtgtaccagggattaccttcccggtcggtaaccagcaaatttcggtagtttttctcgttttcgatgtctaccgagaaatgaaaaccggtgtgattttttatgtatttcgatttcaaatttgaaaatataatagtcaaattttggtcaacaaaacggtttttgaaatcacgaaacgagaatgtaatccctggcgtgtactggtggccccacatgacacatgttattggaaaacttctttttagaacttttaagtcctgattgacttctcctagtatactaaaaagttttgaggtagttaagagttattttcagtttacctaggaagtttgtgtttgtcagatatgatactattgtgattaagtacaatacttcgtcataactgggcaaatgcattcagaactttcctattgaagttacttaaccccgaccagccaactgggttgcaacttactgttacaacttaagcaagtttgacatactttgacggatcatcttgtaaattacatattcaccaacagttgcaacagtatgtgtatttctggcgtcgaaagttgaagatactccttgtcccctggaccatgtagttagagtggcctatgaaacaatgtataggcgggacactgctgcggctcaaaggatccgtcagaaggatgtttttgagaagcagaaagcgctcattttgatcggagagagattgcttcttacaactattcgatttgatttcaacattcagcatccttatagaccacttcttgatgccatgcaaaatcttggcatcaatcaaaaagaagtgaaacaagtagcatggaactttgtgaatgactggcttaaaacaacattgtgtctacagtataaaccccagtacatagctgctggttccctttatctggctgcaaagcttcacaatatcaagcttcccttgcatggagcgcatgtttggtggcaccaatttgatgttgcaccaaagcctctggaagccgtcattcatcaaatgatggagcttgcggctttgaaaaagttgatgcctgctcgacccaatccggttaagctgaaggaaactttatgtgaagctaaactgagcttatctaatagcccagactctgtgttgaatcaatcaaacttgttaataagcagctcaagtcctgatattggcgagcccagtgacaaagtgcaggtggattcctgccaatacttgataagcagtcacatgggtgattgtagggtctcaggtcctgacagcagttcgttgaatacttgtgctaatagaaatgtctcttgtaaagcacatgatgaagagagcttggatcaggccttaataatcaaacatgacagtgggatgatgccttctagtaatcagacatcattatatgctactgtaggcactgagggcagtgctgaactgaagcaggatgtaagccattgtaatgacttcaatatcagagtcaatgacgaaagcttgaaccaggtgttaagaaatcagcatggtgatgctatcccattacctgacgtggtatcgctggatgccaaggtggacaaggaaaggagttggtgtgtggaaccattaattgcaaactctgattgctgtactgacagtgttaatgtggatagcttgtgcactgatcagagattggctgatgctccttcaggccccacagctgatgcaccatccatgctggccgaggaggaatcttatccttttagtgcaaagcttgaaaatattgatgttgccaggatcaaaggtttattgatgaagaggaagagccggagagagatccaagaccgagccattgcttcagatggtctaagtgaagaagactggatcgagagggagcttgaatctgggattgttacaaaccaagaagccaattgtgctgccatctcagacgagctaagtgacgaagcctggattgagagagaactcgagtcagggattgtggtcggaccaagaaatgagcaagcgatcacttttgatggtttgagtgaagatgattggatcgagagagagctggagtctgggatcatcgttgagccagcacctgctaccaagaagcggaagctggagtcaagctgttagctctgcattcgaaggccagattccaagcaggtgaataataacagatggttgcgagtaggaccacatcgaagccaagagatacatgtcgcacagatgggaggatcaatattatcctttttttatttctttataaccaaacaccttggagtactttgacacaaggggtgtgttcacagtgggatctccccagtttcttgaatgcagaaccgtatccgttgtatttgttccttcttgtcgtgagtgtaaatctagcgtgtccgaagttcggttttagattgtaggtgtaactgtagcagggattatctggtgttaagcccaacgagaaaatgattcagtgtaactgttactgtaaggaaagaagttattcagtgtagatttatggttaacacaagaagaggcaattactggtgtatgatgtttataaattgatgatgaatgttactggcagctcaaaagaaaagacagttactggtaactaaagaaaagtacgtttaacggagctgatcacattcaatcccctattgagctgcccttggtcgtcaattgtataacaactttctgcgtgaccatcaaaaaatttctcatggtatatatcttgtggagctaaaatcctcttattttttaatggcaatggaatttcagtccctctaaccctctctgtatctt

SEQ ID NO: 207570 - DNA, 2964 bp, Zea Mays
ttacacactgcggccttgcttctgttctctcgcgtcgttctcccgtagtcccgtgccctcgcgtgcgctctatctgtttctggtggcgacgacttggcggtccccgctgccgccgtgcccaggcctctacttcgggaccttcaccggcgacgagcacccatcgggttgcttcgcaaaacttccaacatccaggatacaattaattacgattccttcaactttatctcgatttataggaggttgcacagagcccatccaacagggtgtctcagacatactgatggatggggtgcccaatatccttgagaaatcatcacatgaatgcatgtactcttggtacttcaccagggaagaactagagaaattttctccatcaaggaaagatggtattactgaaaacaaggaatcagaaattcggcatttatattgttcatttatccgggatgttggcatcaggctgaagctacctcagatgacactagcaacagcagtcatgctttgccatcgcttctatttacaccagtcccttgccaaaaatggatggcaggtgagagattatattgttgtgccagtgatggttgctgatgtctatgaaaagcgacaagagtgcagagtttcattgccaagcatttgttggaaatatgttctccaccatgtctaacttaacattacagatgttacaacttaagcaagtttgacatactttgacggatcatcttgtaaattacatattcaccaacagttgcaacagtatgtgtatttctggcgtcgaaagttgaagatactccttgtcccctggaccatgtagttagagtggcctatgaaacaatgtataggcgggacactgctgcggctcaaaggatccgtcagaaggatgtttttgagaagcagaaagcgctcattttgatcggagagagattgcttcttacaactattcgatttgatttcaacattcagcatccttatagaccacttcttgatgccatgcaaaatcttggcatcaatcaaaaagaagtgaaacaagtagcatggaactttgtgaatgactggcttaaaacaacattgtgtctacagtataaaccccagtacatagctgctggttccctttatctggctgcaaagcttcacaatatcaagcttcccttgcatggagcgcatgtttggtggcaccaatttgatgttgcaccaaagcctctggaagccgtcattcatcaaatgatggagcttgcggctttgaaaaagttgatgcctgctcgacccaatccggttaagctgaaggaaactttatgtgaagctaaactgagcttatctaatagcccagactctgtgttgaatcaatcaaacttgttaataagcagctcaagtcctgatattggcgagcccagtgacaaagtgcaggtggattcctgccaatacttgataagcagtcacatgggtgattgtagggtctcaggtcctgacagcagttcgttgaatacttgtgctaatagaaatgtctcttgtaaagcacatgatgaagagagcttggatcaggccttaataatcaaacatgacagtgggatgatgccttctagtaatcagacatcattatatgctactgtaggcactgagggcagtgctgaactgaagcaggatgtaagccattgtaatgacttcaatatcagagtcaatgacgaaagcttgaaccaggtgttaagaaatcagcatggtgatgctatcccattacctgacgtggtatcgctggatgccaaggtggacaaggaaaggagttggtgtgtggaaccattaattgcaaactctgattgctgtactgacagtgttaatgtggatagcttgtgcactgatcagagattggctgatgctccttcaggccccacagctgatgcaccatccatgctggccgaggaggaatcttatccttttagtgcaaagcttgaaaatattgatgttgccaggatcaaaggtttattgatgaagaggaagagccggagagagatccaagaccgagccattgcttcagatggtctaagtgaagaagactggatcgagagggagcttgaatctgggattgttacaaaccaagaagccaattgtgctgccatctcagacgagctaagtgacgaagcctggattgagagagaactcgagtcagggattgtggtcggaccaagaaatgagcaagcgatcacttttgatggtttgagtgaagatgattggatcgagagagagctggagtctgggatcatcgttgagccagcacctgctaccaagaagcggaagctggagtcaagctgttagctctgcattcgaaggccagattccaagcaggtgaataataacagatggttgcgagtaggaccacatcgaagccaagagatacatgtcgcacagatgggaggatcaatattatcctttttttatttctttataaccaaacaccttggagtactttgacacaaggggtgtgttcacagtgggatctccccagtttcttgaatgcagaaccgtatccgttgtatttgttccttcttgtcgtgagtgtaaatctagcgtgtccgaagttcggttttagattgtaggtgtaactgtagcagggattatctggtgttaagcccaacgagaaaatgattcagtgtaactgttactgtaaggaaagaagttattcagtgtagatttatggttaacacaagaagaggcaattactggtgtatgatgtttataaattgatgatgaatgttactggcagctcaaaagaaaagacagttactggtaactaaagaaaagtacgtttaacggagctgatcacattcaatcccctattgagctgcccttggtcgtcaattgtataacaactttctgcgtgaccatcaaaaaatttctcatggtatatatcttgtggagctaaaatcctcttattttttaatggcaatggaatttcagtccctctaaccctctctgtatctt

SEQ ID NO: 207571 - DNA, 2590 bp, Zea Mays
cgagggttgattgcagtttgcagttgcatccccaccaatctcctcttccgtcgctctccaagaacctttggtttgactgctcctgatttcttatcatttcctgcacaggcttacgagcgtgatctacgcttccatttacctccgtccctatcagcttcctcgcttccctatgcctacgagaaagagagaagcgtgggctaattcctctgtgtttcccagcttcctgttcaccatggactcgagggagtgcatcgtcccgtcaaacaatcctgctccaatcttttgacgtcttcgctgggcctgtgccgcctccccgtacccgccgttcctgcaccgtcaaaccgccagccaagagtccatttttttttcttatcaaaagtttgcgtttgatcggtttcgtttctaagagctgcgcgagatgtccttgttccgggaagggaggaaacgagaggctctgttcctgtcgcgattgttggaggacctcaccatagtttgaggcggtgaggtggaggcgatagagaagacgagacaagaagcagccgccaggagctgagctgaggccctgccgccgtcttgccccaactccaagcgatgtcttgcttccgctgcttcagcggctgcaggaccaagaggggcaagggcgagaagcgccgggaggggtcgacggcgccggcgtccccggcggccgcctcgttcccgtccaccgtctccacgggcgcgccatccaacctcaccttctccacggcgtcgtcggccgtcgtcacgagccactccgaggactccagcgcggtcatgcggccggaggcgaccaagtcatcgggctcggcctcggtgtcgtcggcgcggagcatcccggagctgtacgaggagaggggagccagcagcctccgggagttcgggttccgggagctccgggccgccaccagcgacttcagccgcctgctcaaggtcggcgagggcggcttcgggagcgtttacaagggcgtcgtccgccttcctggcgggcccgccggcggcacggtagttgccataaaaaaactcaatcccaatggtcatcagcatttttacagcatatttgcctaccatatacattatctccctctgtgtgtgggtgaaatggaccgtaccttgcatgactctgtacaattcatttcgctaatgggtctgtgaagtatctatcattttgctatccctatttcatttcagaagttcaaggttatctcattctggcatatctatctgcatccaagtctcaagagttttctgttcctgctcccgacttgatcagggccacaagcaatggttggcagaagtccatttcctgggggttgttgagcacccaaatctcgtcaggctcattggctactgcgctgctcaaggcgagcgaggtccgctgaggctactggtctacgagttcatgacgaacaagaccctggacgatcatctattcaataaagcataccccgtccttccatgggacatcaggttggagatagcgctggatgccgctgagggattgctgtacctccatgagggattggaagttcaggtcatatatcgcgatttcaaagcttcaaatgtcctgctggacgaggagtttagagcgaaactttcagatttcggattggcaagggaagggccatcagctggtgatacccacgtctctacagcagttatggggaccttgggctatgcagctccagattatgtcgagacaggccatctcactacaaaaagtgatgtgtggagctttggagtagttctatatgagatcctcactggacgtcgctcaatagagaggaaccggcccaagaacgagcagaaacttctggaatgggtcaggctgtatcccgttgaaagcaagcagttcagcaagattatagatgcaaggcttgagggccactactctaagcagggcactagaaaaattgccaagttggccaatagttgccttgcaaagcacagaagggaccgtccaacgatgagagaagtggtcgagagcctgaaacaagcaatgcagcacaaggagttggatgggaaagcaggggctttgaatgagacttcaccaccagaggaaatgtctggaaaaccaagcacagaggatgttgccgtggcatcagcaaggcggaggatgcttcatttggctgccctaggtgagaatgcaaacagcattgcgaggaggagattcatgttcatgaggactgcggcttctccaactcctacgtaattttgagttgtagttgtgatcttttctctctctttttgaacaaatgtgatcttttcttttgactttgtactttttgaagtggttatgaaggtaggatcattggggatgttttcaccatgtcatgtataaatctattagatggccagacattgtttttttacttgtgttctttgtataggtagggtagatctgagacccaagagttactatgtaaaaaggtttcactgctataaggatcataggtgtgaaatgtaattcagttctctatgtttgactgcaactttgaacatcataagggtagatagtattaaaggtgtcaaatccttcctttctatactggattttgctttttaccattgactg

SEQ ID NO: 207572 - DNA, 2814 bp, Zea Mays
gtccgctcgtcaatcgtcctccttcgggcttcggcacagcaagcaccacccccttcgccaccgccaccatcaccgctaccgctacggcttcccacctcaaaaccctaaccctaaaccccctccgcgcgggagccctcgcccatggagaaccccaggccccaggccccagcactcacccctcccatggccccgctccccgtccccatccacccgccaatcgccccaatccccgtccctccgccccgcgtgcccgcccccgccccagccgccgccgcttccatggcctccacacccactccctccactggggacggaggcgaggccgagtacgaagtctccgacgaccaccgcgccgcgcgggagcgccacgagcgcgcggtgcaggagctcctccagcggcgccgcgcctacgccatggccgtacccaccaacgactccgctgtgcgggcccgcctccgccgcctcggcgagcccatcacgctattcggcgagcgcgagatggagcgccgcgaccgcctccgagccctcatggtccggctcgaggccgatggccaggtcgaccgtctcctccgcgcgcaggaggacgaccaggccgcgcgcatcggcgaggaggaggaggaggagcagatcgagtaccccttcttcaccgagggctcgcaggagcttctcaaggcgcgccttgacattgcacggtactcgctgccccgtgccaaggccaggatcgagagggccaagcgacgccacgaggaccctgatgaggatccagaggcggaggccgaactcgtcgtcaagcaggccggggagtttgtgctcgagtgcagtgagattggagatgatcgcccgctcactggctgttccttctctcgtgatgcatcgatgctcgccacaagtcctgcttgagcttaattgagattagtttctcaccgcaagagaactgcaactagtaagttcatatatgacattcaaaaaattcagcatctgtccatctgatcacttgggaactaactaagtcagctgtagtttcgatttttagtatctgaagtcactgggctgctaggaagccaggatcaggtattcaggtttgcttttcttctagtggatagagaatgaccaacatattatcaatccaaaattcccgtttggaacttgtatccctacccaatgcacataattctccctttttaacaaaccttggtagaacataaagctgaagttagacatctgtactgtcccccgtggtattgagtattatcaaaataacagcaataagaccatgttcagcgatatttaccttgagccgttaattgaaatcagttagcagttcgtatgcacagaaataagattgttaactgaagttaaacaacttatctatgttaccagtgtcatgtgcaactagttgcttattaaatgttatgatgtctatcatatatttacatttgttttgagctttaacatggtagattatgttctcgtactcttgcttccttttcaggaaataaccatttgcttatccacattgtgtagttcctggagtggaatagtcaaagtatggagcatgccacaaataactaaggttgcaaccttgaaaggtcacacagaacgtgcaactgatgttgtcttctctcctgctgatgactgcttagcaacagcttcagctgatagaactgcaaaattatggaaaccagatgggtcacttttgatgtcttttgatggccaccttgatcgtcttgctcgccttgcttttcatccatctggaaagtaccttggtacagctagctttgacaagacttggagattgtgggacatcaatactggcaaggaactgctactccaagaggggcacagcagaagtgtatatggagttagctttcaccctgatggttctttggcagcatcttgtggtcttgatgcatatgctcgagtatgggatctgagatctggaagattgttctttacactcaagggccatgtgaaacctgtcctaggagtcagcttctctcctaatggttatctggttgcaactggaagtgaagacaatttctgtcggatatgggatttgaggaaaaggcaaatgttgtattctattccagctcataagagtattatttcacatgtgaaatttgaaccccaagaagggtattatttagcgacttcttcctatgacaccaaagcagccctgtggtcagctcgtgattacaaaccaatcaaaagtttggtgggccatgagtcgaaggttactagtttggatattagtggagatggacagaagattgtgactgtgtcgcttgatcgtacgataaaaatttggtcatgcagaagtagcacacaagataatgagatggaactggattgagacaattgggttcattgttgccagccccgcttctctattcatcagctagaagtagatattctccctttttgctgatcagacattccaatcagtcattggtgctattgcacggaactatttcatagcatgtataaacccttggcttgagaaatatgttctgcacttactttgctgatattccttgtcatatactagggctagtttggctaccccattttttaagggattttcatttttctaacgacccgtttggatcattagaatttaacaatagtaattttggcatatattaattaagctaattcagttttatacaaaatatatttatatattattttagtaagatgtcagagatatttatgtgctacatttttactatagaggattgggacgaaaagtgtcatgtaagttatagagtagaaacaaattttactgatacataaaatcatttttcatatcat

SEQ ID NO: 207573 - DNA, 1783 bp, Zea Mays
gttgaagggaagatctggtgcagcggcgagagctatctcattgagtcatcaagtcgtgggtgccaagcagtttctctgcatttgtgggggaaggaggattgtcacggtttatccctttcccagaccccactcatgtgggagcctccaacattgggtttgcccttgctgtaatttttttgttggaagtccatatcagtggcgagagctatctcattgagtcagcaagtcgtgggtccaaagcagtttctctgcatttgcggggaaatgattgcctcggtttatccttttcccagaccccactcatgtgggagcctccaacattgggtttgcccttgctgcaatttttttgttggaagtccatgtttagtcaatttatttatgatggatttatgcactgtgcagtcctgcttgagcttaattgagattagtttctcaccgcaagagaactgcaactatatctgaagtcactgggctgctaggaagccaggatcagttcctggagtggaatagtcaaagtatggagcatgccacaaataactaaggttgcaaccttgaaaggtcacacagaacgtgcaactgatgttgtcttctctcctgctgatgactgcttagcaacagcttcagctgatagaactgcaaaattatggaaaccagatgggtcacttttgatgtcttttgatggccaccttgatcgtcttgctcgccttgcttttcatccatctggaaagtaccttggtacagctagctttgacaagacttggagattgtgggacatcaatactggcaaggaactgctactccaagaggggcacagcagaagtgtatatggagttagctttcaccctgatggttctttggcagcatcttgtggtcttgatgcatatgctcgagtatgggatctgagatctggaagattgttctttacactcaagggccatgtgaaacctgtcctaggagtcagcttctctcctaatggttatctggttgcaactggaagtgaagacaatttctgtcggatatgggatttgaggaaaaggcaaatgttgtattctattccagctcataagagtattatttcacatgtgaaatttgaaccccaagaagggtattatttagcgacttcttcctatgacaccaaagcagccctgtggtcagctcgtgattacaaaccaatcaaaagtttggtgggccatgagtcgaaggttactagtttggatattagtggagatggacagaagattgtgactgtgtcgcttgatcgtacgataaaaatttggtcatgcagaagtagcacacaagataatgagatggaactggattgagacaattgggttcattgttgccagccccgcttctctattcatcagctagaagtagatattctccctttttgctgatcagacattccaatcagtcattggtgctattgcacggaactatttcatagcatgtataaacccttggcttgagaaatatgttctgcacttactttgctgatattccttgtcatatactagggctagtttggctaccccattttttaagggattttcatttttctaacgacccgtttggatcattagaatttaacaatagtaattttggcatatattaattaagctaattcagttttatacaaaatatatttatatattattttagtaagatgtcagagatatttatgtgctacatttttactatagaggattgggacgaaaagtgtcatgtaagttatagagtagaaacaaattttactgatacataaaatcatttttcatatcat

SEQ ID NO: 207574 - DNA, 1393 bp, Zea Mays
gaagggaagatctggtgcagcggcgagagctatctcattgagtcatcaagtcgtgggtgccaagcagtttctctgcatttgtgggggaaggaggattgtcacgttcctggagtggaatagtcaaagtatggagcatgccacaaataactaaggttgcaaccttgaaaggtcacacagaacgtgcaactgatgttgtcttctctcctgctgatgactgcttagcaacagcttcagctgatagaactgcaaaattatggaaaccagatgggtcacttttgatgtcttttgatggccaccttgatcgtcttgctcgccttgcttttcatccatctggaaagtaccttggtacagctagctttgacaagacttggagattgtgggacatcaatactggcaaggaactgctactccaagaggggcacagcagaagtgtatatggagttagctttcaccctgatggttctttggcagcatcttgtggtcttgatgcatatgctcgagtatgggatctgagatctggaagattgttctttacactcaagggccatgtgaaacctgtcctaggagtcagcttctctcctaatggttatctggttgcaactggaagtgaagacaatttctgtcggatatgggatttgaggaaaaggcaaatgttgtattctattccagctcataagagtattatttcacatgtgaaatttgaaccccaagaagggtattatttagcgacttcttcctatgacaccaaagcagccctgtggtcagctcgtgattacaaaccaatcaaaagtttggtgggccatgagtcgaaggttactagtttggatattagtggagatggacagaagattgtgactgtgtcgcttgatcgtacgataaaaatttggtcatgcagaagtagcacacaagataatgagatggaactggattgagacaattgggttcattgttgccagccccgcttctctattcatcagctagaagtagatattctccctttttgctgatcagacattccaatcagtcattggtgctattgcacggaactatttcatagcatgtataaacccttggcttgagaaatatgttctgcacttactttgctgatattccttgtcatatactagggctagtttggctaccccattttttaagggattttcatttttctaacgacccgtttggatcattagaatttaacaatagtaattttggcatatattaattaagctaattcagttttatacaaaatatatttatatattattttagtaagatgtcagagatatttatgtgctacatttttactatagaggattgggacgaaaagtgtcatgtaagttatagagtagaaacaaattttactgatacataaaatcatttttcatatcat

SEQ ID NO: 207575 - DNA, 1541 bp, Zea Mays
ggaagatctggtgcagcggcgagagctatctcattgagtcatcaagtcgtgggtgccaagcagtttctctgcatttgtgggggaaggaggattgtcacggtttatccctttcccagaccccactcatgtgggagcctccaacattggtcctgcttgagcttaattgagattagtttctcaccgcaagagaactgcaactatttcgatttttagtatctgaagtcactgggctgctaggaagccaggatcagttcctggagtggaatagtcaaagtatggagcatgccacaaataactaaggttgcaaccttgaaaggtcacacagaacgtgcaactgatgttgtcttctctcctgctgatgactgcttagcaacagcttcagctgatagaactgcaaaattatggaaaccagatgggtcacttttgatgtcttttgatggccaccttgatcgtcttgctcgccttgcttttcatccatctggaaagtaccttggtacagctagctttgacaagacttggagattgtgggacatcaatactggcaaggaactgctactccaagaggggcacagcagaagtgtatatggagttagctttcaccctgatggttctttggcagcatcttgtggtcttgatgcatatgctcgagtatgggatctgagatctggaagattgttctttacactcaagggccatgtgaaacctgtcctaggagtcagcttctctcctaatggttatctggttgcaactggaagtgaagacaatttctgtcggatatgggatttgaggaaaaggcaaatgttgtattctattccagctcataagagtattatttcacatgtgaaatttgaaccccaagaagggtattatttagcgacttcttcctatgacaccaaagcagccctgtggtcagctcgtgattacaaaccaatcaaaagtttggtgggccatgagtcgaaggttactagtttggatattagtggagatggacagaagattgtgactgtgtcgcttgatcgtacgataaaaatttggtcatgcagaagtagcacacaagataatgagatggaactggattgagacaattgggttcattgttgccagccccgcttctctattcatcagctagaagtagatattctccctttttgctgatcagacattccaatcagtcattggtgctattgcacggaactatttcatagcatgtataaacccttggcttgagaaatatgttctgcacttactttgctgatattccttgtcatatactagggctagtttggctaccccattttttaagggattttcatttttctaacgacccgtttggatcattagaatttaacaatagtaattttggcatatattaattaagctaattcagttttatacaaaatatatttatatattattttagtaagatgtcagagatatttatgtgctacatttttactatagaggattgggacgaaaagtgtcatgtaagttatagagtagaaacaaattttactgatacataaaatcatttttcatatcat

SEQ ID NO: 207576 - DNA, 1437 bp, Zea Mays
ggaagatctggtgcagcggcgagagctatctcattgagtcatcaagtcgtgggtgccaagcagtttctctgcatttgtgggggaaggaggattgtcacggtttatccctttcccagaccccactcatgtgggagcctccaacattggttcctggagtggaatagtcaaagtatggagcatgccacaaataactaaggttgcaaccttgaaaggtcacacagaacgtgcaactgatgttgtcttctctcctgctgatgactgcttagcaacagcttcagctgatagaactgcaaaattatggaaaccagatgggtcacttttgatgtcttttgatggccaccttgatcgtcttgctcgccttgcttttcatccatctggaaagtaccttggtacagctagctttgacaagacttggagattgtgggacatcaatactggcaaggaactgctactccaagaggggcacagcagaagtgtatatggagttagctttcaccctgatggttctttggcagcatcttgtggtcttgatgcatatgctcgagtatgggatctgagatctggaagattgttctttacactcaagggccatgtgaaacctgtcctaggagtcagcttctctcctaatggttatctggttgcaactggaagtgaagacaatttctgtcggatatgggatttgaggaaaaggcaaatgttgtattctattccagctcataagagtattatttcacatgtgaaatttgaaccccaagaagggtattatttagcgacttcttcctatgacaccaaagcagccctgtggtcagctcgtgattacaaaccaatcaaaagtttggtgggccatgagtcgaaggttactagtttggatattagtggagatggacagaagattgtgactgtgtcgcttgatcgtacgataaaaatttggtcatgcagaagtagcacacaagataatgagatggaactggattgagacaattgggttcattgttgccagccccgcttctctattcatcagctagaagtagatattctccctttttgctgatcagacattccaatcagtcattggtgctattgcacggaactatttcatagcatgtataaacccttggcttgagaaatatgttctgcacttactttgctgatattccttgtcatatactagggctagtttggctaccccattttttaagggattttcatttttctaacgacccgtttggatcattagaatttaacaatagtaattttggcatatattaattaagctaattcagttttatacaaaatatatttatatattattttagtaagatgtcagagatatttatgtgctacatttttactatagaggattgggacgaaaagtgtcatgtaagttatagagtagaaacaaattttactgatacataaaatcatttttcatatcat

SEQ ID NO: 207577 - DNA, 917 bp, Zea Mays
ctcacatcaatgcgtatcctgtcatactgagatgggaataagaggtgtctggatcaaactgcccatcaccctttccaaccttattccaccagttgtagaggaaggtttctggtaccatcatgcagaggaaacttacttgatgcttgcgtactggcttccaaatacaacacatacactaccagtaaacgcaacccaccgtgttagtgttggagcttttataatgaatgacaaaagagaggtcttggctgtacaagaaaagagtggtgtacttcgaggcctaggtgtgtggaaatttccaactggcgtagtagaaccgggggaagatattaacgttggagccgtccgagaagtaaaagaagagacagggattgatgcagaatttgttgaagtgctggccttcaggcagagccacaaatccttttttgataaatcagatctatttttcgtgtgcctgctacgacccctttcatacgacattacgaagcaagactcggaaatagaggcatgccagtggatgccagtagaggaatttgcagcacaaccatttgtccagaaacatgagcttgtgaagtacatcctcgaagtcggcctggctaaagttgacaaggaatatgcaggcttttcgccaatctccataaaatcggcatttacagacaaattgtccttattttacatgaaccggagggatctggacagggcctcagggtagagtatatatgtaatgacacgggcaattcaggatagttaaattttcactttggtgtgtgacagcgggctaaatcttgttagacctagggtctgtttggttgggctgtggctgtcaaaaaagttgctgtgggctgtgagctgtggaaaaagctgctgtaggctgtgagccattaaaaagctaaaaatcgtttggtagaaaccactaaaaa

SEQ ID NO: 207578 - DNA, 703 bp, Zea Mays
cgggcttatctccaccggtgcaggagacaactcggtctattgtccctgcaaagaatgagaagaaagaatcctcaaacactggcaagcgagaaactaggaaatctataaaaaggactggtgaggatccagttggagtgagggatctgcttgtcaggtcatgaggaacatgcttgcaaatgagggtgtccgttcattctacaagggtttgtccgctggtttgctaaggcaagcaacgcacatagactgctcatcttggatccttcagctatggaatgtttgccaccagagggtgtgatagatttgtgaatgtgtgggatgacattaacaagagaatactatatcagtactcaaaagtgcgcatcaagcattgttgcactgtcattcggtaaggatggccatctgcttgctgtggcatccaactacacttatgaagagtgagaaaaaacgcactttgtctgacaaatctctgtttacgcaatattaaccgctcatgattctcctcacacttgtcctctttgtcgtcttgagttttatttgctgtgacttagcaaaagtgaattccactgatgggactaacgatacctcaatatgttttgtcaataccttaaggagtctattgtcctatttttctttcaaggttcgttgtagacttaaggtacacattatgaatcgtgcgttgccttcttttgagttgttacacaac

SEQ ID NO: 207579 - DNA, 1281 bp, Zea Mays
atcgccaaccgccctcgtctcctcacgccaatgcacaccctagccgtcgccaacctgcagctccatcccggtgcttgcccagacgggtcgccccgtaaggagagaacgtgaccaggcaggagacgacgcttcatgtatccatctccgcctcaatcgaccgtgccaattaacaggctcccaaggaggagatccaatcctgcgggcgggtgtcccgtcgcccatccatcgatccgaatctgcatgtgaccagtctcatcgggctcttctcttttttaggaatgactcatgggtttctcaccatcccttccacttggggatttcaatcgaatggtgaaatggagttaccaatcaacaactagctgaatcagctcccggcctacccgggcttatctccaccggtgcaggtaagcattgctgctggcactcgagcaagacgacgccgactatgacctttgtccccatgagtcaacaggttggtgaacaccaccgctgggagcacctcgccaggaaccctttcctcacgctcttcggtaattaagttcatccatgatccgatccacatcaagcgtggcaatcaatcatctagtagtgtttttctttggagacaactcggtctattgtccctgcaaagaatgagaagaaagaatcctcaaacactggcaagcgagaaactaggaaatctataaaaaggactggtgaggatccagttggagtgagggatctgcttgtcaggtcatgaggaacatgcttgcaaatgagggtgtccgttcattctacaagggtttgtccgctggtttgctaaggcaagcaacgcacatagactgctcatcttggatccttcagctatggaatgtttgccaccagagggtgtgatagatttgtgaatgtgtgggatgacattaacaagagaatactatatcagtactcaaaagtgcgcatcaagcattgttgcactgtcattcggtaaggatggccatctgcttgctgtggcatccaactacacttatgaagagtgagaaaaaacgcactttgtctgacaaatctctgtttacgcaatattaaccgctcatgattctcctcacacttgtcctctttgtcgtcttgagttttatttgctgtgacttagcaaaagtgaattccactgatgggactaacgatacctcaatatgttttgtcaataccttaaggagtctattgtcctatttttctttcaaggttcgttgtagacttaaggtacacattatgaatcgtgcgttgccttcttttgagttgttacacaac

SEQ ID NO: 207580 - DNA, 1123 bp, Zea Mays
atcgccaaccgccctcgtctcctcacgccaatgcacaccctagccgtcgccaacctgcagctccatcccggtgcttgcccagacgggtcgccccgtaaggagagaacgtgaccaggcaggagacgacgcttcatgtatccatctccgcctcaatcgaccgtgccaattaacaggctcccaaggaggagatccaatcctgcgggcgggtgtcccgtcgcccatccatcgatccgaatctgcatgtgaccagtctcatcgggctcttctcttttttaggaatgactcatgggtttctcaccatcccttccacttggggatttcaatcgaatggtgaaatggagttaccaatcaacaactagctgaatcagctcccggcctacccgggcttatctccaccggtgcaggttggtgaacaccaccgctgggagcacctcgccaggaacgagacaactcggtctattgtccctgcaaagaatgagaagaaagaatcctcaaacactggcaagcgagaaactaggaaatctataaaaaggactggtgaggatccagttggagtgagggatctgcttgtcaggtcatgaggaacatgcttgcaaatgagggtgtccgttcattctacaagggtttgtccgctggtttgctaaggcaagcaacgcacatagactgctcatcttggatccttcagctatggaatgtttgccaccagagggtgtgatagatttgtgaatgtgtgggatgacattaacaagagaatactatatcagtactcaaaagtgcgcatcaagcattgttgcactgtcattcggtaaggatggccatctgcttgctgtggcatccaactacacttatgaagagtgagaaaaaacgcactttgtctgacaaatctctgtttacgcaatattaaccgctcatgattctcctcacacttgtcctctttgtcgtcttgagttttatttgctgtgacttagcaaaagtgaattccactgatgggactaacgatacctcaatatgttttgtcaataccttaaggagtctattgtcctatttttctttcaaggttcgttgtagacttaaggtacacattatgaatcgtgcgttgccttcttttgagttgttacacaac

SEQ ID NO: 207581 - DNA, 1202 bp, Zea Mays
atcgccaaccgccctcgtctcctcacgccaatgcacaccctagccgtcgccaacctgcagctccatcccggtgcttgcccagacgggtcgccccgtaaggagagaacgtgaccaggcaggagacgacgcttcatgtatccatctccgcctcaatcgaccgtgccaattaacaggctcccaaggaggagatccaatcctgcgggcgggtgtcccgtcgcccatccatcgatccgaatctgcatgtgaccagtctcatcgggctcttctcttttttaggaatgactcatgggtttctcaccatcccttccacttggggatttcaatcgaatggtgaaatggagttaccaatcaacaactagctgaatcagctcccggcctacccgggcttatctccaccggtgcaggttggtgaacaccaccgctgggagcacctcgccaggaacgtgcgtacctcccgtgtctccttcaacccgccatgaatttcttggtttcactcgctagctgatcgactgactgacacacgagacaactcggtctattgtccctgcaaagaatgagaagaaagaatcctcaaacactggcaagcgagaaactaggaaatctataaaaaggactggtgaggatccagttggagtgagggatctgcttgtcaggtcatgaggaacatgcttgcaaatgagggtgtccgttcattctacaagggtttgtccgctggtttgctaaggcaagcaacgcacatagactgctcatcttggatccttcagctatggaatgtttgccaccagagggtgtgatagatttgtgaatgtgtgggatgacattaacaagagaatactatatcagtactcaaaagtgcgcatcaagcattgttgcactgtcattcggtaaggatggccatctgcttgctgtggcatccaactacacttatgaagagtgagaaaaaacgcactttgtctgacaaatctctgtttacgcaatattaaccgctcatgattctcctcacacttgtcctctttgtcgtcttgagttttatttgctgtgacttagcaaaagtgaattccactgatgggactaacgatacctcaatatgttttgtcaataccttaaggagtctattgtcctatttttctttcaaggttcgttgtagacttaaggtacacattatgaatcgtgcgttgccttcttttgagttgttacacaac

SEQ ID NO: 207582 - DNA, 1179 bp, Zea Mays
atcgccaaccgccctcgtctcctcacgccaatgcacaccctagccgtcgccaacctgcagctccatcccggtgcttgcccagacgggtcgccccgtaaggagagaacgtgaccaggcaggagacgacgcttcatgtatccatctccgcctcaatcgaccgtgccaattaacaggctcccaaggaggagatccaatcctgcgggcgggtgtcccgtcgcccatccatcgatccgaatctgcatgtgaccagtctcatcgggctcttctcttttttaggaatgactcatgggtttctcaccatcccttccacttggggatttcaatcgaatggtgaaatggagttaccaatcaacaactagctgaatcagctcccggcctacccgggcttatctccaccggtgcaggtaagcattgctgctggcactcgagcaagacgacgccgactatgacctttgtccccatgagtcaacaggttggtgaacaccaccgctgggagcacctcgccaggaacgtgcgtacctcccgtgtctccttcaacccgccatgaatttcttggtttcactcgctagctgatcgactgactgacacacgtagtgaggatccagttggagtgagggatctgcttgtcaggtcatgaggaacatgcttgcaaatgagggtgtccgttcattctacaagggtttgtccgctggtttgctaaggcaagcaacgcacatagactgctcatcttggatccttcagctatggaatgtttgccaccagagggtgtgatagatttgtgaatgtgtgggatgacattaacaagagaatactatatcagtactcaaaagtgcgcatcaagcattgttgcactgtcattcggtaaggatggccatctgcttgctgtggcatccaactacacttatgaagagtgagaaaaaacgcactttgtctgacaaatctctgtttacgcaatattaaccgctcatgattctcctcacacttgtcctctttgtcgtcttgagttttatttgctgtgacttagcaaaagtgaattccactgatgggactaacgatacctcaatatgttttgtcaataccttaaggagtctattgtcctatttttctttcaaggttcgttgtagacttaaggtacacattatgaatcgtgcgttgccttcttttgagttgttacacaac

SEQ ID NO: 207583 - DNA, 1654 bp, Zea Mays
atcgccaaccgccctcgtctcctcacgccaatgcacaccctagccgtcgccaacctgcagctccatcccggtgcttgcccagacgggtcgccccgtaaggagagaacgtgaccaggcaggagacgacgcttcatgtatccatctccgcctcaatcgaccgtgccaattaacaggctcccaaggaggagatccaatcctgcgggcgggtgtcccgtcgcccatccatcgatccgaatctgcatgtgaccagtctcatcgggctcttctcttttttaggaatgactcatgggtttctcaccatcccttccacttggggatttcaatcgaatggtgaaatggagttaccaatcaacaactagctgaatcagctcccggcctacccgggcttatctccaccggtgcaggtaagcattgctgctggcactcgagcaagacgacgccgactatgacctttgtccccatgagtcaacaggttggtgaacaccaccgctgggagcacctcgccaggaacgtgcgtacctcccgtgtctccttcaacccgccatgaatttcttggtttcactcgctagctgatcgactgactgacacacgagacaactcggtctattgtccctgcaaagaatgagaagaaagaatcctcaaacactggcaagcgagaaactaggaaatctataaaaaggactggtgatttaatctcttagccttgacacaacatatgcatagtgtgttacttggtgaaaacttatgcacaaaatttatgttgtcgctttcatgaaggaggcaggttacttggttttaccctttctgcatattatgcaaataattctcaaatgaacatttttcttaattttgtatcaacttttatattgtgttattctttcacgtgtgacctggctatacagagatttatgcctctgcttctctatgctatggagtatcaaatctgttgattttttgttctgataatatagaatgataatggttcatgttgtgaaatgggtagatgatatcattccagatgcaccttatgccataactgaacaatacttattattgttttggtttcaggtgaggatccagttggagtgagggatctgcttgtcaggtcatgaggaacatgcttgcaaatgagggtgtccgttcattctacaagggtttgtccgctggtttgctaaggcaagcaacgcacatagactgctcatcttggatccttcagctatggaatgtttgccaccagagggtgtgatagatttgtgaatgtgtgggatgacattaacaagagaatactatatcagtactcaaaagtgcgcatcaagcattgttgcactgtcattcggtaaggatggccatctgcttgctgtggcatccaactacacttatgaagagtgagaaaaaacgcactttgtctgacaaatctctgtttacgcaatattaaccgctcatgattctcctcacacttgtcctctttgtcgtcttgagttttatttgctgtgacttagcaaaagtgaattccactgatgggactaacgatacctcaatatgttttgtcaataccttaaggagtctattgtcctatttttctttcaaggttcgttgtagacttaaggtacacattatgaatcgtgcgttgccttcttttgagttgttacacaac

SEQ ID NO: 207584 - DNA, 1187 bp, Zea Mays
atcgccaaccgccctcgtctcctcacgccaatgcacaccctagccgtcgccaacctgcagctccatcccggtgcttgcccagacgggtcgccccgtaaggagagaacgtgaccaggcaggagacgacgcttcatgtatccatctccgcctcaatcgaccgtgccaattaacaggctcccaaggaggagatccaatcctgcgggcgggtgtcccgtcgcccatccatcgatccgaatctgcatgtgaccagtctcatcgggctcttctcttttttaggaatgactcatgggtttctcaccatcccttccacttggggatttcaatcgaatggtgaaatggagttaccaatcaacaactagctgaatcagctcccggcctacccgggcttatctccaccggtgcaggtaagcattgctgctggcactcgagcaagacgacgccgactatgacctttgtccccatgagtcaacaggttggtgaacaccaccgctgggagcacctcgccaggaaccctttcctcacgctcttcggtaattaagttcatccatgatccgatccacatcaagcgtggcaatcaatcatctagtagtgtttttctttggtgaggatccagttggagtgagggatctgcttgtcaggtcatgaggaacatgcttgcaaatgagggtgtccgttcattctacaagggtttgtccgctggtttgctaaggcaagcaacgcacatagactgctcatcttggatccttcagctatggaatgtttgccaccagagggtgtgatagatttgtgaatgtgtgggatgacattaacaagagaatactatatcagtactcaaaagtgcgcatcaagcattgttgcactgtcattcggtaaggatggccatctgcttgctgtggcatccaactacacttatgaagagtgagaaaaaacgcactttgtctgacaaatctctgtttacgcaatattaaccgctcatgattctcctcacacttgtcctctttgtcgtcttgagttttatttgctgtgacttagcaaaagtgaattccactgatgggactaacgatacctcaatatgttttgtcaataccttaaggagtctattgtcctatttttctttcaaggttcgttgtagacttaaggtacacattatgaatcgtgcgttgccttcttttgagttgttacacaac

SEQ ID NO: 207585 - DNA, 1718 bp, Zea Mays
atcgccaaccgccctcgtctcctcacgccaatgcacaccctagccgtcgccaacctgcagctccatcccggtgcttgcccagacgggtcgccccgtaaggagagaacgtgaccaggcaggagacgacgcttcatgaatgactcatgggtttctcaccatcccttccacttggggatttcaatcgaatggtgaaatggagttaccaatcaacaactagctgaatcagctcccggcctacccgggcttatctccaccggtgcaggttggtgaacaccaccgctgggagcacctcgccaggaaccctttcctcacgctcttcggtaattaagttcatccatgatccgatccacatcaagcgtggcaatcaatcatctagtagtgtttttctttggtcggttccatccataaattagttctaagtatctttttttctgattttttttctagaatcctaggccatcaagcgtggcagtaatgctttgttcttgcaaataattttttaaaatattttgattgtactttgtttgtgatgaacatgtagcttctgattctttgctaaaaactaccaaatgtgcaatctgttattattttatagccatgtgaatatggatttatcctattgtatatatcattttttgttgttataatttttaggagacaactcggtctattgtccctgcaaagaatgagaagaaagaatcctcaaacactggcaagcgagaaactaggaaatctataaaaaggactggtgatttaatctcttagccttgacacaacatatgcatagtgtgttacttggtgaaaacttatgcacaaaatttatgttgtcgctttcatgaaggaggcaggttacttggttttaccctttctgcatattatgcaaataattctcaaatgaacatttttcttaattttgtatcaacttttatattgtgttattctttcacgtgtgacctggctatacagagatttatgcctctgcttctctatgctatggagtatcaaatctgttgattttttgttctgataatatagaatgataatggttcatgttgtgaaatgggtagatgatatcattccagatgcaccttatgccataactgaacaatacttattattgttttggtttcaggtgaggatccagttggagtgagggatctgcttgtcaggtcatgaggaacatgcttgcaaatgagggtgtccgttcattctacaagggtttgtccgctggtttgctaaggcaagcaacgcacatagactgctcatcttggatccttcagctatggaatgtttgccaccagagggtgtgatagatttgtgaatgtgtgggatgacattaacaagagaatactatatcagtactcaaaagtgcgcatcaagcattgttgcactgtcattcggtaaggatggccatctgcttgctgtggcatccaactacacttatgaagagtgagaaaaaacgcactttgtctgacaaatctctgtttacgcaatattaaccgctcatgattctcctcacacttgtcctctttgtcgtcttgagttttatttgctgtgacttagcaaaagtgaattccactgatgggactaacgatacctcaatatgttttgtcaataccttaaggagtctattgtcctatttttctttcaaggttcgttgtagacttaaggtacacattatgaatcgtgcgttgccttcttttgagttgttacacaac

SEQ ID NO: 207586 - DNA, 1335 bp, Zea Mays
tatcgccaaccgccctcgtctcctcacgccaatgcacaccctagccgtcgccaacctgcagctccatcccggtgcttgcccagacgggtcgccccgtaaggagagaacgtgaccaggcaggagacgacgcttcatgaatgactcatgggtttctcaccatcccttccacttggggatttcaatcgaatggtgaaatggagttaccaatcaacaactagctgaatcagctcccggcctacccgggcttatctccaccggtgcaggttggtgaacaccaccgctgggagcacctcgccaggaaccctttcctcacgctcttcggtaattaagttcatccatgatccgatccacatcaagcgtggcaatcaatcatctagtagtgtttttctttggtcggttccatccataaattagttctaagtatctttttttctgattttttttctagaatcctaggccatcaagcgtggcagtaatgctttgttcttgcaaataattttttaaaatattttgattgtactttgtttgtgatgaacatgtagcttctgattctttgctaaaaactaccaaatgtgcaatctgttattattttatagccatgtgaatatggatttatcctattgtatatatcattttttgttgttataatttttaggagacaactcggtctattgtccctgcaaagaatgagaagaaagaatcctcaaacactggcaagcgagaaactaggaaatctataaaaaggactggtgaggatccagttggagtgagggatctgcttgtcaggtcatgaggaacatgcttgcaaatgagggtgtccgttcattctacaagggtttgtccgctggtttgctaaggcaagcaacgcacatagactgctcatcttggatccttcagctatggaatgtttgccaccagagggtgtgatagatttgtgaatgtgtgggatgacattaacaagagaatactatatcagtactcaaaagtgcgcatcaagcattgttgcactgtcattcggtaaggatggccatctgcttgctgtggcatccaactacacttatgaagagtgagaaaaaacgcactttgtctgacaaatctctgtttacgcaatattaaccgctcatgattctcctcacacttgtcctctttgtcgtcttgagttttatttgctgtgacttagcaaaagtgaattccactgatgggactaacgatacctcaatatgttttgtcaataccttaaggagtctattgtcctatttttctttcaaggttcgttgtagacttaaggtacacattatgaatcgtgcgttgccttcttttgagttgttacacaac

SEQ ID NO: 207587 - DNA, 2017 bp, Zea Mays
ccccatcccgcgcgtccatcttggtcaagaaaccccaacggcgcgtcgcccccaaaccttagaccccctgcggaaatctctagagccagggtctatccatgggccatcgctgtgcgccagctcttgctccatctctccgcggcggcagcgcaacagccgcccccatgaaagtcgccatcctcaccccccgcgagcctgccccatcccgcttagcgtcgtcccccgccgctgcgcagccgcgacccatctggataaggatgcatccgcttctcccatagccgccactacccctgcctgccctctgctacgaacacgaagataccctggatggaggtggagctctcagaggcttaagatctagaactctatcgcgtactacggattccacagggtgaggagagatacgagcaggtgtcccaccggcgatgcgggtccaatcttcggcattgggagcaatccgcctactcgaccacgaaggttctctgaggcggtgtagccagagatcatgcgggcaacagggaaggacgatagctacgcagcccacatcacgaaggcatataagtgggagttcgccgaaagggaaggtttgcaactggttgtgctaaatccagggactactctgggcccatttttcatgtcatcagtcaataccagcctgaataatctattgcaactcctaagagggtgggtctatcaaggaggacaaacaggttggttgatgagagcaaaggagctttccaagaagttgattgatctgggcatttgtttccttccgtttgatgtgaccatcagggagaccgtcgattgcttcagaagcaaagggctcatctagccctgtgaacatttccagatgtaccagggttactattgcttactagaatgaggcgagagctgcttagctcctttgacattccttctacttagtggcaattggtttggttacttgaacctatgctccatatgatccacgctgattgaattttggtttgttaatacattttgggcaagcagtgctatgagatggagatgatggttaggcatgatctttctataggttaaaagaacagattatccaacagctgatggaacctgcattagagatattatgttgatgtcacaaatttagttgatgctcatgtgaaagcgctcaacaaggcagacactagaaaagtcagtatttacaacgttggaacaggaagaggtttggtaacacgagaattgtttatttatttgtataactattatttattcatatggatagttgtaccctgcacaggttttaatcagtactttacttaatttacatggtaacaagatagagaggcccgcaaatagttaatctgggacaacatatctctgtactggccatagaggacaacaaaaaaatcaaaagttgaagaatcaccaacggtgcctcctttgcaccctccggctcaagaacctaggcccgagccagttcaacaagtcatgcccacagctgaagtgctgaaccaacagatttactgggaatcaatgaatcagcccgaggcacatctgaaatagatcaaaacaaggtagtcgccttggtcgtggttccacatgataatccgccaaaagcaccttcttctaccagtcctggaagcgtggtgactagctggagcaattcagattctgtgcgttgaaaaggaagtgaaagaggctattgttcaggtactaatttgccatagtgttggtctatgactgaatggtacaaaatgcatgcaatgaatggatgatactttccagttaaatcatgtaattggaatacagtggtgccgtcagtggtgcggattgggggcttctagagaaagggtctagcgtcgtgcccttcttgacgaacagtgtgttgatgtgtgccatcatcgcactgggaacgaacgtgatggctagcacggggagcatcttgagcatctgctttgtctccaccactcaccatgctctgagcctgtgttgggagcttcggttcgcgatggaagtcttcctctctgtagaaggtctt

SEQ ID NO: 207588 - DNA, 1867 bp, Zea Mays
ccccatcccgcgcgtccatcttggtcaagaaaccccaacggcgcgtcgcccccaaaccttagaccccctgcggaaatctctagagccagggtctatccatgggccatcgctgtgcgccagctcttgctccatctctccgcggcggcagcgcaacagccgcccccatgaaagtcgccatcctcaccccccgcgagcctgccccatcccgcttagcgtcgtcccccgccgctgcgcagccgcgacccatctggataaggatgcatccgcttctcccatagccgccactacccctgcctgccctctgctacgaacacgaagataccctggatggaggtggagctctcagaggcttaagatctagaactctatcgcgtactacggattccacagggtgaggagagatacgagcaggtgtcccaccggcgatgcgggtccaatcttcggcattgggagcaatccgcctactcgaccacgaaggttctctgaggcggtgtagccagagatcatgcgggcaacagggaaggacgatagctacgcagcccacatcacgaaggcatataagtgggagttcgccgaaagggaaggtttgcaactggttgtgctaaatccagggactactctgggcccatttttcatgtcatcagtcaataccagcctgaataatctattgcaactcctaagaggttgaaaattaaccaggccaacgtcttgagttggaccctgtcaacacagggtgggtctatcaaggaggacaaacaggttggttgatgagagcaaaggagctttccaagaagttgattgatctgggcatttgtttccttccgtttgatgtgaccatcagggagaccgtcgattgcttcagaagcaaagggctcatctagccctgtgaacatttccagatgttaaaagaacagattatccaacagctgatggaacctgcattagagatattatgttgatgtcacaaatttagttgatgctcatgtgaaagcgctcaacaaggcagacactagaaaagtcagtatttacaacgttggaacaggaagaggtttggtaacacgagaattgtttatttatttgtataactattatttattcatatggatagttgtaccctgcacaggttttaatcagtactttacttaatttacatggtaacaagatagagaggcccgcaaatagttaatctgggacaacatatctctgtactggccatagaggacaacaaaaaaatcaaaagttgaagaatcaccaacggtgcctcctttgcaccctccggctcaagaacctaggcccgagccagttcaacaagtcatgcccacagctgaagtgctgaaccaacagatttactgtagggaatcaatgaatcagcccgaggcacatctgaaatagatcaaaacaaggtagtcgccttggtcgtggttccacatgataatccgccaaaagcaccttcttctaccagtcctggaagcgtggtgactagctggagcaattcagattctgtgcgttgaaaaggaagtgaaagaggctattgttcaggtactaatttgccatagtgttggtctatgactgaatggtacaaaatgcatgcaatgaatggatgatactttccagttaaatcatgtaattggaatacagtggtgccgtcagtggtgcggattgggggcttctagagaaagggtctagcgtcgtgcccttcttgacgaacagtgtgttgatgtgtgccatcatcgcactgggaacgaacgtgatggctagcacggggagcatcttgagcatctgctttgtctccaccactcaccatgctctgagcctgtgttgggagcttcggttcgcgatggaagtcttcctctctgtagaaggtctt

SEQ ID NO: 207589 - DNA, 2778 bp, Zea Mays
ccccatcccgcgcgtccatcttggtcaagaaaccccaacggcgcgtcgcccccaaaccttagaccccctgcggaaatctctagagccagggtctatccatgggccatcgctgtgcgccagctcttgctccatctctccgcggcggcagcgcaacagccgcccccatgaaagtcgccatcctcaccccccgcgagcctgccccatcccgcttagcgtcgtcccccgccgctgcgcagccgcgacccatctggataaggatgcatccgcttctcccatagccgccactacccctgcctgccctctgctacgaacacgaagataccctggatggaggtggagctctcagaggcttaagatctagaactctatcgcgtactacggattccacagggtgaggagagatacgagcaggtgtcccaccggcgatgcgggtccaatcttcggcattgggagcaatccgcctactcgaccacgaaggttctctgaggcggtgtagccagagatcatgcgggcaacagggaaggacgatagctacgcagcccacatcacgaaggcatataagtgggagttcgccgaaagggaaggtttgcaactggttgtgctaaatccagggactactctgggcccatttttcatgtcatcagtcaataccagcctgaataatctattgcaactcctaagaggttgaaaattaaccaggccaacgtcttgagttggaccctgtcaacacagggtgggtctatcaaggaggacaaacaggttaaaagaacagattatccaacagctgatggaacctgcattagagatattatgttgatgtcacaaatttagttgatgctcatgtgaaagcgctcaacaaggcagacactagaaaagtcagtatttacaacgttggaacaggaagaggtttggtaacacgagaattgtttatttatttgtataactattatttattcatatggatagttgtaccctgcacaggttttaatcagtactttacttaatttacatggtaacaagatagagaggcccgcaaatagttaatctgggacaacatatctctgtactggccatagaggacaacaaaaaaatcaaaagttgaagaatcaccaacggtgcctcctttgcaccctccggctcaagaacctaggcccgagccagttcaacaagtcatgcccacagctgaagtgctgaaccaacagatttactgggaatcaatgaatcagcccgaggcacatctgaaatagatcaaaacaaggtagtcgccttggtcgtggttccacatgataatccgccaaaagcaccttcttctaccagtcctggaagcgtggtgactagctggagcaattcagattctgtgcgttgaaaaggaagtgaaagaggtatatcttgtttacattaaaatatcaaagtactttgcagattttatttcagctctgttgcatgatgcactcgcactactgtctactgcaagtaccatcaccataaactctgaacgctctatgttcggtttcatctttttctttaactagattcgctttcctgtttcttataggctattgttcaggtactaatttgccatagtgttggtctatgactgaatggtacaaaatgcatgcaatgaatggatgatactttccagttaaatcatgtaattggaatacagtggtgccgtcagtggtgcggattgggggcttctagagaaagggtctagcgtcgtgcccttcttgacgaacagtgtgttgatgtgtgccatcatcgcactgggaacgaacgtgatggctagcacggggagcatcttgagcatctgctttgtctccaccactcaccatgctctgagcctgtgttggtatgcagacttttccctttgtttcagaagaagatgcagttgcattgcacattgttagaacccacgatcaccacaaaattgagggaatatgtcataactcattagtcattaccttgtcaaggtttatgctttccatcacgaacggttggagttgcaacataacgatactttggtataccaaataaagttactctattcaccaaatcatgcagtgttagttttttgttgtgctaaatactgaatataatttgggtgtgttaatattttatttattgtctgcacatggttttctgatgatggctcatgaatcctgtaaaatacgtgttaggatttggagatccatgcgggcactaccacagtccatagggtgctcatctcttgtgttcttggctcttgcaagcattaggtcgtttctaaaatcacattggcacaatgaactctatggtgtttgaggttgctgaattggatggagcaacaatgatttgtcgcactaacagtaaaagaaacggttacttgttggttttaaatgttagtaattactacgaagtacaataatttgtatggagcatatccagtttagcaactattccatattttaatctatcttttttataagttttagttcatgtgacttattttagaaacttgaactcacaaactttctcttatttggtctctatatggtggaattatgtcattctataatctctgttcgtttattcagtcgttgtgaactctcttctaattgctcccttcattggttgtgttgtactaatacatattggatgaagtaaacagcaatatcagttagtcaaataaaaaaatattatgtggagagcgaagacaatcaataaaaaaccttgagatctttttggtggatagtttacgtgggtattgttgtgagccgtcgcaacgcacgggcaaccgac

SEQ ID NO: 207590 - DNA, 3042 bp, Zea Mays
ccccatcccgcgcgtccatcttggtcaagaaaccccaacggcgcgtcgcccccaaaccttagaccccctgcggaaatctctagagccagggtctatccatgggccatcgctgtgcgccagctcttgctccatctctccgcggcggcagcgcaacagccgcccccatgaaagtcgccatcctcaccccccgcgagcctgccccatcccgcttagcgtcgtcccccgccgctgcgcagccgcgacccatctggataaggatgcatccgcttctcccatagccgccactacccctgcctgccctctgctacgaacacgaagataccctggatggaggtggagctctcagaggcttaagatctagaactctatcgcgtactacggattccacagggtgaggagagatacgagcaggtgtcccaccggcgatgcgggtccaatcttcggcattgggagcaatccgcctactcgaccacgaaggttctctgaggcggtgtagccagagatcatgcgggcaacagggaaggacgatagctacgcagcccacatcacgaaggcatataagtgggagttcgccgaaagggaaggtttgcaactggttgtgctaaatccagggactactctgggcccatttttcatgtcatcagtcaataccagcctgaataatctattgcaactcctaagaggttgaaaattaaccaggccaacgtcttgagttggaccctgtcaacacagggtgggtctatcaaggaggacaaacaggttggttgatgagagcaaaggagctttccaagaagttgattgatctgggcatttgtttccttccgtttgatgtgaccatcagggagaccgtcgattgcttcagaagcaaagggctcatctagccctgtgaacatttccagatgttaaaagaacagattatccaacagctgatggaacctgcattagagatattatgttgatgtcacaaatttagttgatgctcatgtgaaagcgctcaacaaggcagacactagaaaagtcagtatttacaacgttggaacaggaagagatagagaggcccgcaaatagttaatctgggacaacatatctctgtactggccatagaggacaacaaaaaaatcaaaagttgaagaatcaccaacggtgcctcctttgcaccctccggctcaagaacctaggcccgagccagttcaacaagtcatgcccacagctgaagtgctgaaccaacagatttactgtagggaatcaatgaatcagcccgaggcacatctgaaatagatcaaaacaaggtagtcgccttggtcgtggttccacatgataatccgccaaaagcaccttcttctaccagtcctggaagcgtggtgactagctggagcaattcagattctgtgcgttgaaaaggaagtgaaagaggtatatcttgtttacattaaaatatcaaagtactttgcagattttatttcagctctgttgcatgatgcactcgcactactgtctactgcaagtaccatcaccataaactctgaacgctctatgttcggtttcatctttttctttaactagattcgctttcctgtttcttataggctattgttcaggtactaatttgccatagtgttggtctatgactgaatggtacaaaatgcatgcaatgaatggatgatactttccagttaaatcatgtaattggaatacagtggtgccgtcagtggtgcggattgggggcttctagagaaagggtctagcgtcgtgcccttcttgacgaacagtgtgttgatgtgtgccatcatcgcactgggaacgaacgtgatggctagcacggggagcatcttgagcatctgctttgtctccaccactcaccatgctctgagcctgtgttggtatgcagacttttccctttgtttcagaagaagatgcagttgcattgcacattgttagaacccacgatcaccacaaaattgagggaatatgtcataactcattagtcattaccttgtcaaggtttatgctttccatcacgaacggttggagttgcaacataacattcatggtagtaaattgggacagggctaatatagtgatgtatttccttccatagcaaacatcaatgatggcttatgggcttgtcttatgtagcgcttctgatttacaatgcatctgtctgaacttgtgtgctctaaaacatacagtgcttcagcaaccaacatacttgtctgctcatgacttttgatgtatcctgctcagttagtattattagtttcgtatataagctaaacgatactttggtataccaaataaagttactctattcaccaaatcatgcagtgttagttttttgttgtgctaaatactgaatataatttgggtgtgttaatattttatttattgtctgcacatggttttctgatgatggctcatgaatcctgtaaaatacgtgttaggatttggagatccatgcgggcactaccacagtccatagggtgctcatctcttgtgttcttggctcttgcaagcattaggtcgtttctaaaatcacattggcacaatgaactctatggtgtttgaggttgctgaattggatggagcaacaatgatttgtcgcactaacagtaaaagaaacggttacttgttggttttaaatgttagtaattactacgaagtacaataatttgtatggagcatatccagtttagcaactattccatattttaatctatcttttttataagttttagttcatgtgacttattttagaaacttgaactcacaaactttctcttatttggtctctatatggtggaattatgtcattctataatctctgttcgtttattcagtcgttgtgaactctcttctaattgctcccttcattggttgtgttgtactaatacatattggatgaagtaaacagcaatatcagttagtcaaataaaaaaatattatgtggagagcgaagacaatcaataaaaaaccttgagatctttttggtggatagtttacgtgggtattgttgtgagccgtcgcaacgcacgggcaaccgac

SEQ ID NO: 207591 - DNA, 2862 bp, Zea Mays
ccccatcccgcgcgtccatcttggtcaagaaaccccaacggcgcgtcgcccccaaaccttagaccccctgcggaaatctctagagccagggtctatccatgggccatcgctgtgcgccagctcttgctccatctctccgcggcggcagcgcaacagccgcccccatgaaagtcgccatcctcaccccccgcgagcctgccccatcccgcttagcgtcgtcccccgccgctgcgcagccgcgacccatctggataaggatgcatccgcttctcccatagccgccactacccctgcctgccctctgctacgaacacgaagataccctggatggaggtggagctctcagaggcttaagatctagaactctatcgcgtactacggattccacagggtgaggagagatacgagcaggtgtcccaccggcgatgcgggtccaatcttcggcattgggagcaatccgcctactcgaccacgaaggttctctgaggcggtgtagccagagatcatgcgggcaacagggaaggacgatagctacgcagcccacatcacgaaggcatataagtgggagttcgccgaaagggaaggtttgcaactggttgtgctaaatccagggactactctgggcccatttttcatgtcatcagtcaataccagcctgaataatctattgcaactcctaagaggttgaaaattaaccaggccaacgtcttgagttggaccctgtcaacacagggtgggtctatcaaggaggacaaacaggttggttgatgagagcaaaggagctttccaagaagttgattgatctgggcatttgtttccttccgtttgatgtgaccatcagggagaccgtcgattgcttcagaagcaaagggctcatctagccctgtgaacatttccagatgttaaaagaacagattatccaacagctgatggaacctgcattagagatattatgttgatgtcacaaatttagttgatgctcatgtgaaagcgctcaacaaggcagacactagaaaagtcagtatttacaacgttggaacaggaagagagaggcccgcaaatagttaatctgggacaacatatctctgtactggccatagaggacaacaaaaaaatcaaaagttgaagaatcaccaacggtgcctcctttgcaccctccggctcaagaacctaggcccgagccagttcaacaagtcatgcccacagctgaagtgctgaaccaacagatttactgggaatcaatgaatcagcccgaggcacatctgaaatagatcaaaacaaggtagtcgccttggtcgtggttccacatgataatccgccaaaagcaccttcttctaccagtcctggaagcgtggtgactagctggagcaattcagattctgtgcgttgaaaaggaagtgaaagaggctattgttcaggtactaatttgccatagtgttggtctatgactgaatggtacaaaatgcatgcaatgaatggatgatactttccagttaaatcatgtaattggaatacagtggtgccgtcagtggtgcggattgggggcttctagagaaagggtctagcgtcgtgcccttcttgacgaacagtgtgttgatgtgtgccatcatcgcactgggaacgaacgtgatggctagcacggggagcatcttgagcatctgctttgtctccaccactcaccatgctctgagcctgtgttggtatgcagacttttccctttgtttcagaagaagatgcagttgcattgcacattgttagaacccacgatcaccacaaaattgagggaatatgtcataactcattagtcattaccttgtcaaggtttatgctttccatcacgaacggttggagttgcaacataacattcatggtagtaaattgggacagggctaatatagtgatgtatttccttccatagcaaacatcaatgatggcttatgggcttgtcttatgtagcgcttctgatttacaatgcatctgtctgaacttgtgtgctctaaaacatacagtgcttcagcaaccaacatacttgtctgctcatgacttttgatgtatcctgctcagttagtattattagtttcgtatataagctaaacgatactttggtataccaaataaagttactctattcaccaaatcatgcagtgttagttttttgttgtgctaaatactgaatataatttgggtgtgttaatattttatttattgtctgcacatggttttctgatgatggctcatgaatcctgtaaaatacgtgttaggatttggagatccatgcgggcactaccacagtccatagggtgctcatctcttgtgttcttggctcttgcaagcattaggtcgtttctaaaatcacattggcacaatgaactctatggtgtttgaggttgctgaattggatggagcaacaatgatttgtcgcactaacagtaaaagaaacggttacttgttggttttaaatgttagtaattactacgaagtacaataatttgtatggagcatatccagtttagcaactattccatattttaatctatcttttttataagttttagttcatgtgacttattttagaaacttgaactcacaaactttctcttatttggtctctatatggtggaattatgtcattctataatctctgttcgtttattcagtcgttgtgaactctcttctaattgctcccttcattggttgtgttgtactaatacatattggatgaagtaaacagcaatatcagttagtcaaataaaaaaatattatgtggagagcgaagacaatcaataaaaaaccttgagatctttttggtggatagtttacgtgggtattgttgtgagccgtcgcaacgcacgggcaaccgac

SEQ ID NO: 207592 - DNA, 2822 bp, Zea Mays
ggctgtggcaattgaacatattttaaggatgatattctttttctaaggttgaaccgaagcattagtggaatccggaatcctggtgttattggggacaggagatccatttcaagaggaagttctttaactcttgactggcctgaggatgtggagttttcaaactgggtagatcaagatgtatttgaaaatgaggaattccaggaaagtaaaagatggtggtcatccaattcttcagtgcagcaaggggattccaactccagaccactaagtcgaacatcttcctaccctcagcagccactgcagcaccggtcaagtgaacctatcgttttaccaaagacttcttcatttacctcatttccaccacctgttgctggtggtggtagagccccttaccctgctcaaggccttacacgtcatgggagcattccatcaattggcgctgggctccaaatgggttctccgagcatgtcactttctgcttctccatatcatatggtcggaccatctcatgggctgccatacacgggaggcatgccttatggtgctcttaacctgcctgtaaacaatccagtgcagaatgattggtcgaatcatgttaaccctttcactggggagcatcttaatctactgcccaatttattgcacaaacaattatcacttcctaatagcccaatgtcgtcactcctattttctcagcatcagcagagattggcacaggtccaatcatcccatcagaattacctcaatataatgccacacgtcctatatccccatcactccgcagagattacaagcaggtttggttctgttggcagttcccattcatcaagagacaagagatcaaggtcggggaagggaaaacataacattcgattctctcaactaccatctgatactggtagccagaatggtgacagcggaggtataaagtttagatccaagtacatgtcatctgaagagatcgaatcaatcttaagaatgcagcattctgcaagccacagcagcgatccttatattgttgattactatcatcaagcttgtatggcaaaaaggggtgccacttctaagcaaaagaccaatttctccccaacatcaatgaaagatgtaccatccaagtctcgatccagcagtgatcagcacacatatcttcaggttgatgctcttggaagagtatctttttcttccatacggaggcctcggtctcttcttgaagtcgaccatccttcatctgctgatggctctcatgatcagaagtccactgtgaggcccctggagaaagaaccaatgcttgcagcaagagtcactgttgaagacgccctttgccttgttcttgaggttgatgacactgaccgtctgttgcagtctagccagtcacaggacaacattttcgaactgaaacgaagacggcaagtcctcctggaaggtctagctgcatcattgcagtttgttgatcctctcggacccagcaaatctggtcattcatctgggtcagccctgaaggacgatgttatttttctgcgcattgtttctctgcccaaaggacgtaagtttttagcacgttaccttcggcttcttgtccctggcagcgagttgacccggatagtatgcatggctatttttcgccatttgaggttcttgtttgggggtttgccatcagactctagtgcagcagaaactacagttgctcttgcgaagactgtttcatcttgtgtgcatcacatggaacttggtgctcttagtgcctgccttgctgctgttgtttgttcgtctgaacagccacctctgcgccctcttggtagctctgctggtgatggggcttctcttgttattaaatcagtactggaccgagcaactgagttactgactgatcgccatgctgcagccagctacactgtgccaaaccgtgctctctggcaggcatcatttgatgctttctttgggcttctaacaaaatactgtgtcagtaagtttgaaagtatccaacagatgtttgtcacacagacaccgagctcaggaatcggacctgaggcttccaaagctactagtaaggagatgcctgttgagctacttcgtgcaagccttcctcatacaaacgagcagcagcgccagcggcttcttgattttgctcagagatccatgccagtaacaggtttcaatccctcaggtgctagaggtgggcacatcacttcagaatctgttcctggatgatgtaactgaaggagacacacaagggcaaagagtcaatgcttttaaacattgatgagatggtcttcagctgataattgttgtatctgaagacatgcatgccccattataagttgtgagcgagcttggagaagttccgattgctcaggaaagtagccttcacttcaggttgtgacgtaagtttaggtttcagagtaatcgaatagaccagtgaaatgttccttatgtgggtcatttaatatagtacccacctgatgatatcataatactggaacaggaaatgtaccccttcacatttctactagagtcgatgttcttcgtaggccattgtggactggtttgcacatttactgggcatgtatttgtttatattctgacatactgttattgagctactcctgtcctgggtcgggctcttggcttctagtctaggtgggtggaaatgttcgggttgtttttgcttgatcatattctgtcagccttcctttcatcatttccctcaatattccttgtggtgtgtgtggagccatctgccttcgcgaactgtgcgatttccagcatgaattcgttcgttaagaaatgccaaccgttagcttagctccatttaacagcgtgat

SEQ ID NO: 207593 - DNA, 3106 bp, Zea Mays
ttttcgggctcgggtggagacttgttcgtgaggcctatgggtccaagaatcttaacagaaatcgattttgtctgctggaactgtttcgtgtgatgttcttgcgtttagttcgcggttcttagaattttgacgctggccagtacgccttcttcgggaaggagccactcgaggggttcgagctcgggggtttggaggaagccggcagtgatggcaatggcggtggattcagcgggccagatgaggggctgtaccggctaaactcggttggagacgagattgacgatcagagtaacttgtctgacattgatgatcttgcaagcaccttcgctaagttgaaccgaagcattagtggaatccggaatcctggtgttattggggacaggagatccatttcaagaggaagttctttaactcttgactggcctgaggatgtggagttttcaaactgggtagatcaagatgtatttgaaaatgaggaattccaggaaagtaaaagatggtggtcatccaattcttcagtgcagcaaggggattccaactccagaccactaagtcgaacatcttcctaccctcagcagccactgcagcaccggtcaagtgaacctatcgttttaccaaagacttcttcatttacctcatttccaccacctgttgctggtggtggtagagccccttaccctgctcaaggccttacacgtcatgggagcattccatcaattggcgctgggctccaaatgggttctccgagcatgtcactttctgcttctccatatcatatggtcggaccatctcatgggctgccatacacgggaggcatgccttatggtgctcttaacctgcctgtaaacaatccagtgcagaatgattggtcgaatcatgttaaccctttcactggggagcatcttaatctactgcccaatttattgcacaaacaattatcacttcctaatagcccaatgtcgtcactcctattttctcagcatcagcagagattggcacaggtccaatcatcccatcagaattacctcaatataatgccacacgtcctatatccccatcactccgcagagattacaagcaggtttggttctgttggcagttcccattcatcaagagacaagagatcaaggtcggggaagggaaaacataacattcgattctctcaactaccatctgatactggtagccagaatggtgacagcggaggtataaagtttagatccaagtacatgtcatctgaagagatcgaatcaatcttaagaatgcagcattctgcaagccacagcagcgatccttatattgttgattactatcatcaagcttgtatggcaaaaaggggtgccacttctaagcaaaagaccaatttctccccaacatcaatgaaagatgtaccatccaagtctcgatccagcagtgatcagcacacatatcttcaggttgatgctcttggaagagtatctttttcttccatacggaggcctcggtctcttcttgaagtcgaccatccttcatctgctgatggctctcatgatcagaagtccactgtgaggcccctggagaaagaaccaatgcttgcagcaagagtcactgttgaagacgccctttgccttgttcttgaggttgatgacactgaccgtctgttgcagtctagccagtcacaggacaacattttcgaactgaaacgaagacggcaagtcctcctggaaggtctagctgcatcattgcagtttgttgatcctctcggacccagcaaatctggtcattcatctgggtcagccctgaaggacgatgttatttttctgcgcattgtttctctgcccaaaggacgtaagtttttagcacgttaccttcggcttcttgtccctggcagcgagttgacccggatagtatgcatggctatttttcgccatttgaggttcttgtttgggggtttgccatcagactctagtgcagcagaaactacagttgctcttgcgaagactgtttcatcttgtgtgcatcacatggaacttggtgctcttagtgcctgccttgctgctgttgtttgttcgtctgaacagccacctctgcgccctcttggtagctctgctggtgatggggcttctcttgttattaaatcagtactggaccgagcaactgagttactgactgatcgccatgctgcagccagctacactgtgccaaaccgtgctctctggcaggcatcatttgatgctttctttgggcttctaacaaaatactgtgtcagtaagtttgaaagtatccaacagatgtttgtcacacagacaccgagctcaggaatcggacctgaggcttccaaagctactagtaaggagatgcctgttgagctacttcgtgcaagccttcctcatacaaacgagcagcagcgccagcggcttcttgattttgctcagagatccatgccagtaacaggtttcaatccctcaggtgctagaggtgggcacatcacttcagaatctgttcctggatgatgtaactgaaggagacacacaagggcaaagagtcaatgcttttaaacattgatgagatggtcttcagctgataattgttgtatctgaagacatgcatgccccattataagttgtgagcgagcttggagaagttccgattgctcaggaaagtagccttcacttcaggttgtgacgtaagtttaggtttcagagtaatcgaatagaccagtgaaatgttccttatgtgggtcatttaatatagtacccacctgatgatatcataatactggaacaggaaatgtaccccttcacatttctactagagtcgatgttcttcgtaggccattgtggactggtttgcacatttactgggcatgtatttgtttatattctgacatactgttattgagctactcctgtcctgggtcgggctcttggcttctagtctaggtgggtggaaatgttcgggttgtttttgcttgatcatattctgtcagccttcctttcatcatttccctcaatattccttgtggtgtgtgtggagccatctgccttcgcgaactgtgcgatttccagcatgaattcgttcgttaagaaatgccaaccgttagcttagctccatttaacagcgtgat

SEQ ID NO: 207594 - DNA, 3017 bp, Zea Mays
gagactcttggccgctgaatccgctgcgctgagaattttgacgctggccagtacgccttcttcgggaaggagccactcgaggggttcgagctcgggggtttggaggaagccggcagtgatggcaatggcggtggattcagcgggccagatgaggggctgtaccggctaaactcggttggagacgagattgacgatcagagtaacttgtctgacattgatgatcttgcaagcaccttcgctaagttgaaccgaagcattagtggaatccggaatcctggtgttattggggacaggagatccatttcaagaggaagttctttaactcttgactggcctgaggatgtggagttttcaaactgggtagatcaagatgtatttgaaaatgaggaattccaggaaagtaaaagatggtggtcatccaattcttcagtgcagcaaggggattccaactccagaccactaagtcgaacatcttcctaccctcagcagccactgcagcaccggtcaagtgaacctatcgttttaccaaagacttcttcatttacctcatttccaccacctgttgctggtggtggtagagccccttaccctgctcaaggccttacacgtcatgggagcattccatcaattggcgctgggctccaaatgggttctccgagcatgtcactttctgcttctccatatcatatggtcggaccatctcatgggctgccatacacgggaggcatgccttatggtgctcttaacctgcctgtaaacaatccagtgcagaatgattggtcgaatcatgttaaccctttcactggggagcatcttaatctactgcccaatttattgcacaaacaattatcacttcctaatagcccaatgtcgtcactcctattttctcagcatcagcagagattggcacaggtccaatcatcccatcagaattacctcaatataatgccacacgtcctatatccccatcactccgcagagattacaagcaggtttggttctgttggcagttcccattcatcaagagacaagagatcaaggtcggggaagggaaaacataacattcgattctctcaactaccatctgatactggtagccagaatggtgacagcggaggtataaagtttagatccaagtacatgtcatctgaagagatcgaatcaatcttaagaatgcagcattctgcaagccacagcagcgatccttatattgttgattactatcatcaagcttgtatggcaaaaaggggtgccacttctaagcaaaagaccaatttctccccaacatcaatgaaagatgtaccatccaagtctcgatccagcagtgatcagcacacatatcttcaggttgatgctcttggaagagtatctttttcttccatacggaggcctcggtctcttcttgaagtcgaccatccttcatctgctgatggctctcatgatcagaagtccactgtgaggcccctggagaaagaaccaatgcttgcagcaagagtcactgttgaagacgccctttgccttgttcttgaggttgatgacactgaccgtctgttgcagtctagccagtcacaggacaacattttcgaactgaaacgaagacggcaagtcctcctggaaggtctagctgcatcattgcagtttgttgatcctctcggacccagcaaatctggtcattcatctgggtcagccctgaaggacgatgttatttttctgcgcattgtttctctgcccaaaggacgtaagtttttagcacgttaccttcggcttcttgtccctggcagcgagttgacccggatagtatgcatggctatttttcgccatttgaggttcttgtttgggggtttgccatcagactctagtgcagcagaaactacagttgctcttgcgaagactgtttcatcttgtgtgcatcacatggaacttggtgctcttagtgcctgccttgctgctgttgtttgttcgtctgaacagccacctctgcgccctcttggtagctctgctggtgatggggcttctcttgttattaaatcagtactggaccgagcaactgagttactgactgatcgccatgctgcagccagctacactgtgccaaaccgtgctctctggcaggcatcatttgatgctttctttgggcttctaacaaaatactgtgtcagtaagtttgaaagtatccaacagatgtttgtcacacagacaccgagctcaggaatcggacctgaggcttccaaagctactagtaaggagatgcctgttgagctacttcgtgcaagccttcctcatacaaacgagcagcagcgccagcggcttcttgattttgctcagagatccatgccagtaacaggtttcaatccctcaggtgctagaggtgggcacatcacttcagaatctgttcctggatgatgtaactgaaggagacacacaagggcaaagagtcaatgcttttaaacattgatgagatggtcttcagctgataattgttgtatctgaagacatgcatgccccattataagttgtgagcgagcttggagaagttccgattgctcaggaaagtagccttcacttcaggttgtgacgtaagtttaggtttcagagtaatcgaatagaccagtgaaatgttccttatgtgggtcatttaatatagtacccacctgatgatatcataatactggaacaggaaatgtaccccttcacatttctactagagtcgatgttcttcgtaggccattgtggactggtttgcacatttactgggcatgtatttgtttatattctgacatactgttattgagctactcctgtcctgggtcgggctcttggcttctagtctaggtgggtggaaatgttcgggttgtttttgcttgatcatattctgtcagccttcctttcatcatttccctcaatattccttgtggtgtgtgtggagccatctgccttcgcgaactgtgcgatttccagcatgaattcgttcgttaagaaatgccaaccgttagcttagctccatttaacagcgtgat

SEQ ID NO: 207595 - DNA, 3570 bp, Zea Mays
gtctcatctaccactacaattgccaatctgcctctagtttctgcactgttacgattcgcctagtactcctctccttcaccttgatgtgcctcggaatctgatattctatttttttcagaagctaggtagtactacctcgaaggggaaaatcgtttcttttttttcactattattttctttttgggagtgaggtctctccccctgtgggctgtgggctgtgggctgtcactgacctcttcccttctgtgtccgccaatttatctggtgccctgagctctcttgtgtgtgatctgtgaatcactgaatccttctcgccaacagcccaacacatggaaaagagagctgcagaagcagacgcctaaaacatggccgcagtatgctcctcattcacctgccgcgtctagtatttcggaaatattttgtatttattaaagcaggagagggaggcaagcagcagccgaggccgagctatctctctatttccccctcgcccagctcagatccgaagcctgaaggaaatcgcgccaacaggccctagccccagatgcgcgccgccgcttgctgcctgcgctgctgctactccttctaggggtcttgcggcgatgctgggcgtcgagcccgagagcggaggcgccgcgtcctcctccgccgcagagaattttgacgctggccagtacgccttcttcgggaaggagccactcgaggggttcgagctcgggggtttggaggaagccggcagtgatggcaatggcggtggattcagcgggccagatgaggggctgtaccggctaaactcggttggagacgagattgacgatcagagtaacttgtctgacattgatgatcttgcaagcaccttcgctaaggttctttaactcttgactggcctgaggatgtggagttttcaaactgggtagatcaagatgtatttgaaaatgaggaattccaggaaagtaaaagatggtggtcatccaattcttcagtgcagcaaggggattccaactccagaccactaagtcgaacatcttcctaccctcagcagccactgcagcaccggtcaagtgaacctatcgttttaccaaagacttcttcatttacctcatttccaccacctgttgctggtggtggtagagccccttaccctgctcaaggccttacacgtcatgggagcattccatcaattggcgctgggctccaaatgggttctccgagcatgtcactttctgcttctccatatcatatggtcggaccatctcatgggctgccatacacgggaggcatgccttatggtgctcttaacctgcctgtaaacaatccagtgcagaatgattggtcgaatcatgttaaccctttcactggggagcatcttaatctactgcccaatttattgcacaaacaattatcacttcctaatagcccaatgtcgtcactcctattttctcagcatcagcagagattggcacaggtccaatcatcccatcagaattacctcaatataatgccacacgtcctatatccccatcactccgcagagattacaagcaggtttggttctgttggcagttcccattcatcaagagacaagagatcaaggtcggggaagggaaaacataacattcgattctctcaactaccatctgatactggtagccagaatggtgacagcggaggtataaagtttagatccaagtacatgtcatctgaagagatcgaatcaatcttaagaatgcagcattctgcaagccacagcagcgatccttatattgttgattactatcatcaagcttgtatggcaaaaaggggtgccacttctaagcaaaagaccaatttctccccaacatcaatgaaagatgtaccatccaagtctcgatccagcagtgatcagcacacatatcttcaggttgatgctcttggaagagtatctttttcttccatacggaggcctcggtctcttcttgaagtcgaccatccttcatctgctgatggctctcatgatcagaagtccactgtgaggcccctggagaaagaaccaatgcttgcagcaagagtcactgttgaagacgccctttgccttgttcttgaggttgatgacactgaccgtctgttgcagtctagccagtcacaggacaacattttcgaactgaaacgaagacggcaagtcctcctggaaggtctagctgcatcattgcagtttgttgatcctctcggacccagcaaatctggtcattcatctgggtcagccctgaaggacgatgttatttttctgcgcattgtttctctgcccaaaggacgtaagtttttagcacgttaccttcggcttcttgtccctggcagcgagttgacccggatagtatgcatggctatttttcgccatttgaggttcttgtttgggggtttgccatcagactctagtgcagcagaaactacagttgctcttgcgaagactgtttcatcttgtgtgcatcacatggaacttggtgctcttagtgcctgccttgctgctgttgtttgttcgtctgaacagccacctctgcgccctcttggtagctctgctggtgatggggcttctcttgttattaaatcagtactggaccgagcaactgagttactgactgatcgccatgctgcagccagctacactgtgccaaaccgtgctctctggcaggcatcatttgatgctttctttgggcttctaacaaaatactgtgtcagtaagtttgaaagtatccaacagatgtttgtcacacagacaccgagctcaggaatcggacctgaggcttccaaagctactagtaaggagatgcctgttgagctacttcgtgcaagccttcctcatacaaacgagcagcagcgccagcggcttcttgattttgctcagagatccatgccagtaacaggtttcaatccctcaggtgctagaggtgggcacatcacttcagaatctgttcctggatgatgtaactgaaggagacacacaagggcaaagagtcaatgcttttaaacattgatgagatggtcttcagctgataattgttgtatctgaagacatgcatgccccattataagttgtgagcgagcttggagaagttccgattgctcaggaaagtagccttcacttcaggttgtgacgtaagtttaggtttcagagtaatcgaatagaccagtgaaatgttccttatgtgggtcatttaatatagtacccacctgatgatatcataatactggaacaggaaatgtaccccttcacatttctactagagtcgatgttcttcgtaggccattgtggactggtttgcacatttactgggcatgtatttgtttatattctgacatactgttattgagctactcctgtcctgggtcgggctcttggcttctagtctaggtgggtggaaatgttcgggttgtttttgcttgatcatattctgtcagccttcctttcatcatttccctcaatattccttgtggtgtgtgtggagccatctgccttcgcgaactgtgcgatttccagcatgaattcgttcgttaagaaatgccaaccgttagcttagctccatttaacagcgtgat

SEQ ID NO: 207596 - DNA, 3598 bp, Zea Mays
atgccccccgcctccatagtccctgtcatcggcgacctcagatccaacaggttggtctgcttgcgccgtgatcgcggaagctaccgcgccttcgtctccgtggatgaggtcctggatttgtgtgtcactggcgcggaatatgagggatcgagggcggcgcaggcggcgagctcgtgggcggaacagactggtgagagcaagaggatggatcaggagcttgagccccaggtacaaagactaacatcagcttctactgtactaaggagggtgttggataatccagcactccaggactatcaagagaataatggatttggagacttgaagttaagccttactgtttaggacttcactctcccagtgacacctactttacctgctgtttttgctgtatcctggcaatattcctttttactgtgatccatttccatttctgtgatgtgctcaactttacgtttggataaaagttagtaaggtaaagtaaacacattcacaaattcaagtactgagaagaaaaattgtacgtttcaaagtagttgtccaagttatgccaacttgcttttatgtaacgacagcaagaaaactgatctaagacctgcattgtggtgaattttgcagctgtccggccgcgtgtaccgcgtcaccttcaccaaccggctcaacggggccgcaggcgcggtgccgtgaagcagatacggaccgccgggaaactgtacctccacaagtaaaatatttatttagccctctgtctttgtttttttccatattctaagtttatacctaataacacatttgcacatacttgatgcatttgtctatggtattttctttttataaagtgaatcatcttgacaatgaaatagtgcatttatcagttttgtaatgggacatcactcctcaagtatccagaaggtaaactagatgtatttctcatacatcaattgggcaagtctgagagatagctgtcccaatttgtccagaaatttatttacctgtacctccacaagtaaaatatgtatttagccctctatctttgtttttttccatattctaagtttatacccgatgtataaatctacagatactttcttacctttgtttagttacgataaactttatccatcaattattttgtatacttttctaacctatgtaaatttagaggttaatttggactgtttaatatttaaatgttgtgggtggattaaggggttatttagtgttttaagtacaaacagaggaggacaattcatgcacatactttagctttttattgcaatgatagataatttatatgaagtttaggacttattttggatataatatgtcagaatgacagagattcacctgataggcgagcatgagttctcgctaaaatgtagcattgagtattgactgcagttcagtaagtaaattaaagcatgatagtattgttgatccagtgaacccttcatcctatattctctttgagctaatcttcttgcaccttgatgtaaaccttgacatatctgatggttctgctcagtgcttgtgtcttagattattgcactgacgtaattggaaaatgagtaatctgccaggaagcaacatattgtgttttactgaagtacagttagtcctgctgtcgcacaactttgctctgatgtttgaaagcataaagtatgttttcctaccatgggagaggtccaactgatattgcatctggatcttttgtgaaacatgatagcacttagcaacgctaggcagaagatgcacttttgaaatgtagtgttgcaccgttgctgtcgcaatcgttagttacacatatgttctctatatgctgtcagatatccatatctcttaatggtcgtacctaccaatttgattctgataaaaatcaatcaatctattagttacagaacaagcagagaactcactgtacacggtctcttcttgtactgaactggtattcaacttcattcaaagagttctggaaatgaacttccatcagacttgatagacacactactaaagtggatcccaagcaatgatgaggagcttaggcttcgactgtcctcccgtagcaccgccacaccgcacgcgtccgtggcggtcgaacatgcattttggagagaccaacttgaatgtgcggagcagtcgatcacacaatattttcataatgttgaatggaagcgataactaaatcaaggatgttctatttatatcggtctcagttgcatggaagcaataactgaatcaagaatgctctatttatttcgatctcagccattttggaggacgaacgagcaccggggagagtccaggaggaggcagatactgctgggacatgtccaagccagtggagatgcagtggagatggagatcaacattggcatggagaagctgtgaaacccaccgcagcagaaccccacccagaggaagtggcctcgcgtctcgtaagagtggcagacagtgatcggcgggttctttgcgacacgggctgctcttcgaccatgagcttcttgttactattcccccgcgacatttgtttggcatttctgttaacgattttctttgtttatattacactaaagtcaaagcctgaagccacgtcggcaactggatctaccattatgacataagcagaaatctaaataacacaaaaaaatcaggattactatatatttgtgcacaaagccacgaagaattgcatgaattgtggacaaagctgaaattcaaggatgctgaaagcctgcagcagacttctgacatggagagtgtgaatcttctccaaagtggggggccatgagatcaatgttgcctcggatcaatcacaaacaaggttgtctggatacacttcagttccatatacaagcttccctgcccaggcagagctaactgttgtaggttgcagcaaaggattggatgcaaaagggcgctggacacgtgctcgtgtggcccaagtgagcatgctaatcagccccttttggttccttgcacagcttacgttcaatctgtctctaagatacaccactgtcacggtaagtgttactaagaactgaatgatacttccatattttaaagccaaacctggcccaggcaccacccaggcaccagaggcctccaaacggtcaaggatacaccactgtcacggtcaagtcctgcagaagctgaaactgatcatggataagactttgccttgtgtcacaatgggtgcatttgctggtggtccttggatcaggttgctcatgggtggtgaatgatctgacgacttcagaagaggatagatctgagattacctttcatgcatgtcaaggaagttaagtagctgatgccatcaaagaaatggagaaacgtcaggtgaaccgcgagcagaattccgtggcgcatttgttagcgcagttagttaggactctgttcatacagctgttcgattaagccaaatacctgatttagttttatattggttgttgtcaaagaatttgtgaaatattgaggttgataatatatgtggcgttcgtttttatgtaatcattgttcactaatattttgtcgaatattttatattatatagacattactaagaacgtaaggggtcgctcgtgctctgtaaaggtac

SEQ ID NO: 207597 - DNA, 2350 bp, Zea Mays
atgccccccgcctccatagtccctgtcatcggcgacctcagatccaacaggttggtctgcttgcgccgtgatcgcggaagctaccgcgccttcgtctccgtggatgaggtcctggatttgtgtgtcactggcgcggaatatgagggatcgagggcggcgcaggcggcgagctcgtgggcggaacagactggtgagagcaagaggatggatcaggagcttgagccccaggtacaaagactaacatcagcttctactgtactaaggagggtgttggataatccagcactccaggactatcaagagaataatggatttggagacttgaagttaagccttactgtttaggacttcactctcccagtgacacctactttacctgctgtttttgctgtatcctggcaatattcctttttactgtgatccatttccatttctgtgatgtgctcaactttacgtttggataaaagttagtaaggtaaagtaaacacattcacaaattcaagtactgagaagaaaaattgtacgtttcaaagtagttgtccaagttatgccaacttgcttttatgtaacgacagcaagaaaactgatctaagacctgcattgtggtgaattttgcagctgtccggccgcgtgtaccgcgtcaccttcaccaaccggctcaacggggccgcaggcgcggtgccgtgaagcagatacggaccgccgggaaactgtacctccacaagaaatgaacttccatcagacttgatagacacactactaaagtggatcccaagcaatgatgaggagcttaggcttcgactgtcctcccgtagcaccgccacaccgcacgcgtccgtggcggtcgaacatgcattttggagagaccaacttgaatgtgcggagcagtcgatcacacaatattttcataatgttgaatggaagcgataactaaatcaaggatgttctatttatatcggtctcagttgcatggaagcaataactgaatcaagaatgctctatttatttcgatctcagccattttggaggacgaacgagcaccggggagagtccaggaggaggcagatactgctgggacatgtccaagccagtggagatgcagtggagatggagatcaacattggcatggagaagctgtgaaacccaccgcagcagaaccccacccagaggaagtggcctcgcgtctcgtaagagtggcagacagtgatcggcgggttctttgcgacacgggctgctcttcgaccatgagcttcttgttactattcccccgcgacatttgtttggcatttctgttaacgattttctttgtttatattacactaaagtcaaagcctgaagccacgtcggcaactggatctaccattatgacataagcagaaatctaaataacacaaaaaaatcaggattactatatatttgtgcacaaagccacgaagaattgcatgaattgtggacaaagctgaaattcaaggatgctgaaagcctgcagcagacttctgacatggagagtgtgaatcttctccaaagtggggggccatgagatcaatgttgcctcggatcaatcacaaacaaggttgtctggatacacttcagttccatatacaagcttccctgcccaggcagagctaactgttgtaggttgcagcaaaggattggatgcaaaagggcgctggacacgtgctcgtgtggcccaagtgagcatgctaatcagccccttttggttccttgcacagcttacgttcaatctgtctctaagatacaccactgtcacggtaagtgttactaagaactgaatgatacttccatattttaaagccaaacctggcccaggcaccacccaggcaccagaggcctccaaacggtcaaggatacaccactgtcacggtcaagtcctgcagaagctgaaactgatcatggataagactttgccttgtgtcacaatgggtgcatttgctggtggtccttggatcaggttgctcatgggtggtgaatgatctgacgacttcagaagaggatagatctgagattacctttcatgcatgtcaaggaagttaagtagctgatgccatcaaagaaatggagaaacgtcaggtgaaccgcgagcagaattccgtggcgcatttgttagcgcagttagttaggactctgttcatacagctgttcgattaagccaaatacctgatttagttttatattggttgttgtcaaagaatttgtgaaatattgaggttgataatatatgtggcgttcgtttttatgtaatcattgttcactaatattttgtcgaatattttatattatatagacattactaagaacgtaaggggtcgctcgtgctctgtaaaggtac

SEQ ID NO: 207598 - DNA, 2993 bp, Zea Mays
atgccccccgcctccatagtccctgtcatcggcgacctcagatccaacaggttggtctgcttgcgccgtgatcgcggaagctaccgcgccttcgtctccgtggatgaggtcctggatttgtgtgtcactggcgcggaatatgagggatcgagggcggcgcaggcggcgagctcgtgggcggaacagactggtgagagcaagaggatggatcaggagcttgagccccaggtacaaagactaacatcagcttctactgtactaaggagggtgttggataatccagcactccaggactatcaagagaataatggatttggagacttgaactgtccggccgcgtgtaccgcgtcaccttcaccaaccggctcaacggggccgcaggcgcggtgccgtgaagcagatacggaccgccgggaaactgtacctccacaagtaaaatatttatttagccctctgtctttgtttttttccatattctaagtttatacctaataacacatttgcacatacttgatgcatttgtctatggtattttctttttataaagtgaatcatcttgacaatgaaatagtgcatttatcagttttgtaatgggacatcactcctcaagtatccagaaggtaaactagatgtatttctcatacatcaattgggcaagtctgagagatagctgtcccaatttgtccagaaatttatttacctgtacctccacaagtaaaatatgtatttagccctctatctttgtttttttccatattctaagtttatacccgatgtataaatctacagatactttcttacctttgtttagttacgataaactttatccatcaattattttgtatacttttctaacctatgtaaatttagaggttaatttggactgtttaatatttaaatgttgtgggtggattaaggggttatttagtgttttaagtacaaacagaggaggacaattcatgcacatactttagctttttattgcaatgatagataatttatatgaagtttaggacttattttggatataatatgtcagaatgacagagattcacctgataggcgagcatgagttctcgctaaaatgtagcattgagtattgactgcagttcagtaagtaaattaaagcatgatagtattgttgatccagtgaacccttcatcctatattctctttgagctaatcttcttgcaccttgatgtaaaccttgacatatctgatggttctgctcagtgcttgtgtcttagattattgcactgacgtaattggaaaatgagtaatctgccaggaagcaacatattgtgttttactgaagtacagttagtcctgctgtcgcacaactttgctctgatgtttgaaagcataaagaaatgaacttccatcagacttgatagacacactactaaagtggatcccaagcaatgatgaggagcttaggcttcgactgtcctcccgtagcaccgccacaccgcacgcgtccgtggcggtcgaacatgcattttggagagaccaacttgaatgtgcggagcagtcgatcacacaatattttcataatgttgaatggaagcgataactaaatcaaggatgttctatttatatcggtctcagttgcatggaagcaataactgaatcaagaatgctctatttatttcgatctcagccattttggaggacgaacgagcaccggggagagtccaggaggaggcagatactgctgggacatgtccaagccagtggagatgcagtggagatggagatcaacattggcatggagaagctgtgaaacccaccgcagcagaaccccacccagaggaagtggcctcgcgtctcgtaagagtggcagacagtgatcggcgggttctttgcgacacgggctgctcttcgaccatgagcttcttgttactattcccccgcgacatttgtttggcatttctgttaacgattttctttgtttatattacactaaagtcaaagcctgaagccacgtcggcaactggatctaccattatgacataagcagaaatctaaataacacaaaaaaatcaggattactatatatttgtgcacaaagccacgaagaattgcatgaattgtggacaaagctgaaattcaaggatgctgaaagcctgcagcagacttctgacatggagagtgtgaatcttctccaaagtggggggccatgagatcaatgttgcctcggatcaatcacaaacaaggttgtctggatacacttcagttccatatacaagcttccctgcccaggcagagctaactgttgtaggttgcagcaaaggattggatgcaaaagggcgctggacacgtgctcgtgtggcccaagtgagcatgctaatcagccccttttggttccttgcacagcttacgttcaatctgtctctaagatacaccactgtcacggtaagtgttactaagaactgaatgatacttccatattttaaagccaaacctggcccaggcaccacccaggcaccagaggcctccaaacggtcaaggatacaccactgtcacggtcaagtcctgcagaagctgaaactgatcatggataagactttgccttgtgtcacaatgggtgcatttgctggtggtccttggatcaggttgctcatgggtggtgaatgatctgacgacttcagaagaggatagatctgagattacctttcatgcatgtcaaggaagttaagtagctgatgccatcaaagaaatggagaaacgtcaggtgaaccgcgagcagaattccgtggcgcatttgttagcgcagttagttaggactctgttcatacagctgttcgattaagccaaatacctgatttagttttatattggttgttgtcaaagaatttgtgaaatattgaggttgataatatatgtggcgttcgtttttatgtaatcattgttcactaatattttgtcgaatattttatattatatagacattactaagaacgtaaggggtcgctcgtgctctgtaaaggtac

SEQ ID NO: 207599 - DNA, 3934 bp, Zea Mays
atgccccccgcctccatagtccctgtcatcggcgacctcagatccaacaggttggtctgcttgcgccgtgatcgcggaagctaccgcgccttcgtctccgtggatgaggtcctggatttgtgtgtcactggcgcggaatatgagggatcgagggcggcgcaggcggcgagctcgtgggcggaacagactggtgagagcaagaggatggatcaggagcttgagccccaggtacaaagactaacatcagcttctactgtactaaggagggtgttggataatccagcactccaggactatcaagagaataatggatttggagacttgaagttaagccttactgtttaggacttcactctcccagtgacacctactttacctgctgtttttgctgtatcctggcaatattcctttttactgtgatccatttccatttctgtgatgtgctcaactttacgtttggataaaagttagtaaggtaaagtaaacacattcacaaattcaagtactgagaagaaaaattgtacgtttcaaagtagttgtccaagttatgccaacttgcttttatgtaacgacagcaagaaaactgatctaagacctgcattgtggtgaattttgcagctgtccggccgcgtgtaccgcgtcaccttcaccaaccggctcaacggggccgcaggcgcggtgccgtgaagcagatacggaccgccgggaaactgtacctccacaagtaaaatatttatttagccctctgtctttgtttttttccatattctaagtttatacctaataacacatttgcacatacttgatgcatttgtctatggtattttctttttataaagtgaatcatcttgacaatgaaatagtgcatttatcagttttgtaatgggacatcactcctcaagtatccagaaggtaaactagatgtatttctcatacatcaattgggcaagtctgagagatagctgtcccaatttgtccagaaatttatttacctgtacctccacaagtaaaatatgtatttagccctctatctttgtttttttccatattctaagtttatacccgatgtataaatctacagatactttcttacctttgtttagttacgataaactttatccatcaattattttgtatacttttctaacctatgtaaatttagaggttaatttggactgtttaatatttaaatgttgtgggtggattaaggggttatttagtgttttaagtacaaacagaggaggacaattcatgcacatactttagctttttattgcaatgatagataatttatatgaagtttaggacttattttggatataatatgtcagaatgacagagattcacctgataggcgagcatgagttctcgctaaaatgtagcattgagtattgactgcagttcagtaagtaaattaaagcatgatagtattgttgatccagtgaacccttcatcctatattctctttgagctaatcttcttgcaccttgatgtaaaccttgacatatctgatggttctgctcagtgcttgtgtcttagattattgcactgacgtaattggaaaatgagtaatctgccaggaagcaacatattgtgttttactgaagtacagttagtcctgctgtcgcacaactttgctctgatgtttgaaagcataaagtatgttttcctaccatgggagaggtccaactgatattgcatctggatcttttgtgaaacatgatagcacttagcaacgctaggcagaagatgcacttttgaaatgtagtgttgcaccgttgctgtcgcaatcgttagttacacatatgttctctatatgctgtcagatatccatatctcttaatggtcgtacctaccaatttgattctgataaaaatcaatcaatctattagttacagaacaagcagagaactcactgtacacggtctcttcttgtactgaactggtattcaacttcattcaaagagttctggtaaagtataaattgtgctagaacttttgagctccttaattttcatgtagtatttttgttacttgatttttcgcctatcttgcaatagcaactttaacactgaaaaagattgcttatggccactggcaagtatgaattgatcaaattctcaaaacatatcatttgctgatttgatgaagcacgattcttaccttatttgtatctaatttgttacattcactgtttacagcttctcttgtaacattggatataatgacgctgctacatgactattattttgacatcataacctacatataaagattagagactaatctgttttttttctgaactaaggaaatgaacttccatcagacttgatagacacactactaaagtggatcccaagcaatgatgaggagcttaggcttcgactgtcctcccgtagcaccgccacaccgcacgcgtccgtggcggtcgaacatgcattttggagagaccaacttgaatgtgcggagcagtcgatcacacaatattttcataatgttgaatggaagcgataactaaatcaaggatgttctatttatatcggtctcagttgcatggaagcaataactgaatcaagaatgctctatttatttcgatctcagccattttggaggacgaacgagcaccggggagagtccaggaggaggcagatactgctgggacatgtccaagccagtggagatgcagtggagatggagatcaacattggcatggagaagctgtgaaacccaccgcagcagaaccccacccagaggaagtggcctcgcgtctcgtaagagtggcagacagtgatcggcgggttctttgcgacacgggctgctcttcgaccatgagcttcttgttactattcccccgcgacatttgtttggcatttctgttaacgattttctttgtttatattacactaaagtcaaagcctgaagccacgtcggcaactggatctaccattatgacataagcagaaatctaaataacacaaaaaaatcaggattactatatatttgtgcacaaagccacgaagaattgcatgaattgtggacaaagctgaaattcaaggatgctgaaagcctgcagcagacttctgacatggagagtgtgaatcttctccaaagtggggggccatgagatcaatgttgcctcggatcaatcacaaacaaggttgtctggatacacttcagttccatatacaagcttccctgcccaggcagagctaactgttgtaggttgcagcaaaggattggatgcaaaagggcgctggacacgtgctcgtgtggcccaagtgagcatgctaatcagccccttttggttccttgcacagcttacgttcaatctgtctctaagatacaccactgtcacggtaagtgttactaagaactgaatgatacttccatattttaaagccaaacctggcccaggcaccacccaggcaccagaggcctccaaacggtcaaggatacaccactgtcacggtcaagtcctgcagaagctgaaactgatcatggataagactttgccttgtgtcacaatgggtgcatttgctggtggtccttggatcaggttgctcatgggtggtgaatgatctgacgacttcagaagaggatagatctgagattacctttcatgcatgtcaaggaagttaagtagctgatgccatcaaagaaatggagaaacgtcaggtgaaccgcgagcagaattccgtggcgcatttgttagcgcagttagttaggactctgttcatacagctgttcgattaagccaaatacctgatttagttttatattggttgttgtcaaagaatttgtgaaatattgaggttgataatatatgtggcgttcgtttttatgtaatcattgttcactaatattttgtcgaatattttatattatatagacattactaagaacgtaaggggtcgctcgtgctctgtaaaggtac

SEQ ID NO: 207600 - DNA, 3221 bp, Zea Mays
atgccccccgcctccatagtccctgtcatcggcgacctcagatccaacaggttggtctgcttgcgccgtgatcgcggaagctaccgcgccttcgtctccgtggatgaggtcctggatttgtgtgtcactggcgcggaatatgagggatcgagggcggcgcaggcggcgagctcgtgggcggaacagactggtgagagcaagaggatggatcaggagcttgagccccaggtaagccattctgaaaatctgtatcgcgctgatttacccgctttaggatttgtagttgtcgttcgtttctcaatgcgcttggttatcgatactgctatctcatggtctcagttcagctgagttcacttaactaggaccagcatgtgcagtagaaaatctctggttaattatgggtccttataacctccgttcgttgcttgaatttctcgttatatgtggcatgttcattcaagttgtttacttacaatcacataatgcttgcggtgttacatgggacatgctaatttctttggatgttagcatgtgaacttgtgagtcagttcattgctcatttcattgaacctatgctgccatgctggtgaagagacaatgaagcagccagttggtgttataaacacaatacacctcgctcccagctccgcattcgcctccgcctcagatccctacagcgtgatgcgagggaacagcaaccgtgcggcctccccatcctgagcacctcaaatccgatgcccctccccaagccattccctcggccacgacagcgacggcaacgagcatggcccccctctaccacctatgcctttccatttgtggcctccgcatcgccccaacgttgacccctccgtcctccccctctactcccagcgcagcgccggttttagctttggaaattgctgatcgattaattatggggggaagcgtctctacttccttctcggttggtcaaggtatccccttcctgtgtcctctctcctctgtgtagatggcgaatttgtggagtccgaataatctgaatgttctcgcattctttacataatcccttgccaatttatggcaagttttatttgctccatttgttttatggtatgatgatctagatctgatgagcccattcaaattcttttgccgagccgccgtccctctttttctactgtttgtttgtgcatcggaattgctggatctataccaaaatctgaaaagtgtaggccatacagagaattaagaagttgtcttgacctcactggacccagagactactcatcaccagaggaaatggtacaaagactaacatcagcttctactgtactaaggagggtgttggataatccagcactccaggactatcaagagaataatggatttggagacttgaactgtccggccgcgtgtaccgcgtcaccttcaccaaccggctcaacggggccgcaggcgcggtgccgtgaagcagatacggaccgccgggaaactgtacctccacaacttctcttgtaacattggatataatgacgctgctacatgactattattttgacatcataacctacatataaagattagagactaatctgttttttttctgaactaaggaaatgaacttccatcagacttgatagacacactactaaagtggatcccaagcaatgatgaggagcttaggcttcgactgtcctcccgtagcaccgccacaccgcacgcgtccgtggcggtcgaacatgcattttggagagaccaacttgaatgtgcggagcagtcgatcacacaatattttcataatgttgaatggaagcgataactaaatcaaggatgttctatttatatcggtctcagttgcatggaagcaataactgaatcaagaatgctctatttatttcgatctcagccattttggaggacgaacgagcaccggggagagtccaggaggaggcagatactgctgggacatgtccaagccagtggagatgcagtggagatggagatcaacattggcatggagaagctgtgaaacccaccgcagcagaaccccacccagaggaagtggcctcgcgtctcgtaagagtggcagacagtgatcggcgggttctttgcgacacgggctgctcttcgaccatgagcttcttgttactattcccccgcgacatttgtttggcatttctgttaacgattttctttgtttatattacactaaagtcaaagcctgaagccacgtcggcaactggatctaccattatgacataagcagaaatctaaataacacaaaaaaatcaggattactatatatttgtgcacaaagccacgaagaattgcatgaattgtggacaaagctgaaattcaaggatgctgaaagcctgcagcagacttctgacatggagagtgtgaatcttctccaaagtggggggccatgagatcaatgttgcctcggatcaatcacaaacaaggttgtctggatacacttcagttccatatacaagcttccctgcccaggcagagctaactgttgtaggttgcagcaaaggattggatgcaaaagggcgctggacacgtgctcgtgtggcccaagtgagcatgctaatcagccccttttggttccttgcacagcttacgttcaatctgtctctaagatacaccactgtcacggtaagtgttactaagaactgaatgatacttccatattttaaagccaaacctggcccaggcaccacccaggcaccagaggcctccaaacggtcaaggatacaccactgtcacggtcaagtcctgcagaagctgaaactgatcatggataagactttgccttgtgtcacaatgggtgcatttgctggtggtccttggatcaggttgctcatgggtggtgaatgatctgacgacttcagaagaggatagatctgagattacctttcatgcatgtcaaggaagttaagtagctgatgccatcaaagaaatggagaaacgtcaggtgaaccgcgagcagaattccgtggcgcatttgttagcgcagttagttaggactctgttcatacagctgttcgattaagccaaatacctgatttagttttatattggttgttgtcaaagaatttgtgaaatattgaggttgataatatatgtggcgttcgtttttatgtaatcattgttcactaatattttgtcgaatattttatattatatagacattactaagaacgtaaggggtcgctcgtgctctgtaaaggtac

SEQ ID NO: 207601 - DNA, 3615 bp, Zea Mays
atgccccccgcctccatagtccctgtcatcggcgacctcagatccaacaggttggtctgcttgcgccgtgatcgcggaagctaccgcgccttcgtctccgtggatgaggtcctggatttgtgtgtcactggcgcggaatatgagggatcgagggcggcgcaggcggcgagctcgtgggcggaacagactggtgagagcaagaggatggatcaggagcttgagccccaggtacaaagactaacatcagcttctactgtactaaggagggtgttggataatccagcactccaggactatcaagagaataatggatttggagacttgaagttaagccttactgtttaggacttcactctcccagtgacacctactttacctgctgtttttgctgtatcctggcaatattcctttttactgtgatccatttccatttctgtgatgtgctcaactttacgtttggataaaagttagtaaggtaaagtaaacacattcacaaattcaagtactgagaagaaaaattgtacgtttcaaagtagttgtccaagttatgccaacttgcttttatgtaacgacagcaagaaaactgatctaagacctgcattgtggtgaattttgcagctgtccggccgcgtgtaccgcgtcaccttcaccaaccggctcaacggggccgcaggcgcggtgccgtgaagcagatacggaccgccgggaaactgtacctccacaagtaaaatatttatttagccctctgtctttgtttttttccatattctaagtttatacctaataacacatttgcacatacttgatgcatttgtctatggtattttctttttataaagtgaatcatcttgacaatgaaatagtgcatttatcagttttgtaatgggacatcactcctcaagtatccagaaggtaaactagatgtatttctcatacatcaattgggcaagtctgagagatagctgtcccaatttgtccagaaatttatttacctgtacctccacaagtaaaatatgtatttagccctctatctttgtttttttccatattctaagtttatacccgatgtataaatctacagatactttcttacctttgtttagttacgataaactttatccatcaattattttgtatacttttctaacctatgtaaatttagaggttaatttggactgtttaatatttaaatgttgtgggtggattaaggggttatttagtgttttaagtacaaacagaggaggacaattcatgcacatactttagctttttattgcaatgatagataatttatatgaagtttaggacttattttggatataatatgtcagaatgacagagattcacctgataggcgagcatgagttctcgctaaaatgtagcattgagtattgactgcagttcagtaagtaaattaaagcatgatagtattgttgatccagtgaacccttcatcctatattctctttgagctaatcttcttgcaccttgatgtaaaccttgacatatctgatggttctgctcagtgcttgtgtcttagattattgcactgacgtaattggaaaatgagtaatctgccaggaagcaacatattgtgttttactgaagtacagttagtcctgctgtcgcacaactttgctctgatgtttgaaagcataaagtatgttttcctaccatgggagaggtccaactgatattgcatctggatcttttgtgaaacatgatagcacttagcaacgctaggcagaagatgcacttttgaaatgtagtgttgcaccgttgctgtcgcaatcgttagttacacatatgttctctatatgctgtcagatatccatatctcttaatggtcgtacctaccaatttgattctgataaaaatcaatcaatctattagttacagaacaagcagagaactcactgtacacggtctcttcttgtactgaactggtattcaacttcattcaaagagttctggaaatgaacttccatcagacttgatagacacactactaaagtggatcccaagcaatgatgaggagcttaggcttcgactgtcctcccgtagcaccgccacaccgcacgcgtccgtggcggtcgaacatgcattttggagagaccaacttgaatgtgcggagcagtcgatcacacaatattttcataatggtaattgtgagcagcagtagagactaagcagttctgtaattgcatttgttctaagatcattttctgtagttgcatggaagcaataactgaatcaagaatgctctatttatttcgatctcagccattttggaggacgaacgagcaccggggagagtccaggaggaggcagatactgctgggacatgtccaagccagtggagatgcagtggagatggagatcaacattggcatggagaagctgtgaaacccaccgcagcagaaccccacccagaggaagtggcctcgcgtctcgtaagagtggcagacagtgatcggcgggttctttgcgacacgggctgctcttcgaccatgagcttcttgttactattcccccgcgacatttgtttggcatttctgttaacgattttctttgtttatattacactaaagtcaaagcctgaagccacgtcggcaactggatctaccattatgacataagcagaaatctaaataacacaaaaaaatcaggattactatatatttgtgcacaaagccacgaagaattgcatgaattgtggacaaagctgaaattcaaggatgctgaaagcctgcagcagacttctgacatggagagtgtgaatcttctccaaagtggggggccatgagatcaatgttgcctcggatcaatcacaaacaaggttgtctggatacacttcagttccatatacaagcttccctgcccaggcagagctaactgttgtaggttgcagcaaaggattggatgcaaaagggcgctggacacgtgctcgtgtggcccaagtgagcatgctaatcagccccttttggttccttgcacagcttacgttcaatctgtctctaagatacaccactgtcacggtaagtgttactaagaactgaatgatacttccatattttaaagccaaacctggcccaggcaccacccaggcaccagaggcctccaaacggtcaaggatacaccactgtcacggtcaagtcctgcagaagctgaaactgatcatggataagactttgccttgtgtcacaatgggtgcatttgctggtggtccttggatcaggttgctcatgggtggtgaatgatctgacgacttcagaagaggatagatctgagattacctttcatgcatgtcaaggaagttaagtagctgatgccatcaaagaaatggagaaacgtcaggtgaaccgcgagcagaattccgtggcgcatttgttagcgcagttagttaggactctgttcatacagctgttcgattaagccaaatacctgatttagttttatattggttgttgtcaaagaatttgtgaaatattgaggttgataatatatgtggcgttcgtttttatgtaatcattgttcactaatattttgtcgaatattttatattatatagacattactaagaacgtaaggggtcgctcgtgctctgtaaaggtac

SEQ ID NO: 207602 - DNA, 4845 bp, Zea Mays
atgccccccgcctccatagtccctgtcatcggcgacctcagatccaacaggttggtctgcttgcgccgtgatcgcggaagctaccgcgccttcgtctccgtggatgaggtcctggatttgtgtgtcactggcgcggaatatgagggatcgagggcggcgcaggcggcgagctcgtgggcggaacagactggtgagagcaagaggatggatcaggagcttgagccccaggtaagccattctgaaaatctgtatcgcgctgatttacccgctttaggatttgtagttgtcgttcgtttctcaatgcgcttggttatcgatactgctatctcatggtctcagttcagctgagttcacttaactaggaccagcatgtgcagtagaaaatctctggttaattatgggtccttataacctccgttcgttgcttgaatttctcgttatatgtggcatgttcattcaagttgtttacttacaatcacataatgcttgcggtgttacatgggacatgctaatttctttggatgttagcatgtgaacttgtgagtcagttcattgctcatttcattgaacctatgctgccatgctggtgaagagacaatgaagcagccagttggtgttataaacacaatacacctcgctcccagctccgcattcgcctccgcctcagatccctacagcgtgatgcgagggaacagcaaccgtgcggcctccccatcctgagcacctcaaatccgatgcccctccccaagccattccctcggccacgacagcgacggcaacgagcatggcccccctctaccacctatgcctttccatttgtggcctccgcatcgccccaacgttgacccctccgtcctccccctctactcccagcgcagcgccggttttagctttggaaattgctgatcgattaattatggggggaagcgtctctacttccttctcggttggtcaaggtatccccttcctgtgtcctctctcctctgtgtagatggcgaatttgtggagtccgaataatctgaatgttctcgcattctttacataatcccttgccaatttatggcaagttttatttgctccatttgttttatggtatgatgatctagatctgatgagcccattcaaattcttttgccgagccgccgtccctctttttctactgtttgtttgtgcatcggaattgctggatctataccaaaatctgaaaagtgtaggccatacagagaattaagaagttgtcttgacctcactggacccagagactactcatcaccagaggaaatggtattatgctctgataatatattcttaaggattaaccatgttattttcttttttctaattgtgctattacatttaggtacaaagactaacatcagcttctactgtactaaggagggtgttggataatccagcactccaggactatcaagagaataatggatttggagacttgaactgtccggccgcgtgtaccgcgtcaccttcaccaaccggctcaacggggccgcaggcgcggtgccgtgaagcagatacggaccgccgggaaactgtacctccacaagtaaaatatttatttagccctctgtctttgtttttttccatattctaagtttatacctaataacacatttgcacatacttgatgcatttgtctatggtattttctttttataaagtgaatcatcttgacaatgaaatagtgcatttatcagttttgtaatgggacatcactcctcaagtatccagaaggtaaactagatgtatttctcatacatcaattgggcaagtctgagagatagctgtcccaatttgtccagaaatttatttacctgtacctccacaagtaaaatatgtatttagccctctatctttgtttttttccatattctaagtttatacccgatgtataaatctacagatactttcttacctttgtttagttacgataaactttatccatcaattattttgtatacttttctaacctatgtaaatttagaggttaatttggactgtttaatatttaaatgttgtgggtggattaaggggttatttagtgttttaagtacaaacagaggaggacaattcatgcacatactttagctttttattgcaatgatagataatttatatgaagtttaggacttattttggatataatatgtcagaatgacagagattcacctgataggcgagcatgagttctcgctaaaatgtagcattgagtattgactgcagttcagtaagtaaattaaagcatgatagtattgttgatccagtgaacccttcatcctatattctctttgagctaatcttcttgcaccttgatgtaaaccttgacatatctgatggttctgctcagtgcttgtgtcttagattattgcactgacgtaattggaaaatgagtaatctgccaggaagcaacatattgtgttttactgaagtacagttagtcctgctgtcgcacaactttgctctgatgtttgaaagcataaagtatgttttcctaccatgggagaggtccaactgatattgcatctggatcttttgtgaaacatgatagcacttagcaacgctaggcagaagatgcacttttgaaatgtagtgttgcaccgttgctgtcgcaatcgttagttacacatatgttctctatatgctgtcagatatccatatctcttaatggtcgtacctaccaatttgattctgataaaaatcaatcaatctattagttacagaacaagcagagaactcactgtacacggtctcttcttgtactgaactggtattcaacttcattcaaagagttctggtaaagtataaattgtgctagaacttttgagctccttaattttcatgtagtatttttgttacttgatttttcgcctatcttgcaatagcaactttaacactgaaaaagattgcttatggccactggcaagtatgaattgatcaaattctcaaaacatatcatttgctgatttgatgaagcacgattcttaccttatttgtatctaatttgttacattcactgtttacagcttctcttgtaacattggatataatgacgctgctacatgactattattttgacatcataacctacatataaagattagagactaatctgttttttttctgaactaaggtgttaacacatttccaaatatcgaacatctatcttttagtatgcaagcattttagtttctcagaggtatactgttccccatctctgtattttatttcatccactgcccttgctaatttgtaggaaatgaacttccatcagacttgatagacacactactaaagtggatcccaagcaatgatgaggagcttaggcttcgactgtcctcccgtagcaccgccacaccgcacgcgtccgtggcggtcgaacatgcattttggagagaccaacttgaatgtgcggagcagtcgatcacacaatattttcataatgttgcatggaagcaataactgaatcaagaatgctctatttatttcgatctcagccattttggaggacgaacgagcaccggggagagtccaggaggaggcagatactgctgggacatgtccaagccagtggagatgcagtggagatggagatcaacattggcatggagaagctgtgaaacccaccgcagcagaaccccacccagaggaagtggcctcgcgtctcgtaagagtggcagacagtgatcggcgggttctttgcgacacgggctgctcttcgaccatgagcttcttgttactattcccccgcgacatttgtttggcatttctgttaacgattttctttgtttatattacactaaagtcaaagcctgaagccacgtcggcaactggatctaccattatgacataagcagaaatctaaataacacaaaaaaatcaggattactatatatttgtgcacaaagccacgaagaattgcatgaattgtggacaaagctgaaattcaaggatgctgaaagcctgcagcagacttctgacatggagagtgtgaatcttctccaaagtggggggccatgagatcaatgttgcctcggatcaatcacaaacaaggttgtctggatacacttcagttccatatacaagcttccctgcccaggcagagctaactgttgtaggttgcagcaaaggattggatgcaaaagggcgctggacacgtgctcgtgtggcccaagtgagcatgctaatcagccccttttggttccttgcacagcttacgttcaatctgtctctaagatacaccactgtcacggtaagtgttactaagaactgaatgatacttccatattttaaagccaaacctggcccaggcaccacccaggcaccagaggcctccaaacggtcaaggatacaccactgtcacggtcaagtcctgcagaagctgaaactgatcatggataagactttgccttgtgtcacaatgggtgcatttgctggtggtccttggatcaggttgctcatgggtggtgaatgatctgacgacttcagaagaggatagatctgagattacctttcatgcatgtcaaggaagttaagtagctgatgccatcaaagaaatggagaaacgtcaggtgaaccgcgagcagaattccgtggcgcatttgttagcgcagttagttaggactctgttcatacagctgttcgattaagccaaatacctgatttagttttatattggttgttgtcaaagaatttgtgaaatattgaggttgataatatatgtggcgttcgtttttatgtaatcattgttcactaatattttgtcgaatattttatattatatagacattactaagaacgtaaggggtcgctcgtgctctgtaaaggtac

SEQ ID NO: 207603 - DNA, 3999 bp, Zea Mays
atgccccccgcctccatagtccctgtcatcggcgacctcagatccaacaggttggtctgcttgcgccgtgatcgcggaagctaccgcgccttcgtctccgtggatgaggtcctggatttgtgtgtcactggcgcggaatatgagggatcgagggcggcgcaggcggcgagctcgtgggcggaacagactggtgagagcaagaggatggatcaggagcttgagccccaggtacaaagactaacatcagcttctactgtactaaggagggtgttggataatccagcactccaggactatcaagagaataatggatttggagacttgaagttaagccttactgtttaggacttcactctcccagtgacacctactttacctgctgtttttgctgtatcctggcaatattcctttttactgtgatccatttccatttctgtgatgtgctcaactttacgtttggataaaagttagtaaggtaaagtaaacacattcacaaattcaagtactgagaagaaaaattgtacgtttcaaagtagttgtccaagttatgccaacttgcttttatgtaacgacagcaagaaaactgatctaagacctgcattgtggtgaattttgcagctgtccggccgcgtgtaccgcgtcaccttcaccaaccggctcaacggggccgcaggcgcggtgccgtgaagcagatacggaccgccgggaaactgtacctccacaagtaaaatatttatttagccctctgtctttgtttttttccatattctaagtttatacctaataacacatttgcacatacttgatgcatttgtctatggtattttctttttataaagtgaatcatcttgacaatgaaatagtgcatttatcagttttgtaatgggacatcactcctcaagtatccagaaggtaaactagatgtatttctcatacatcaattgggcaagtctgagagatagctgtcccaatttgtccagaaatttatttacctgtacctccacaagtaaaatatgtatttagccctctatctttgtttttttccatattctaagtttatacccgatgtataaatctacagatactttcttacctttgtttagttacgataaactttatccatcaattattttgtatacttttctaacctatgtaaatttagaggttaatttggactgtttaatatttaaatgttgtgggtggattaaggggttatttagtgttttaagtacaaacagaggaggacaattcatgcacatactttagctttttattgcaatgatagataatttatatgaagtttaggacttattttggatataatatgtcagaatgacagagattcacctgataggcgagcatgagttctcgctaaaatgtagcattgagtattgactgcagttcagtaagtaaattaaagcatgatagtattgttgatccagtgaacccttcatcctatattctctttgagctaatcttcttgcaccttgatgtaaaccttgacatatctgatggttctgctcagtgcttgtgtcttagattattgcactgacgtaattggaaaatgagtaatctgccaggaagcaacatattgtgttttactgaagtacagttagtcctgctgtcgcacaactttgctctgatgtttgaaagcataaagtatgttttcctaccatgggagaggtccaactgatattgcatctggatcttttgtgaaacatgatagcacttagcaacgctaggcagaagatgcacttttgaaatgtagtgttgcaccgttgctgtcgcaatcgttagttacacatatgttctctatatgctgtcagatatccatatctcttaatggtcgtacctaccaatttgattctgataaaaatcaatcaatctattagttacagaacaagcagagaactcactgtacacggtctcttcttgtactgaactggtattcaacttcattcaaagagttctggtaaagtataaattgtgctagaacttttgagctccttaattttcatgtagtatttttgttacttgatttttcgcctatcttgcaatagcaactttaacactgaaaaagattgcttatggccactggcaagtatgaattgatcaaattctcaaaacatatcatttgctgatttgatgaagcacgattcttaccttatttgtatctaatttgttacattcactgtttacagcttctcttgtaacattggatataatgacgctgctacatgactattattttgacatcataacctacatataaagattagagactaatctgttttttttctgaactaaggtgttaacacatttccaaatatcgaacatctatcttttagtatgcaagcattttagtttctcagagacttgatagacacactactaaagtggatcccaagcaatgatgaggagcttaggcttcgactgtcctcccgtagcaccgccacaccgcacgcgtccgtggcggtcgaacatgcattttggagagaccaacttgaatgtgcggagcagtcgatcacacaatattttcataatggtaattgtgagcagcagtagagactaagcagttctgtaattgcatttgttctaagatcattttctgtagttgcatggaagcaataactgaatcaagaatgctctatttatttcgatctcagccattttggaggacgaacgagcaccggggagagtccaggaggaggcagatactgctgggacatgtccaagccagtggagatgcagtggagatggagatcaacattggcatggagaagctgtgaaacccaccgcagcagaaccccacccagaggaagtggcctcgcgtctcgtaagagtggcagacagtgatcggcgggttctttgcgacacgggctgctcttcgaccatgagcttcttgttactattcccccgcgacatttgtttggcatttctgttaacgattttctttgtttatattacactaaagtcaaagcctgaagccacgtcggcaactggatctaccattatgacataagcagaaatctaaataacacaaaaaaatcaggattactatatatttgtgcacaaagccacgaagaattgcatgaattgtggacaaagctgaaattcaaggatgctgaaagcctgcagcagacttctgacatggagagtgtgaatcttctccaaagtggggggccatgagatcaatgttgcctcggatcaatcacaaacaaggttgtctggatacacttcagttccatatacaagcttccctgcccaggcagagctaactgttgtaggttgcagcaaaggattggatgcaaaagggcgctggacacgtgctcgtgtggcccaagtgagcatgctaatcagccccttttggttccttgcacagcttacgttcaatctgtctctaagatacaccactgtcacggtaagtgttactaagaactgaatgatacttccatattttaaagccaaacctggcccaggcaccacccaggcaccagaggcctccaaacggtcaaggatacaccactgtcacggtcaagtcctgcagaagctgaaactgatcatggataagactttgccttgtgtcacaatgggtgcatttgctggtggtccttggatcaggttgctcatgggtggtgaatgatctgacgacttcagaagaggatagatctgagattacctttcatgcatgtcaaggaagttaagtagctgatgccatcaaagaaatggagaaacgtcaggtgaaccgcgagcagaattccgtggcgcatttgttagcgcagttagttaggactctgttcatacagctgttcgattaagccaaatacctgatttagttttatattggttgttgtcaaagaatttgtgaaatattgaggttgataatatatgtggcgttcgtttttatgtaatcattgttcactaatattttgtcgaatattttatattatatagacattactaagaacgtaaggggtcgctcgtgctctgtaaaggtac

SEQ ID NO: 207604 - DNA, 3442 bp, Zea Mays
gcacggttctgccgaggatctccgccatcaacgctcgccatcggatcgaaccattacgcgatatctgcaccgcccattgccgaggccgccatcctcccgcaatccccgcctattgccttgcctgccccttccatcctccttcccacccctccttccatcctcgcccgcgcgctccacacgtccccgccgtcgcgctcgcctttcatcctcctccccacccctccttccatcctcgcccgcgcgctccgcacgtccccgccgtcgcgctcgcctccctcctctttgttgcctccgcgtcggcctccaccccgctatgacgcaagcaagggcggcgcttgccatggcatcgacgggaaccaggcatcactctccctatctctcgggatggtacgggcaggaggatcaggccaccgtcgaggaacgcgctctccgctgtgttccagcaagaagatgagggatcgagggcggcgcaggcggcgagctcgtgggcggaacagactggtgagagcaagaggatggatcaggagcttgagccccaggtaagccattctgaaaatctgtatcgcgctgatttacccgctttaggatttgtagttgtcgttcgtttctcaatgcgcttggttatcgatactgctatctcatggtctcagttcagctgagttcacttaactaggaccagcatgtgcagtagaaaatctctggttaattatgggtccttataacctccgttcgttgcttgaatttctcgttatatgtggcatgttcattcaagttgtttacttacaatcacataatgcttgcggtgttacatgggacatgctaatttctttggatgttagcatgtgaacttgtgagtcagttcattgctcatttcattgaacctatgctgccatgctggtgaagagacaatgaagcagccagttggtgttataaacacaatacacctcgctcccagctccgcattcgcctccgcctcagatccctacagcgtgatgcgagggaacagcaaccgtgcggcctccccatcctgagcacctcaaatccgatgcccctccccaagccattccctcggccacgacagcgacggcaacgagcatggcccccctctaccacctatgcctttccatttgtggcctccgcatcgccccaacgttgacccctccgtcctccccctctactcccagcgcagcgccggttttagctttggaaattgctgatcgattaattatggggggaagcgtctctacttccttctcggttggtcaaggtatccccttcctgtgtcctctctcctctgtgtagatggcgaatttgtggagtccgaataatctgaatgttctcgcattctttacataatcccttgccaatttatggcaagttttatttgctccatttgttttatggtatgatgatctagatctgatgagcccattcaaattcttttgccgagccgccgtccctctttttctactgtttgtttgtgcatcggaattgctggatctataccaaaatctgaaaagtgtaggccatacagagaattaagaagttgtcttgacctcactggacccagagactactcatcaccagaggaaatggtacaaagactaacatcagcttctactgtactaaggagggtgttggataatccagcactccaggactatcaagagaataatggatttggagacttgaactgtccggccgcgtgtaccgcgtcaccttcaccaaccggctcaacggggccgcaggcgcggtgccgtgaagcagatacggaccgccgggaaactgtacctccacaagaaatgaacttccatcagacttgatagacacactactaaagtggatcccaagcaatgatgaggagcttaggcttcgactgtcctcccgtagcaccgccacaccgcacgcgtccgtggcggtcgaacatgcattttggagagaccaacttgaatgtgcggagcagtcgatcacacaatattttcataatggtaattgtgagcagcagtagagactaagcagttctgtaattgcatttgttctaagatcattttctgtagttgcatggaagcaataactgaatcaagaatgctctatttatttcgatctcagccattttggaggacgaacgagcaccggggagagtccaggaggaggcagatactgctgggacatgtccaagccagtggagatgcagtggagatggagatcaacattggcatggagaagctgtgaaacccaccgcagcagaaccccacccagaggaagtggcctcgcgtctcgtaagagtggcagacagtgatcggcgggttctttgcgacacgggctgctcttcgaccatgagcttcttgttactattcccccgcgacatttgtttggcatttctgttaacgattttctttgtttatattacactaaagtcaaagcctgaagccacgtcggcaactggatctaccattatgacataagcagaaatctaaataacacaaaaaaatcaggattactatatatttgtgcacaaagccacgaagaattgcatgaattgtggacaaagctgaaattcaaggatgctgaaagcctgcagcagacttctgacatggagagtgtgaatcttctccaaagtggggggccatgagatcaatgttgcctcggatcaatcacaaacaaggttgtctggatacacttcagttccatatacaagcttccctgcccaggcagagctaactgttgtaggttgcagcaaaggattggatgcaaaagggcgctggacacgtgctcgtgtggcccaagtgagcatgctaatcagccccttttggttccttgcacagcttacgttcaatctgtctctaagatacaccactgtcacggtaagtgttactaagaactgaatgatacttccatattttaaagccaaacctggcccaggcaccacccaggcaccagaggcctccaaacggtcaaggatacaccactgtcacggtcaagtcctgcagaagctgaaactgatcatggataagactttgccttgtgtcacaatgggtgcatttgctggtggtccttggatcaggttgctcatgggtggtgaatgatctgacgacttcagaagaggatagatctgagattacctttcatgcatgtcaaggaagttaagtagctgatgccatcaaagaaatggagaaacgtcaggtgaaccgcgagcagaattccgtggcgcatttgttagcgcagttagttaggactctgttcatacagctgttcgattaagccaaatacctgatttagttttatattggttgttgtcaaagaatttgtgaaatattgaggttgataatatatgtggcgttcgtttttatgtaatcattgttcactaatattttgtcgaatattttatattatatagacattactaagaacgtaaggggtcgctcgtgctctgtaaaggtac

SEQ ID NO: 207605 - DNA, 3862 bp, Zea Mays
gcacggttctgccgaggatctccgccatcaacgctcgccatcggatcgaaccattacgcgatatctgcaccgcccattgccgaggccgccatcctcccgcaatccccgcctattgccttgcctgccccttccatcctccttcccacccctccttccatcctcgcccgcgcgctccacacgtccccgccgtcgcgctcgcctttcatcctcctccccacccctccttccatcctcgcccgcgcgctccgcacgtccccgccgtcgcgctcgcctccctcctctttgttgcctccgcgtcggcctccaccccgctatgacgcaagcaagggcggcgcttgccatggcatcgacgggaaccaggcatcactctccctatctctcgggatggtacgggcaggaggatcaggccaccgtcgaggaacgcgctctccgctgtgttccagcaagaagatgagggatcgagggcggcgcaggcggcgagctcgtgggcggaacagactggtgagagcaagaggatggatcaggagcttgagccccaggtaagccattctgaaaatctgtatcgcgctgatttacccgctttaggatttgtagttgtcgttcgtttctcaatgcgcttggttatcgatactgctatctcatggtctcagttcagctgagttcacttaactaggaccagcatgtgcagtagaaaatctctggttaattatgggtccttataacctccgttcgttgcttgaatttctcgttatatgtggcatgttcattcaagttgtttacttacaatcacataatgcttgcggtgttacatgggacatgctaatttctttggatgttagcatgtgaacttgtgagtcagttcattgctcatttcattgaacctatgctgccatgctggtgaagagacaatgaagcagccagttggtgttataaacacaatacacctcgctcccagctccgcattcgcctccgcctcagatccctacagcgtgatgcgagggaacagcaaccgtgcggcctccccatcctgagcacctcaaatccgatgcccctccccaagccattccctcggccacgacagcgacggcaacgagcatggcccccctctaccacctatgcctttccatttgtggcctccgcatcgccccaacgttgacccctccgtcctccccctctactcccagcgcagcgccggttttagctttggaaattgctgatcgattaattatggggggaagcgtctctacttccttctcggttggtcaaggtatccccttcctgtgtcctctctcctctgtgtagatggcgaatttgtggagtccgaataatctgaatgttctcgcattctttacataatcccttgccaatttatggcaagttttatttgctccatttgttttatggtatgatgatctagatctgatgagcccattcaaattcttttgccgagccgccgtccctctttttctactgtttgtttgtgcatcggaattgctggatctataccaaaatctgaaaagtgtaggccatacagagaattaagaagttgtcttgacctcactggacccagagactactcatcaccagaggaaatggtattatgctctgataatatattcttaaggattaaccatgttattttcttttttctaattgtgctattacatttaggtacaaagactaacatcagcttctactgtactaaggagggtgttggataatccagcactccaggactatcaagagaataatggatttggagacttgaagttaagccttactgtttaggacttcactctcccagtgacacctactttacctgctgtttttgctgtatcctggcaatattcctttttactgtgatccatttccatttctgtgatgtgctcaactttacgtttggataaaagttagtaaggtaaagtaaacacattcacaaattcaagtactgagaagaaaaattgtacgtttcaaagtagttgtccaagttatgccaacttgcttttatgtaacgacagcaagaaaactgatctaagacctgcattgtggtgaattttgcagctgtccggccgcgtgtaccgcgtcaccttcaccaaccggctcaacggggccgcaggcgcggtgccgtgaagcagatacggaccgccgggaaactgtacctccacaagaaatgaacttccatcagacttgatagacacactactaaagtggatcccaagcaatgatgaggagcttaggcttcgactgtcctcccgtagcaccgccacaccgcacgcgtccgtggcggtcgaacatgcattttggagagaccaacttgaatgtgcggagcagtcgatcacacaatattttcataatgttgaatggaagcgataactaaatcaaggatgttctatttatatcggtctcaggtaattgtgagcagcagtagagactaagcagttctgtaattgcatttgttctaagatcattttctgtagttgcatggaagcaataactgaatcaagaatgctctatttatttcgatctcagccattttggaggacgaacgagcaccggggagagtccaggaggaggcagatactgctgggacatgtccaagccagtggagatgcagtggagatggagatcaacattggcatggagaagctgtgaaacccaccgcagcagaaccccacccagaggaagtggcctcgcgtctcgtaagagtggcagacagtgatcggcgggttctttgcgacacgggctgctcttcgaccatgagcttcttgttactattcccccgcgacatttgtttggcatttctgttaacgattttctttgtttatattacactaaagtcaaagcctgaagccacgtcggcaactggatctaccattatgacataagcagaaatctaaataacacaaaaaaatcaggattactatatatttgtgcacaaagccacgaagaattgcatgaattgtggacaaagctgaaattcaaggatgctgaaagcctgcagcagacttctgacatggagagtgtgaatcttctccaaagtggggggccatgagatcaatgttgcctcggatcaatcacaaacaaggttgtctggatacacttcagttccatatacaagcttccctgcccaggcagagctaactgttgtaggttgcagcaaaggattggatgcaaaagggcgctggacacgtgctcgtgtggcccaagtgagcatgctaatcagccccttttggttccttgcacagcttacgttcaatctgtctctaagatacaccactgtcacggtaagtgttactaagaactgaatgatacttccatattttaaagccaaacctggcccaggcaccacccaggcaccagaggcctccaaacggtcaaggatacaccactgtcacggtcaagtcctgcagaagctgaaactgatcatggataagactttgccttgtgtcacaatgggtgcatttgctggtggtccttggatcaggttgctcatgggtggtgaatgatctgacgacttcagaagaggatagatctgagattacctttcatgcatgtcaaggaagttaagtagctgatgccatcaaagaaatggagaaacgtcaggtgaaccgcgagcagaattccgtggcgcatttgttagcgcagttagttaggactctgttcatacagctgttcgattaagccaaatacctgatttagttttatattggttgttgtcaaagaatttgtgaaatattgaggttgataatatatgtggcgttcgtttttatgtaatcattgttcactaatattttgtcgaatattttatattatatagacattactaagaacgtaaggggtcgctcgtgctctgtaaaggtac

SEQ ID NO: 207606 - DNA, 4455 bp, Zea Mays
gcacggttctgccgaggatctccgccatcaacgctcgccatcggatcgaaccattacgcgatatctgcaccgcccattgccgaggccgccatcctcccgcaatccccgcctattgccttgcctgccccttccatcctccttcccacccctccttccatcctcgcccgcgcgctccacacgtccccgccgtcgcgctcgcctttcatcctcctccccacccctccttccatcctcgcccgcgcgctccgcacgtccccgccgtcgcgctcgcctccctcctctttgttgcctccgcgtcggcctccaccccgctatgacgcaagcaagggcggcgcttgccatggcatcgacgggaaccaggcatcactctccctatctctcgggatggtacgggcaggaggatcaggccaccgtcgaggaacgcgctctccgctgtgttccagcaagaagatgagggatcgagggcggcgcaggcggcgagctcgtgggcggaacagactggtgagagcaagaggatggatcaggagcttgagccccaggccatacagagaattaagaagttgtcttgacctcactggacccagagactactcatcaccagaggaaatggtacaaagactaacatcagcttctactgtactaaggagggtgttggataatccagcactccaggactatcaagagaataatggatttggagacttgaagttaagccttactgtttaggacttcactctcccagtgacacctactttacctgctgtttttgctgtatcctggcaatattcctttttactgtgatccatttccatttctgtgatgtgctcaactttacgtttggataaaagttagtaaggtaaagtaaacacattcacaaattcaagtactgagaagaaaaattgtacgtttcaaagtagttgtccaagttatgccaacttgcttttatgtaacgacagcaagaaaactgatctaagacctgcattgtggtgaattttgcagctgtccggccgcgtgtaccgcgtcaccttcaccaaccggctcaacggggccgcaggcgcggtgccgtgaagcagatacggaccgccgggaaactgtacctccacaagtaaaatatttatttagccctctgtctttgtttttttccatattctaagtttatacctaataacacatttgcacatacttgatgcatttgtctatggtattttctttttataaagtgaatcatcttgacaatgaaatagtgcatttatcagttttgtaatgggacatcactcctcaagtatccagaaggtaaactagatgtatttctcatacatcaattgggcaagtctgagagatagctgtcccaatttgtccagaaatttatttacctgtacctccacaagtaaaatatgtatttagccctctatctttgtttttttccatattctaagtttatacccgatgtataaatctacagatactttcttacctttgtttagttacgataaactttatccatcaattattttgtatacttttctaacctatgtaaatttagaggttaatttggactgtttaatatttaaatgttgtgggtggattaaggggttatttagtgttttaagtacaaacagaggaggacaattcatgcacatactttagctttttattgcaatgatagataatttatatgaagtttaggacttattttggatataatatgtcagaatgacagagattcacctgataggcgagcatgagttctcgctaaaatgtagcattgagtattgactgcagttcagtaagtaaattaaagcatgatagtattgttgatccagtgaacccttcatcctatattctctttgagctaatcttcttgcaccttgatgtaaaccttgacatatctgatggttctgctcagtgcttgtgtcttagattattgcactgacgtaattggaaaatgagtaatctgccaggaagcaacatattgtgttttactgaagtacagttagtcctgctgtcgcacaactttgctctgatgtttgaaagcataaagtatgttttcctaccatgggagaggtccaactgatattgcatctggatcttttgtgaaacatgatagcacttagcaacgctaggcagaagatgcacttttgaaatgtagtgttgcaccgttgctgtcgcaatcgttagttacacatatgttctctatatgctgtcagatatccatatctcttaatggtcgtacctaccaatttgattctgataaaaatcaatcaatctattagttacagaacaagcagagaactcactgtacacggtctcttcttgtactgaactggtattcaacttcattcaaagagttctggtaaagtataaattgtgctagaacttttgagctccttaattttcatgtagtatttttgttacttgatttttcgcctatcttgcaatagcaactttaacactgaaaaagattgcttatggccactggcaagtatgaattgatcaaattctcaaaacatatcatttgctgatttgatgaagcacgattcttaccttatttgtatctaatttgttacattcactgtttacagcttctcttgtaacattggatataatgacgctgctacatgactattattttgacatcataacctacatataaagattagagactaatctgttttttttctgaactaaggtgttaacacatttccaaatatcgaacatctatcttttagtatgcaagcattttagtttctcagaggtatactgttccccatctctgtattttatttcatccactgcccttgctaatttgtaggaaatgaacttccatcagacttgatagacacactactaaagtggatcccaagcaatgatgaggagcttaggcttcgactgtcctcccgtagcaccgccacaccgcacgcgtccgtggcggtcgaacatgcattttggagagaccaacttgaatgtgcggagcagtcgatcacacaatattttcataatggtaattgtgagcagcagtagagactaagcagttctgtaattgcatttgttctaagatcattttctgtagttgcatggaagcaataactgaatcaagaatgctctatttatttcgatctcagccattttggaggacgaacgagcaccggggagagtccaggaggaggcagatactgctgggacatgtccaagccagtggagatgcagtggagatggagatcaacattggcatggagaagctgtgaaacccaccgcagcagaaccccacccagaggaagtggcctcgcgtctcgtaagagtggcagacagtgatcggcgggttctttgcgacacgggctgctcttcgaccatgagcttcttgttactattcccccgcgacatttgtttggcatttctgttaacgattttctttgtttatattacactaaagtcaaagcctgaagccacgtcggcaactggatctaccattatgacataagcagaaatctaaataacacaaaaaaatcaggattactatatatttgtgcacaaagccacgaagaattgcatgaattgtggacaaagctgaaattcaaggatgctgaaagcctgcagcagacttctgacatggagagtgtgaatcttctccaaagtggggggccatgagatcaatgttgcctcggatcaatcacaaacaaggttgtctggatacacttcagttccatatacaagcttccctgcccaggcagagctaactgttgtaggttgcagcaaaggattggatgcaaaagggcgctggacacgtgctcgtgtggcccaagtgagcatgctaatcagccccttttggttccttgcacagcttacgttcaatctgtctctaagatacaccactgtcacggtaagtgttactaagaactgaatgatacttccatattttaaagccaaacctggcccaggcaccacccaggcaccagaggcctccaaacggtcaaggatacaccactgtcacggtcaagtcctgcagaagctgaaactgatcatggataagactttgccttgtgtcacaatgggtgcatttgctggtggtccttggatcaggttgctcatgggtggtgaatgatctgacgacttcagaagaggatagatctgagattacctttcatgcatgtcaaggaagttaagtagctgatgccatcaaagaaatggagaaacgtcaggtgaaccgcgagcagaattccgtggcgcatttgttagcgcagttagttaggactctgttcatacagctgttcgattaagccaaatacctgatttagttttatattggttgttgtcaaagaatttgtgaaatattgaggttgataatatatgtggcgttcgtttttatgtaatcattgttcactaatattttgtcgaatattttatattatatagacattactaagaacgtaaggggtcgctcgtgctctgtaaaggtac

SEQ ID NO: 207607 - DNA, 2703 bp, Zea Mays
atgccccccgcctccatagtccctgtcatcggcgacctcagatccaacaggttggtctgcttgcgccgtgatcgcggaagctaccgcgccttcgtctccgtggatgaggtcctggatttgtgtgtcactggcgcggaatatgagggatcgagggcggcgcaggcggcgagctcgtgggcggaacagactggtgagagcaagaggatggatcaggagcttgagccccaggtacaaagactaacatcagcttctactgtactaaggagggtgttggataatccagcactccaggactatcaagagaataatggatttggagacttgaactgtccggccgcgtgtaccgcgtcaccttcaccaaccggctcaacggggccgcaggcgcggtgccgtgaagcagatacggaccgccgggaaactgtacctccacaagtaaaatatttatttagccctctgtctttgtttttttccatattctaagtttatacctaataacacatttgcacatacttgatgcatttgtctatggtattttctttttataaagtgaatcatcttgacaatgaaatagtgcatttatcagttttgtaatgggacatcactcctcaagtatccagaaggtaaactagatgtatttctcatacatcaattgggcaagtctgagagatagctgtcccaatttgtccagaaatttatttacctgtacctccacaagtaaaatatgtatttagccctctatctttgtttttttccatattctaagtttatacccgatgtataaatctacagatactttcttacctttgtttagttacgataaactttatccatcaattattttgtatacttttctaacctatgtaaatttagaggttaatttggactgtttaatatttaaatgttgtgggtggattaaggggttatttagtgttttaagtacaaacagaggaggacaattcatgcacatactttagctttttattgcaatgatagataatttatatgaagtttaggacttattttggatataatatgtcagaatgacagagattcacctgataggcgagcatgagttctcgctaaaatgtagcattgagtattgactgcagttcagtaagtaaattaaagcatgatagtattgttgatccagtgaacccttcatcctatattctctttgagctaatcttcttgcaccttgatgtaaaccttgacatatctgatggttctgctcagtgcttgtgtcttagattattgcactgacgtaattggaaaatgagtaatctgccaggaagcaacatattgtgttttactgaagtacagttagtcctgctgtcgcacaactttgctctgatgtttgaaagcataaagtatgttttcctaccatgggagaggtccaactgatattgcatctggatcttttgtgaaacatgatagcacttagcaacgctaggcagaagatgcacttttgaaatgtagtgttgcaccgttgctgtcgcaatcgttagttacacatatgttctctatatgctgtcagatatccatatctcttaatggtcgtacctaccaatttgattctgataaaaatcaatcaatctattagttacagaacaagcagagaactcactgtacacggtctcttcttgtactgaactggtattcaacttcattcaaagagttctggtaaagtataaattgtgctagaacttttgagctccttaattttcatgtagtatttttgttacttgatttttcgcctatcttgcaatagcaactttaacactgaaaaagattgcttatggccactggcaagtatgaattgatcaaattctcaaaacatatcatttgctgatttgatgaagcacgattcttaccttatttgtatctaatttgttacattcactgtttacagcttctcttgtaacattggatataatgacgctgctacatgactattattttgacatcataacctacatataaagattagagactaatctgttttttttctgaactaaggtgttaacacatttccaaatatcgaacatctatcttttagtatgcaagcattttagtttctcagaggtatactgttccccatctctgtattttatttcatccactgcccttgctaatttgtaggaaatgaacttccatcagacttgatagacacactactaaagtggatcccaagcaatgatgaggagcttaggcttcgactgtcctcccgtagcaccgccacaccgcacgcgtccgtggcggtcgaacatgcattttggagagaccaacttgaatgtgcggagcagtcgatcacacaatattttcataatgttgaatggaagcgataactaaatcaaggatgttctatttatatcggtctcaggtaattgtgagcagcagtagagactaagcagttctgtaattgcatttgttctaagatcattttctgtagttgcatggaagcaataactgaatcaagaatgctctatttatttcgatctcagccattttggaggacgaacgagcaccggggagagtccaggaggaggcagatactgctgggacatgtccaagccagtggagatgcagtggagatggagatcaacattggcatggagaagctgtgaaacccaccgcagcagaaccccacccagaggaagatcaacgcgcccgcctccgccatcaacgctctctctaccctctctc

SEQ ID NO: 207608 - DNA, 978 bp, Zea Mays
atgccccccgcctccatagtccctgtcatcggcgacctcagatccaacaggttggtctgcttgcgccgtgatcgcggaagctaccgcgccttcgtctccgtggatgaggtcctggatttgtgtgtcactggcgcggaatatgagggatcgagggcggcgcaggcggcgagctcgtgggcggaacagactggtgagagcaagaggatggatcaggagcttgagccccaggtaagccattctgaaaatctgtatcgcgctgatttacccgctttaggatttgtagttgtcgttcgtttctcaatgcgcttggttatcgatactgctatctcatggtctcagttcagctgagttcacttaactaggaccagcatgtgcagtagaaaatctctggttaattatgggtccttataacctccgttcgttgcttgaatttctcgttatatgtggcatgttcattcaagttgtttacttacaatcacataatgcttgcggtgttacatgggacatgctaatttctttggatgttagcatgtgaacttgtgagtcagttcattgctcatttcattgaacctatgctgccatgctggtgaagagacaatgaagcagccagttggtgttataaacacaatacacctcgctcccagctccgcattcgcctccgcctcagatccctacagcgtgatgcgagggaacagcaaccgtgcggcctccccatcctgagcacctcaaatccgatgcccctccccaagccattccctcggccacgacagcgacggcaacgagcatggcccccctctaccacctatgcctttccatttgtggcctccgcatcgccccaacgttgacccctccgtcctccccctctactcccagcgcagcgccggttttagctttggaaattgctgatcgattaattatggggggaagcgtctctacttccttctcggttggtcaaggccatacagagaattaagaagt

SEQ ID NO: 207609 - DNA, 587 bp, Zea Mays
ggcgccggtaggatcaccattggcgtctgtgtcatggagaagaagcgcgtgcgtctcgatttccagcgcgcgttctcttctccaatggagcagattctcgagcggctccgcgcgtttggagaattcgagattataatatttggagataaagttattctcgacgatcctattgagatttggccaaactgtgattgcttgattgccttctattcctctggttttcctctgcaaaaggttcaagcatatgctgctttgagaaggtatattttttattctctatttctttatatatctctttcaaatggtaactattcttgtaagcacgtctccattttcttaataatgtcttaatgctgagggagagggatgtaggggcatcaacatttatttgtttgctttgcaagtttctaacaacctcatccttcgagtggcttatttgtattcagtctgcttatctgttttcatataagaagcttaataaaggaataaaagaaagagactcatgttgcttagtgttggggcacaatttgtagtagctttttccttaggaatgcaaccacctctgggaaagcagtactatttaggag

SEQ ID NO: 207610 - DNA, 2096 bp, Zea Mays
gattgcaccaacccgttcaattgtacttcagatagcatcttctttgattgtcatcttttgcatactcttgttgacggtgctatcatattcttgaaaaccttccacgctgtccatctgagcattcttctatctctgcatttgtcccttaacagtcacctgctttgaggttccatttggatacccatggctggattcagtttgagattattatatatcttttgttctagctgtttctgttgttttctttccatccatacattatcactttgcttcccccaatattgttggttcctgtgctctttccaaagtttccttggaactttgagctttggaagatgccaaggagaacaggaaatgctgctccaaccaaatcagttgaattggtcaaacaagaccaattggagtttgatgatcctgatgaggtagatgacgaggaagaagttgagtatgaagaaattgaggaggaggttgagtatgaagaggtagaggaggaggaggaggaggatgaggatgaggaggatgaagaaatggaaggtgtgcatgaaattgatgctaatgatgaaagtaaaatggtggatgctgatgggaaggttgagaatgaaaaagagaagcatgctgagcttcttgctcttcctcctcatggagctgaagtttatgttgggggcatatcttctgatgtatcttctgaagatctcaaacaactatttgaatctgttggagaagttgtggaagtgcgaatgcgaggaaagggggataacaggacttatgcttttattaatttcagaactaaagcgatggccttaaaggccatccaaaatttgagcaataaagacctaaagggaaagaagataaaagtttctccctcccaggctaagaacaggctatttattgggaatgtaccccatgactggacacatgatgatttcaaaactgcagtggaagaagttggtcctggagttttaaaagttgaactcatgaaggcttagatcgcaataagggttatggctttattgaatactacaaccaggcatgtgcagagtatgctaagcagaagatgtctaccccagaattcaaactagatacgaatgctcctactgtcagctgggcagatcctaagaatgccaatgaagctacatctactgcacaggttaaatctctatatgtcaaaaacctccccaagactgttactcaagagcagctgaaaaagctgtttgagcatgttggagaaattacaaaagttgttgttccacctgcaaaatctgggcatgaaaatcggtacggttttgttcattttaaggagcggtacatggctatgaaggctctgaagaacactgagagatatgaactcgatggtcagctgctggattgttcacttgcgaaacctcctgctgataagaaggatagtactgtatcaacacctactgcaaaaggaggcccgttactcccaagttatgccccacttggatatggactggtgggagcttataatccacgtggaaagggattggcagatgcttataataacccccttggaaatggactggcaggtgcttatggtgtgctttccgctcgtgctgcacagccaatggtgtatgctccaggtgctcctcccggctcaacaatgatcccaatggtcctaccagatggccgtcttgtatacgtaccacaggccgcggggcagcagcctgtgcatgcgacttcacctctgccacagcaaggtggtcgtcgattcggtggtagtggcagcggtggtggcggatccagctcttccggcggaaagcggcagaggggagatgaccatggtagtaacagcaacaacagccgcaggggccggcaccgtccgtattgatgattgcaatgccgctgattagcagttagaagttagaaccgagcagttagcacattcgtcgcagtaccatgctggaaacggtggtttgaattatttatttaccatgctggaaacggtggtttgaattgaataagacaaagtttttgaaaaaaagtcaacgggtgtcgaatattcgtgaactgaggtattaccttagtcaagcttgaagaataaaaactatgctgtgctcttggctggactccacata

SEQ ID NO: 207611 - DNA, 604 bp, Zea Mays
atatttaagctccagccccaagacatcacatcacatatccgttgtggcagcagccttcgtgcaggcatggcgagctcatcttgtgcactgctgggtctggcctgcttcgtgctcctggcggcggcagccggcgccacgcagtacaaggtcggcggcgacaatggctgggccgtgccggacgccaccgccgagtcgttcaacacctgggcggagaagaccagcttccagatcggcgacagcctcttgttcgtgtaccccaaggacaaggactcggtgctgctggtggagccggccgactacaacgcctgcaacacctcctcctacgacaagcagttcgacgacggcagcacgtccgtggcgctggaccgcgccggcgccttcttcttcatcagcggcgtcgaggcctcgtcgcctcggttgcaggatgcgtcgcccacgccatgcttgctctctgaaaccgaaaactgctggatgcagtgcagtcgccgtgtagtgtaacaaaccgtgtgggattgtgaacagagtgtatctttcgtgttcgttgcgattcagcgggaaaaaacaaatttaattgaatgctcgactgcaatgtgatcatggcgct

SEQ ID NO: 207612 - DNA, 1833 bp, Zea Mays
caaggccttactcagcatggaacaggttctctgtcctcataactccaaccaaacaacggcagctagcgagctcccgcggtcccgccgccgccccctggtcctccaaaaaacggctgaaccctaaaccctccctagctcccgccgcctcgcttaaccgcgcccatggccgccgccgctcgcgccgccctcccgcggccccacctctctcttttttcgtcctcccaccgcagcccccatctgtccctcacgccctcctccgcccctcgcctgcgcagcggcgctgccacctcccctgcgctgcagcagcaccaccaggtcaccacgcgcctgggcgacgtgatcgaggcgcagcagttcgaccgggacgcgctgaacgagatcttcgaggtggcgcgggagatggaggccgtggagaggggttcccacggcgcccccagccgcgtcctcgaggggtacctcatggccacgcttttctacgagccctccacgcgcacgcgcctctccttcgaggctgctatgcggaggctcggcggggaggtcgtcaccaccgagaatgcgcgcgagttctcttccgccgccaagggggagacactcgaagataccataagaaccgttgagggttattccgatattattgtactgagacattttgaaagtggagctgcaaggaaagcagcagatactgcaaatattcctgttattaatgcaggtgatggaccagggcaacatccaacccaggctttgttggatgtgtacacaataaagagagaaattggcacactagatggaattaaacttggtttggttggtgaccttgctaatgggaggacagttcgttctctggcttacttgattgctaagtaccagaacattaagatatactttgtatctcctgatgttgttaaaatgaaggatgatatcaagaactacttaaattccaaaggtgttgaatgggaagaaagttcagatttgttggaggtggcatccaagtgtgatgttatttatcaaacacgtattcaaaaagaaagatttggtgagaggattgacctttatgaagctgctcgtggcaagtacatcgtggataaaaaggtcttagatgtgctgccaaaacatgctgtcatcatgcatccccttccaaggcttgatgagatcacagtagaagttgatagtgatcaaagagctgcatattttaggcaggctaagaatggcctctacataaggatggcattgctcaaacttctgcttgttggtcactgacatttcggctagtgctttagcttgtgctgcgtcaagggattagaaggtcaaggacagttaccacaggatgaggcgcatgaaggaaaagactagctaatccctaatgatttaggctacgattatgaacatgtactaaggtcataaatgtatttttatccgtgttgcatctcgtgcctataaataggtgatcagtacccctgtattgttcacgctagattgtaattgctctcgcgtcaacaccttcgaacaagccgaagatatcaatgtaatataaattctgttagtgttcatgtatatatcatgaaatacatatatgaaggaatgaattacatatattatctctatgtattcttattttcataaataatgacgacgtctccttcatgaccttcgtctgaagttcattatatccaaaaagagataatgcttcgaggacaaaggtccttaatgtttaataattgtgttaccttgtttttgatttacaacatttaagaacaagtgaacaatagtagaagttcacatcgcgcccgaattagactcgcggggccttcggaattgctcgccggtgttgtgttc

SEQ ID NO: 207613 - DNA, 535 bp, Zea Mays
cttttagtcatttacccaatggttcatatggaatacccaagtatctgctgcttcttgatgataactaaagctttgttggatgtgtacacaataaagagagaaattggcacactagatggaattaaacttggtttggttggtgaccttgctaatgggaggacagttcgttctctggcttacttgattgctaagtaccagaacattaagatatactttgtatctcctgatgttgttaaaatgaaggatgatatcaagaactacttaaattccaaaggtgttgaatgggaagaaagttcagatttgttggaggtggcatccaagtgtgatgttatttatcaaacacgtattcaaaaagaaagatttggtgagaggattgacctttatgaagctgctcgtggcaagtacatcgtggataaaaaggtcttagatgtgctgccaaaacatgctgtcatcatgcatccccttccaaggcttgatgagctgtgaggtcacgagaaactgaagatcatcttggtgcctggaatctggagtctca

SEQ ID NO: 207614 - DNA, 1861 bp, Zea Mays
gcggaattaaatagcgcgtgacccccgaggcgggcaaatctggatgcttccttccgtttccacctcaacccgtcccaccgctcccagtcccgggacgtacggtgaccccacaccacaccaccacaacccctccgtcctcttcgcggctgcggtgcggccccgggagttccttgattcggcgggcatcgccatgggagggcgtcgctggctagctgtggtaacctgacctcgccgctgcagctctgtagctagtattccagaggtgatttctcctctcctgatcgacagagggcaaatctggacaccttgatcgacctggagagtggcaacggcactgcagtgatcaaccatagcaacgacctggagagtggttgcgtgtgtgcgtgcgccaacggatgtccgagggatgacaggaacaaccagcacatggactgctcttcaccggcttcggacgccgttgctagaagtggagacgacaggaagtccgagggggaggagaagctgggcctgggccttctggacagctcgggaggggacaaggcgaagaagaagcggtcgaagaagaagccgccgcggccgccgaggccgctgacgcctacgccgctggacgtctctgaccagaagctcctcaacgagctgagcgagcttgccgtgctgaagcgggcgagggtcgagcggatgaaggccttgaagaagatgaagaacgccaagcaagggttctcgggtggcaatctgtgccccctgatcgtcaccgttatcttctgcgtcgtcattctctggcaaggtttcttctcgggacacgggccggcggtgagcttccatggatcaccggaatcgtcgatcagggggacgcgcagcagtctgatctccatcaggttctacaagaaccattccaacacgaggccaccaccattcagcgagaccactgcagctcccgataacgtagtagagaccggtccgaggctcaggaatcgtaaccaagcgagaaggctactagctcggtgacccgatgattatggcggcggccacacctcaaatgaaagaagctcgccacattttgaagcgtcgccggcgcttcgcttcgtcctcctcgaggcgccggccccacccccccgctccttggctgctgctccttggctgctgtaaaaaacgagtggactcctagtgtgtcgtgcgctgggtagtgaatctgtgttggccatggctctagcgaagcgtagagagcaacgaaagcaagcgagcgagcaagcaagcaagctgtctgtccgtatgtgtctggcatgttacagtaataaaaggtttgcgcgcaataaatcagagagctgatctgaatctgacccaccccgttgcagtgctgtgctgctgcacttgctcatcgttactgatttgctgaaatgtggcgtgttcttggttgtggccggctgggctgttctgttcatacctgctagaggatggctggaagtttttcatttcaagactttgagctatagatttcactcagctcggaacccagctgctggagtgagtgagatgaggtccagtccaggagagctgcgcacacaggctgtagatctgaaagagagcctgtagcaatggcgctgcaggttttcggttccagagatgaggtggctctatctacctggctgggacactggccagacacggttcagatcagatccacaggttcttgtcgccctgtgttgttgtgctcctgttttcaagtgtcgccacagtaatggagtcgcacatggcgtttgctcgctggtggtggcccgggaccgggatgcgcgcgcgcagcgcaggcacagctgccgggacgacgcgtccgcgacacgcttgcgagatgcgagttgacctgcgc

SEQ ID NO: 207615 - DNA, 1971 bp, Zea Mays
ggttttcagtggtgccacaagcgaaaagatgttgccagtgcttatcaataaacaatgccagctgcttggcttttgctgaacatttttttgcttacaaataaataaatactagatgagtagagagcaagcggagaacaaggggagcgagacgccgccttgccaagtgtaagcaaccgaggggagaacgagggtgcggccgtggcttgtggcgttcgatcaggataaaaaggtagctagtattccagaggtgatttctcctctcctgatcgacagagggcaaatctggttcgtgaccccccagtatcatatcagagagggccacggttttgcttatcaatgtgttaggagttaggaccaagtactggagctatttcgtggttccgatggagtctaagtgtgtgaacgaccaggacaccttgatcgacctggagagtggcaacggcactgcagtgatcaaccatagcaacgacctggagagtggttgcgtgtgtgcgtgcgccaacggatgtccgagggatgacaggaacaaccagcacatggactgctcttcaccggcttcggacgccgttgctagaagtggagacgacaggaagtccgagggggaggagaagctgggcctgggccttctggacagctcgggaggggacaaggcgaagaagaagcggtcgaagaagaagccgccgcggccgccgaggccgctgacgcctacgccgctggacgtctctgaccagaagctcctcaacgagctgagcgagcttgccgtgctgaagcgggcgagggtcgagcggatgaaggccttgaagaagatgaagaacgccaagcaagggttctcgggtggcaatctgtgccccctgatcgtcaccgttatcttctgcgtcgtcattctctggcaaggtttcttctcgggacacgggccggcggtgagcttccatggatcaccggaatcgtcgatcagggggacgcgcagcagtctgatctccatcaggttctacaagaaccattccaacacgaggccaccaccattcagcgagaccactgcagctcccgataacgtagtagagaccggtccgaggctcaggaatcgtaaccaagcgagaaggctactagctcggtgacccgatgattatggcggcggccacacctcaaatgaaagaagctcgccacattttgaagcgtcgccggcgcttcgcttcgtcctcctcgaggcgccggccccacccccccgctccttggctgctgctccttggctgctgtaaaaaacgagtggactcctagtgtgtcgtgcgctgggtagtgaatctgtgttggccatggctctagcgaagcgtagagagcaacgaaagcaagcgagcgagcaagcaagcaagctgtctgtccgtatgtgtctggcatgttacagtaataaaaggtttgcgcgcaataaatcagagagctgatctgaatctgacccaccccgttgcagtgctgtgctgctgcacttgctcatcgttactgatttgctgaaatgtggcgtgttcttggttgtggccggctgggctgttctgttcatacctgctagaggatggctggaagtttttcatttcaagactttgagctatagatttcactcagctcggaacccagctgctggagtgagtgagatgaggtccagtccaggagagctgcgcacacaggctgtagatctgaaagagagcctgtagcaatggcgctgcaggttttcggttccagagatgaggtggctctatctacctggctgggacactggccagacacggttcagatcagatccacaggttcttgtcgccctgtgttgttgtgctcctgttttcaagtgtcgccacagtaatggagtcgcacatggcgtttgctcgctggtggtggcccgggaccgggatgcgcgcgcgcagcgcaggcacagctgccgggacgacgcgtccgcgacacgcttgcgagatgcgagttgacctgcgc

SEQ ID NO: 207616 - DNA, 2457 bp, Zea Mays
ctcacccacgcgcttctctctctcaccagcaggccacgccgccgctgcaccaccgctctccggatcatcggctgtccccctcctcctcctcctcgcccactcaccggccatccctgctgcggtgccgcgcgttcaagcaggaggccgacgacggcgacggcgacccgactgaggccgacgcgcggaagcgcaggaagggcccgatgtacaagctcaaggcggcgatccagggcctcgcgggatctcgctccgccgccgcggaggtgtatgggggagagtaccagttccagcgcgccgtcgagaatttgtgcgagccaaggttccccaatccactcacgcgcgcgcatcgctgtggtttcctgtgttgctttccaccctcgcgcgctcttcttcttcatggagccatggcaggaagcggcaacaggagatttggccgggatatggtgtctagcagcacacatttctcccaatggcagatggtctgggttggagaccacgttcctggcggcagagtcgatctgcaatgtggaggtccaatctggccaccgatgtcagctcgctccggagccaattccgattccctagcagtgacgacgttcagatgcagcttcagatgcagcgacgacctctctctccatccatggatctctaggcaactggcatcaaaatgaagggaaccaggaatcgaaacggccccgagaatcccaaagcacgagaaggggaacaagggaactaggcatcgtgaagagagcccggggtgatgaattgttacggttcatggacggagcaagcaaggagcctctccgcaaggtaaacactaacacgcgattcctcttcaatccccggtcgtttcccgagatctggtgttataacccttgtagcttcgactcctagcttcagttggggggcaataacggattcggaaattttgggctgaaagttgttccttgtgttgttgaggtgctggaggggagtggttaattgtggtgtagcgctatggtgtcaaaaggtggatggagtccgtgacattttctcattgatttattttagagctgcttttttgtgtgccataattaggcttgcccaaccggtgcaggtgacttatttagcatgctgaactgtaggtagtattctagtttgtggccgtcgtgcaagtacatatgtgttggctttcagttcaaccgtctttacagtattcggaaattgcttaaaattcagtgttgatcatagaggcagcacaaatgtttcctattcagagctggtaatggtatggtcattactctgaatcatagtatcagacaatggctggcatagtatttatccaccatgaaaacacaattagcttgcaggtctaaatttggcatcctctacatgaactgaaaccagttaacctcttacgaagtaagaatccttggccttgaacaaatcaaagctaccatgcttgatggaaccaaacatttcctcaccagtaacacatttgttgaaacaatactttcattacactccaggtacagccgtacagtgttcagcttaacctcatgatttcttactactgcaggtctaacatttacattggtaaccttttttttatctttccagcactgtcggtccagtcactattcccttatctatacttcatggtacgtaggcatgtttttatcccaattttcgccttctcactattaacttgtatgcagagtacttgctctgttccacaatttgattcagaaaaaaaaaacaaatattcacctttattgcaatcaaacaagatatcagggacttgaaagtggcgaaagaggagcaagacattgggttttatgctggttttgttggggctacctatttccttggaagggccatcagcgccatgccatggggcatgttcgctgacaagtatggaaggaagccatgcatcgtgatcagcatcctctcagtgattgtgttcaacacactgtttggacttagcacaacttactggatggcaattgtgactaggggattacttgggttgctatgtggtatacttggacccatcaaggcttatgcttcagaagtctgcaggaaagagcaccaagctctgggaatctctcttgttacatcttcacgagccatagctcttgttattgggcctgctattggaggcttccttgcacaggattccggctctcatcaagtgactcctttccctcacattgactttgcggacagatgtctcaattctagtggtggagctacgaacaacaatccgatgtcctgatcgagagcgatggagctaatgtttgaacttgtgtgtttgaacttgtgaactaaaaatgtgaactatggatgtgaacttgtgtgaatatgtgaacttatttatttagacatatgtgaatttgtgaacttatatatttggacttgtgtgaatttgtgatatgaacatatatcaatgtgtttgaaatctgtattgtatgtgat

SEQ ID NO: 207617 - DNA, 2487 bp, Zea Mays
ctcacctgtctcattctcacccacgcgcttctctctctcaccagcaggccacgccgccgctgcaccaccgctctccggatcatcggctgtccccctcctcctcctcctcgcccactcaccggccatccctgctgcggtgccgcgcgttcaagcaggaggccgacgacggcgacggcgacccgactgaggccgacgcgcggaagcgcaggaagggcccgatgtacaagctcaaggcggcgatccagggcctcgcgggatctcgctccgccgccgcggaggtgtatgggggagagtaccagttccagcgcgccgtcgagaatttgtgcgagccaaggttccccaatccactcacgcgcgcgcatcgctgtggtttcctgtgttgctttccaccctcgcgcgctcttcttcttcatggagccatggcaggaagcggcaacaggagatttggccgggatatggtgtctagcagcacacatttctcccaatggcagatggtctgggttggagaccacgttcctggcggcagagtcgatctgcaatgtggaggtccaatctggccaccgatgtcagctcgctccggagccaattccgattccctagcagtgacgacgttcagatgcagcttcagatgcagcgacgacctctctctccatccatggatctctaggcaactgcgaacaagggaaccaggcatcaaaatgaagggaaccaggaatcgaaacggccccgagaatcccaaagcacgagaaggggaacaagggaactaggcatcgtgaagagagcccggggtgatgaattgttacggttcatggacggagcaagcaaggagcctctccgcaaggtaaacactaacacgcgattcctcttcaatccccggtcgtttcccgagatctggtgttataacccttgtagcttcgactcctagcttcagttggggggcaataacggattcggaaattttgggctgaaagttgttccttgtgttgttgaggtgctggaggggagtggttaattgtggtgtagcgctatggtgtcaaaaggtggatggagtccgtgacattttctcattgatttattttagagctgcttttttgtgtgccataattaggcttgcccaaccggtgcaggtgacttatttagcatgctgaactgtaggtagtattctagtttgtggccgtcgtgcaagtacatatgtgttggctttcagttcaaccgtctttacagtattcggaaattgcttaaaattcagtgttgatcatagaggcagcacaaatgtttcctattcagagctggtaatggtatggtcattactctgaatcatagtatcagacaatggctggcatagtatttatccaccatgaaaacacaattagcttgcaggtctaaatttggcatcctctacatgaactgaaaccagttaacctcttacgaagtaagaatccttggccttgaacaaatcaaagctaccatgcttgatggaaccaaacatttcctcaccagtaacacatttgttgaaacaatactttcattacactccaggtacagccgtacagtgttcagcttaacctcatgatttcttactactgcaggtctaacatttacattggtaaccttttttttatctttccagcactgtcggtccagtcactattcccttatctatacttcatggtacgtaggcatgtttttatcccaattttcgccttctcactattaacttgtatgcagagtacttgctctgttccacaatttgattcagaaaaaaaaaacaaatattcacctttattgcaatcaaacaagatatcagggacttgaaagtggcgaaagaggagcaagacattgggttttatgctggttttgttggggctacctatttccttggaagggccatcagcgccatgccatggggcatgttcgctgacaagtatggaaggaagccatgcatcgtgatcagcatcctctcaggattgtgttcaacacactgtttggacttagcacaacttactggatggcaattgtgactaggggattacttgggttgctatgtggtatacttggacccatcaaggcttatgcttcagaagtctgcaggaaagagcaccaagctctgggaatctctcttgttacatcttcacgagccatagctcttgttattgggcctgctattggaggcttccttgcacaggattccggctctcatcaagtgactcctttccctcacattgactttgcggacagatgtctcaattctagtggtggagctacgaacaacaatccgatgtcctgatcgagagcgatggagctaatgtttgaacttgtgtgtttgaacttgtgaactaaaaatgtgaactatggatgtgaacttgtgtgaatatgtgaacttatttatttagacatatgtgaatttgtgaacttatatatttggacttgtgtgaatttgtgatatgaacatatatcaatgtgtttgaaatctgtattgtatgtgat

SEQ ID NO: 207618 - DNA, 1668 bp, Zea Mays
acacgcgattcctcttcaatccccggtcgtttcccgagatctggtgttataacccttgtagcttcgactcctagcttcagttggggggcaataacggattcggaaattttgggctgaaagttgttccttgtgttgttgaggtgctggaggggagtggttaattgtggtgtagcgctatggtgtcaaaaggtggatggagtccgtgacattttctcattgatttattttagagctgcttttttgtgtgccataattaggcttgcccaaccggtgcaggtgacttatttagcatgctgaactgtaggtagtattctagtttgtggccgtcgtgcaagtacatatgtgttggctttcagttcaaccgtctttacagtattcggaaattgcttaaaattcagtgttgatcatagaggcagcacaaatgtttcctattcagagctggtaatggtatggtcattactctgaatcatagtatcagacaatggctggcatagtatttatccaccatgaaaacacaattagcttgcaggtctaaatttggcatcctctacatgaactgaaaccagttaacctcttacgaagtaagaatccttggccttgaacaaatcaaagctaccatgcttgatggaaccaaacatttcctcaccagtaacacatttgttgaaacaatactttcattacactccagcactgtcggtccagtcactattcccttatctatacttcatgggacttgaaagtggcgaaagaggagcaagacattgggttttatgctggttttgttggggctacctatttccttggaagggccatcagcgccatgccatggggcatgttcgctgacaagtatggaaggaagccatgcatcgtgatcagcatcctctcagtgattgtgttcaacacactgtttggacttagcacaacttactggatggcaattgtgactaggggattacttgggttgctatgtggtatacttggacccatcaaggcttatgcttcagaagtctgcaggaaagagcaccaagctctgggaatctctcttgttacatcttcacgagccatagctcttgttattgggcctgctattggaggcttccttgcacagggatagtggtcgacaaaaatatttctagcatcaggaaggtttccataattccttccttgctttgtaatatcgttgctagcagcaggatcatgtattgcatgcatttggcttccgatagaattggcaatatacctattttcctacacatccaatggggccttggggacgccctccatggcaaacacagccacttccatcaccagcggtatgttcctgattcatgctgcttgctacttttatttgctacaaattggacttttttgggactactccactactgcttatacatctggtgtttgatcaagctcgtagtggacatacttgcaagtctggatattgtacaacatattacagcgtgagctacagcgtgctgaaaattttagattgtgaataatgactgaatctggaattttgtgttgtgagagctgttttggagttcttttgtggctgatctaggaagttttaagctgaggtgttggtagagtaactctctgtctggttagtttggtgctcagttcaacactaaattctgaattctgtcaggtaaactaacctgaaca

SEQ ID NO: 207619 - DNA, 2174 bp, Zea Mays
gcaacgtcttcgctccccccctaccctcgcggtctcgcctgcgcgtcccctccctttccctttccacggccgcatccaccacctccgtttccaccccacttgatagcgacgccgccgcacaggaactcaggaacccctctcgcatctcccctcgcttccccgcgacagcgacggccggtcgcttcaagtgacccaagcacctgcgcccctcctttctccttttctcccctcggcccccgtccctctcagcccctatgacctcttccgcttccccgaaccctagccccgtcccagtccccactccgatcaccaccgcgaacgggaccacctcatcaccgaaggatcagccgccgcctccgcctccgctgccgcagcagcagcagcagcaggggggcggccaggaggaggcagaggcggcggatgggggaggcgccgaggctgcggaggcgggagtattagctggtgttgcggccgaggctatggaagtggatgggggctctggcgcgggggatgcggaggcgggcggctcggtggggggaggagtaggcgctggggcgggtggaggagcgcagcaggcctcgccggcgaccgtgttccggattcggctcaagcagtcgcctgcgagcctccgtcacaagatgcgcgtgcccgagctgtgcagaaacttcagtgcagttgcttggtgtggaaaactgaatgcaattgcttgcgcttcagagacttgtgcacgtattccaagctcaaattcaagccctccattttggattcctatacatatcctgaatccagagagaccaacagaatgctctgtattcaatgtgaaagcagattctccacgtgactttgttcagttcattgaatggtctcctcggtcctgccctcgtgcattgctagtggcaaattttcatgggcggatcactatatggacacaaccaacaaagggtcctgtaaatcttgtacgtgatgcaagcttgtggcagtgtgaacatgaatggcgtcaagatctttctgtggtgaccaagtggttgtctggaatttctccgtatagatggcttcctacaaactccactagttcaaacctgaagaccttcgaggaaaaattcctcacccaacagcctcagagtgcaggttctgttcaacttcattggtcacaatggccttctcaaaactcagcacattctagatggttttctactagcaaagggcttctaggagcaggacccagtggcataatggctgctgatgctattgtaacagaatctggagctttacatgttgctggggtaccccttgttaatccatccactgtagttgtttgggaagtgatgccaggtcttggaaatggtattcaggcaactgcaaagataaatgcagcaagttctgttcctccatctctgaatcccccttcatggccgggttttgctccactagcagcctacctattttctttgcaagattatcttgtttctgagggtgcacagacaaaaaagctgacagacaataatgagactactgaggctgcatcaattcattgttgtccagtttctaatttttcagcttatgtcagtccagaagcagctgcacagtcagctactactaccacctgggggtctggggtcacctcagttgcttttgatccgactcgtggaggatcggtcattacagttgtaatagttgaagatgaacggagctcctctgagtgcagtgttgacagggcgaacagactcagctttgacccttacgatcttccaaatgatgttcgacaactagctcaaatagtttattctgctcatggtggtgaagttgctgttgctttcctccgtggaggagtgcacattttctcaggtccaaattttgatcaggttgacagctaccatgtcaatgttggctctgctattgctccaccagccttttcatcaagcagttgctgcttagcatcagtttggcatgacacgctcaaagatcgaaccatattgaagataatacgtgtgcttcctcctgcaattcttagcacacaaacaaagatcagctcagcagcatgggaacgtgcaatagcagatagattttggtggagtttattggctggagttgattggtgggatgctgttggttgtacacagagtgctgccgaagatggtataggtaagggcattgctgatgatgatatgctttag

SEQ ID NO: 207620 - DNA, 3617 bp, Zea Mays
gaaattactaaagaaccagaattctattgacacataaacccttgacccgcggtactcaaaccctcggtccttctcggcggcggcgtacgggatagcagaggtggccatggcggcggtggccacggtgagctctgccagtgggctccttgctatgctgcaggagccggcgccggagctgaagctgcacgcactcgacagtctcaactccgtcgtccacctcttctggcccgagatctccaccagtgttcccaccatcgagagcctgtatgaagatgaagagtttgagcagaggcagcttgcagcacttgttgtttctaaggtattttactacctgggcgagttaaatgattcactgtcatatgcacttggtgctgggtccctatttgatgtttccgatgattcagactatgcccatgctcttttagccaaagcattagatgaatatgccagtatcaagaccagagcctctaaagctgcaaaggaggaagagaacattgatcctcgattagaggccatagtggagaggatgcttgaaaagtgtattcttgatgggaaatatcaacaggccatgggtatggctgttgaatgcagaaggttggataagctggaggaagcaattgttcggtgtgataatattcatggggctctatcgtattgcatcaatctttctcatcaatatgttaatcaccgtgaatatcgctttgaggttctccgttgtattgttaaaatataccaaactttgccaaacccagattatcagagcatttgccagtgtcttatgtttttgggtgagccagaaactgttgcaagcatattggacacgctgctttctggaaacaaggatgatgctctacttgcatatcaaactgccttcgatcttgttgagaatgaaaaccaagcttttcttttgaatgtgaggaatcgtttggcctcaccgactcctgtgccatccaaccctgacagcgagccagctgtgcaagatgatcaaactgccagcactgtgggtacaggcacagaagcagctggagatgttcagatgagagatgatacagcaccaaatggaaatgctcacactgtggatccaaatgaggtagcacatgctgaccggcttcaaaaaattaaaggaatactgtcaggggagacttctattcagctgacattgcaatttctatatagccacaacagatctgatcttttaattctgaagacaataaagcaagctgtggaaatgaggaatagtgtttgtcacagttcaacaatatgtgccaatgcaatcatgcatgcgggaactactgtagatacctttctaagagagaacctggagtggttaagcagggcaaccaattgggcaaaattcagtgcaactgctggactaggtgtcattcatagaggtcaccttcaacaaggccgggctttgatggccccctacctacctcaaagtggtgcagttggcggtggcagtccatattcagaaggtggtgccctctacgcactaggtctgattcatgccaatcatggtgaaggaatcaaacaattcctccgtgaaagtcttcgcaacaccagtgcagaggtcatccagcatggtgcatgtttggggcttgggcttgcagctttgggcacatcagatgaggaaatatatgaggacataaagaatgtcctttacacagacagtgctgttgctggtgaggcagctggtattggcatgggcttgctcatggttgggaccgctagtgaaaaggctagtgagatgcttgcttatgcacatgatacacagcatgaaaagattataaggggtttgtcactgggaattgcactgacagtatatggcagagaagaggaagcagacaccttgattgaacaaatgactagagatcaagatcccatattacgttatggtggtatgtatgcattggctctagcctacaggggaactgccaacaacaaagccatccaccagctgctgcattttgctgtatcagatgtcagtgatgatgttcggaggactgcagttatggctcttggttttgttctgtacaatgagcccgagcagactccaagaattgtatccctgctatctgaatcatacaacccacatgttcgctatggtgcagccttagccgttgggatatcatgtgcagggtctggattaagtgatgcaatttccttgttggagcctcttacatcagacgttgttgactttgtgcgtcagggagctctcattgccatggcaatggtaatgatccaaacgaatgaatcctttgattctcgtgttggagcatttaggcgtcagttggagaagatcattcttgacaaacatgaggacaccatgagcaagatgggtgccatactagcttctggtgtccttgatgctggtggtaggaatgttacaatcaagctcctttcaagaaacaagcatgacaaactcactgctgtgattggtcttgccgttttcagtcagttctggtactggtatcctctcttatattttatcagcctggccttctcaccaacagccttcattgggctcaactctgatttgaaagtgccaaagtttgagttcctgtcacatgctaaaccgtctctcttcgagtatcccaaaccgacaactcagcagactactacttcgacagtgaaactgccaacagccattttgtcaacttatgcgaaagcaaaatctagggcaaagaaggacgcagaaagcaaagctaaccaggagaaagcaacagaggaggcttctggttctacctcaagcaaggcggctaaagctcaagagaaggatgctgatgtcatgcaggttgataatgccactgaaaagaaagctcctgaaccagaagcaacgtatcaactcctgacgaacccagctcgggtgatccctgcacaggagaagttcatcaagtttcttgaaaacagccgatacgtccctgtgaaaccagcgccttctggattcatcctcctccgagaccttcagcccactgaggccgaggaccttgcactgaccgatgctcccacagcagttggaggaagcaccggcaacactgccacagctgcaagccaacaggggtccggatcatctgccatggccgttgacgacgagccacaaccgccgcaaccctttgagtactcctcataagcgtagatacctgggtccgtagagggttgtgttggtggtctgaacttgcgattcccctcgtcctttctataccttttgttatcttttttttttttactttctgagtatgtagtgtgcggaaatttgttgttggttggaagactttttgtaggctcgagaattatacttgagtcggctctataggatcatcgttgagaatctgggtgctcttatagctaagccccaacaaccctgattttatcctagccgtgaagtcatacatagagcctgggttattcatctgggttattcattgctgcggttttaatccaactatagcttctataatattttgtcttcatagattgcagctactacagtcggacgaccaacggaggtgttctttaggggcaatcatacctaccacatgggcatgtatattatgttgtatcaacaaacaacgatgtctagtatgacatagctggtaatcgatgtaataatctatatt

SEQ ID NO: 207621 - DNA, 761 bp, Zea Mays
tccaacatctaatgagggtgtcaaaccagtcttctggcgccacatatttcttggggcataatgtgggagatggcaaaactatggatgaaaggatacaaggttatcatcctggacatcccgctgttgtttgagaccaagatagatcgatggacaaatccagtaactgtggtctgggttaacccagaaacccagattcagaggttgatgtcaagagacgggtgttctgaggaacaagctcagaacagggtcaacgcacaacttgcgttggactggaagaggtcggaagccgacatagtgatcaacaactctggatcactggatgacaccagactgcagttccaggatgtcttgaggaaagtttctgagccattaacatggaaggaacgcttgagatcccgagatggcctgatctccgttgtcgtgtgtacggcagtgggcgtattgcttgctcggaagaatctactatgattctgataaggttcaggaagctaagaacagtgatatgtcgttttagagtagaggacgtacacaattaagcttgtctggtgcctgtgcctgacaaggaaattgaacggctgtatgtggagctttgattgatgaaataatttttttgtttgacgtattgttttttgcaatagaaattgccacagtaacacaatgcatatataggttggctgaagttacctgcccagtgtaatatttttaaagcatgtttgtaacaggaatgacagaggggcgggtattcgggttagggccccgaa

SEQ ID NO: 207622 - DNA, 970 bp, Zea Mays
ctcaatctcaagtctcaactagagaagaaaaaaaaaagccccgacggacccgctcccttcaactaacccatcgctgccgccgagcgccttcgactgcggcacctccagcgagaggggggaacccgaggagatgaggctggtcggcctgacgggcgggatcgcgtccgggaagagcactgtctccaacctattcaaggacgccggcgtccccgtcgtcgatgcagacatcgttgctcggtcttctggcgccacatatttcttggggcataatgtgggagatggcaaaactatggatgaaaggatacaaggttatcatcctggacatcccgctgttgtttgagaccaagatagatcgatggacaaatccagtaactgtggtctgggttaacccagaaacccagattcagaggttgatgtcaagagacgggtgttctgaggaacaagctcagaacagggtcaacgcacaacttgcgttggactggaagaggtcggaagccgacatagtgatcaacaactctggatcactggatgacaccagactgcagttccaggatgtcttgaggaaagtttctgagccattaacatggaaggaacgcttgagatcccgagatggcctgatctccgttgtcgtgtgtacggcagtgggcgtattgcttgctcggaagaatctactatgattctgataaggttcaggaagctaagaacagtgatatgtcgttttagagtagaggacgtacacaattaagcttgtctggtgcctgtgcctgacaaggaaattgaacggctgtatgtggagctttgattgatgaaataatttttttgtttgacgtattgttttttgcaatagaaattgccacagtaacacaatgcatatataggttggctgaagttacctgcccagtgtaatatttttaaagcatgtttgtaacaggaatgacagaggggcgggtattcgggttagggccccgaa

SEQ ID NO: 207623 - DNA, 3151 bp, Zea Mays
ggcaagactaccccctgcatatgtggggaggctggttcgaacctgcaacctggtgactcaagcatttgtgccggctgtattactgggagaggttgagccaaagtcgaatgagcaacatgctaagggccgtgagcaatctagtgagtccacttcagaacaagagactgaactacatgacgattttcaaacttctgcaactgaacatcaactagaagttaaattagatggtggagtgaaagagagtgatgacaaagataaagagaagggaaaggatggagaaaaggaaaaatctaaggagaaggatctggataagaaaaatgacagagagaaggagaaaggaagagccatggacggtgcaagtctggataacatcttgcagaggctaccgggatgtgtcagtcgtgatctcattgatcagttgacggttgagttttgctacctaaattctaaagcaaatcgaaagaaacttgcgcgtgccttattcaatgttaataggacttcactggaactgttgccttactattctcgtttggttgcgacactatcaacttgtatgaaagatgttccaagtatgcttctgtctatgcttgaagaggagttcaactttttaataaataagaaggatcagatcaacattgaaacaaaaataaaaaatatacggtttattggggagttgtgcaagttcaagatggctcctccagctcttgtttttagctgtttgaagtcctgccttgatgatttcagtcatcataatattgatgtggcttgcaaccttctcgagacttgtggccgatttttgtaccgctcacctgaaactacgattcgcatggctaacatgctggagatactgatgagattgaaaaatgttaagaatttggatccacgtcacagtacacttgtagaaaacgcttactacctttgtaaaccacccgaaagatctgcacggatatcaaaagttcggccacctttgcatcaatacataagaaagttgcttttctcagatcttgacaaatcaagtgttgaacatgttttgcgccaactacgcaaagttaccttgggcagaatgtcaacaataccttctgaagtgctttctaaaggttcacaaaggaaagtacagccaagttcatctgattgctcttctcactgctagtctcagccgctatcatgatgactttgctgtcgcagtggtagatgaggttttagaagagataagggttggattggagttgaatgactatgggatgcaacaaaggcggcttgcccacatgcggttccttggagagctatacagctacaagcatatagattcatcagttgtttttgatacactgtaccttatcattgtgtttggtcatggaacacctgaacaagatgtgttggatccaccagaagattgcttcagaatcaggttgatcattacacttttacagacctgtggtcactatttcagtaagggatcttcaaaaaggaagctggacaaattcttgctacactttcaaagatacattattagtaaagggcccttaccactcgacatagaatttgacattcaggatttatttggagagctacgaccaaacatgtctaggtatttatcaatcgaggaacttgttgctgcgttagttgagcttgaagaaaatgagcgctcagccccagtagaaaaggttgaaaatgaaagacactcggacaatgaatctcataaaagacaggcacgagatgctggtccatctgtgaatggtggaagcgctgcaaatggaattgaggaaaatggcaaggatcatgaaatagcagatagtgagagctattcagatagtggcagcattgatggacgggaagatgaggatatattatctgaggataaatcaaatgatggctcagataatgaaggcgacgatgaagatgatggcattcctgttggttctgatgaagatgaaaatgttgaggttagacagaaagttatgaaggttgatcctaaggagcaagaagactttgatcgagagctcaaagcccttcttcaggagagcttggagtcccgcaaatcagaggcccgttcaaggctccctctgaatatgatggtaccgatgaatgtccttgaaggttcatcaaaagactcgagggccacagaatctgagagtggagaagaaacagtagatgaagagggtggcaatgctgggggtagcagcaaggtgcgcgttaaggtgctaatgaagaaagggcacaaacaacagacgaggcaaatgttaattcccgctgatagttcaatcgttcgaagcacgaagcagcaagaagctgccgagcttgaggagaagcagagcattaagcggaggatccttgaatacaatgaaagggaggaggaagaactgaatggagcatcacaaatggggaactggggtcaaggagctaccaacaccagcagtatcagatcaggtggccggggcagctgggatggttcagcacggggaggtggtcgacaacgacaccacatcgccggttctggtggtttctatcacagttatggcaggagaagatgagtttgtcctgatgggaggtggttggcagaggcgccacactgtgggttcttgtggtttctatcagttgttgcaggagaacagttagctgtgtgagctattttgtcctgagcttttttttggcagggccatgcttctctctatttaaccgcctaacgatcagattaacagggaagaaatttcggggaggttaacacagcttgatggacaattgcttccaccaccctaatctgaaagataagataattctaccactgatgggagatagcaatgccttgaaggagctatttttctggtggcccgaatggcttgagttgcttggtagttatgggcttatggctgtacctggagagcatagataccccggttgctcatgtacatataataataacataatttggcaacgagtgtgagtcgtttggagattgtgtgcgcacttgtatctgagtatggatctgatggtggtacttgcatagtttagatgtgcatactgtttcgacgccatgtgtgtgtatggggcacctgataaaaaaattactgtttgattcccatttagttatgcgtgcaggagttattatgattaggggtggtaatagatgacgatccaaatgttttttcacaat

SEQ ID NO: 207624 - DNA, 4073 bp, Zea Mays
ggagatagttcactaaagcttcaactgatgcaaactacctgagaaccctggactccagtatcaagcgaaatacaacagttataaagaagttgaagacaataaatgatgagcagaaggatgggctaatggatgagttaaaaagtgtgaatttgagcaaatttgtcagcgaagcagtttcttatatttgtgaggccaaacttcgctctgctgatatacaagctgctgttcaggtttgctcactccttcatcaaagatacaaggacttctctccttgtcttatacaaggtctactgaaggtcttctttccgggaaaatctgtagatgacttggatgcagataaaaattcgagagccatgaagaagagaagcacactgaaacttttgattgaactgtattttgttggaattgtcgaagatgctagcatatttgtaaatattataaaagatcttacatcagcggaacatttgaaggaccgtgaaggaactcaaaccaacttgtctcttctatctacctttgctcgtcaagggaagttttttttagggctacaacctcatggtcaagaagcttatgatgagttctttaaggagctaaatgttaccgctgagcagaagaagttctttaagaaagccttgaactcttattatgatactgtagctgaactactgcaatcagaacatgtgtctcttcgtctaatggaggcagagaatgcaaaagttttaagtgccaaaggtgaactaagtgatgagaacacagcctcatatgagaaactcaggaagtcttttgatcagttactacgtggtgtatcctcgttggctgaatctcttgatatgcagcctccagtgatgccagatgatggaaatacaacaagagttactacaagaactgatgccttgccttcttctggaaaagattcatctgcattggaacctatctgggatgatgaagataccaaagctttttatgaatctttacctgatctcagagcatttgtgccggctgtattactgggagaggttgagccaaagtcgaatgagcaacatgctaagggccgtgagcaatctagtgagtccacttcagaacaagagactgaactacatgacgattttcaaacttctgcaactgaacatcaactagaagttaaattagatggtggagtgaaagagagtgatgacaaagataaagagaagggaaaggatggagaaaaggaaaaatctaaggagaaggatctggataagaaaaatgacagagagaaggagaaaggaagagccatggacggtgcaagtctggataacatcttgcagaggctaccgggatgtgtcagtcgtgatctcattgatcagttgacggttgagttttgctacctaaattctaaagcaaatcgaaagaaacttgcgcgtgccttattcaatgttaataggacttcactggaactgttgccttactattctcgtttggttgcgacactatcaacttgtatgaaagatgttccaagtatgcttctgtctatgcttgaagaggagttcaactttttaataaataagaaggatcagatcaacattgaaacaaaaataaaaaatatacggtttattggggagttgtgcaagttcaagatggctcctccagctcttgtttttagctgtttgaagtcctgccttgatgatttcagtcatcataatattgatgtggcttgcaaccttctcgagacttgtggccgatttttgtaccgctcacctgaaactacgattcgcatggctaacatgctggagatactgatgagattgaaaaatgttaagaatttggatccacgtcacagtacacttgtagaaaacgcttactacctttgtaaaccacccgaaagatctgcacggatatcaaaagttcggccacctttgcatcaatacataagaaagttgcttttctcagatcttgacaaatcaagtgttgaacatgttttgcgccaactacgcaaagttaccttgggcagaatgtcaacaataccttctgaagtgctttctaaaggttcacaaaggaaagtacagccaagttcatctgattgctcttctcactgctagtctcagccgctatcatgatgactttgctgtcgcagtggtagatgaggttttagaagagataagggttggattggagttgaatgactatgggatgcaacaaaggcggcttgcccacatgcggttccttggagagctatacagctacaagcatatagattcatcagttgtttttgatacactgtaccttatcattgtgtttggtcatggaacacctgaacaagatgtgttggatccaccagaagattgcttcagaatcaggttgatcattacacttttacagacctgtggtcactatttcagtaagggatcttcaaaaaggaagctggacaaattcttgctacactttcaaagatacattattagtaaagggcccttaccactcgacatagaatttgacattcaggatttatttggagagctacgaccaaacatgtctaggtatttatcaatcgaggaacttgttgctgcgttagttgagcttgaagaaaatgagcgctcagccccagtagaaaaggttgaaaatgaaagacactcggacaatgaatctcataaaagacaggcacgagatgctggtccatctgtgaatggtggaagcgctgcaaatggaattgaggaaaatggcaaggatcatgaaatagcagatagtgagagctattcagatagtggcagcattgatggacgggaagatgaggatatattatctgaggataaatcaaatgatggctcagataatgaaggcgacgatgaagatgatggcattcctgttggttctgatgaagatgaaaatgttgaggttagacagaaagttatgaaggttgatcctaaggagcaagaagactttgatcgagagctcaaagcccttcttcaggagagcttggagtcccgcaaatcagaggcccgttcaaggctccctctgaatatgatggtaccgatgaatgtccttgaaggttcatcaaaagactcgagggccacagaatctgagagtggagaagaaacagtagatgaagagggtggcaatgctgggggtagcagcaaggtgcgcgttaaggtgctaatgaagaaagggcacaaacaacagacgaggcaaatgttaattcccgctgatagttcaatcgttcgaagcacgaagcagcaagaagctgccgagcttgaggagaagcagagcattaagcggaggatccttgaatacaatgaaagggaggaggaagaactgaatggagcatcacaaatggggaactggggtcaaggagctaccaacaccagcagtatcagatcaggtggccggggcagctgggatggttcagcacggggaggtggtcgacaacgacaccacatcgccggttctggtggtttctatcacagttatggcaggagaagatgagtttgtcctgatgggaggtggttggcagaggcgccacactgtgggttcttgtggtttctatcagttgttgcaggagaacagttagctgtgtgagctattttgtcctgagcttttttttggcagggccatgcttctctctatttaaccgcctaacgatcagattaacagggaagaaatttcggggaggttaacacagcttgatggacaattgcttccaccaccctaatctgaaagataagataattctaccactgatgggagatagcaatgccttgaaggagctatttttctggtggcccgaatggcttgagttgcttggtagttatgggcttatggctgtacctggagagcatagataccccggttgctcatgtacatataataataacataatttggcaacgagtgtgagtcgtttggagattgtgtgcgcacttgtatctgagtatggatctgatggtggtacttgcatagtttagatgtgcatactgtttcgacgccatgtgtgtgtatggggcacctgataaaaaaattactgtttgattcccatttagttatgcgtgcaggagttattatgattaggggtggtaatagatgacgatccaaatgttttttcacaat

SEQ ID NO: 207625 - DNA, 4346 bp, Zea Mays
attcggatctggtctaattacaagcatatacatacccattaacttcgttattttcttcttgcaaaagttatataggatacggaggatattttggttgcgcataacaagttggatagttctgggttttcgctctgaacaaaatggacaatgctcagagtgagaaccgaattgataccaagcaagatgatgatgtgcgccagatcaaacatgatgatgaggaggctcgccttgaagaatataaaaagatcattgatcaaaagacttccctccgccggagcaacctaaaccctgaaaggcctgatgcaaactacctgagaaccctggactccagtatcaagcgaaatacaacagttataaagaagttgaagacaataaatgatgagcagaaggatgggctaatggatgagttaaaaagtgtgaatttgagcaaatttgtcagcgaagcagtttcttatatttgtgaggccaaacttcgctctgctgatatacaagctgctgttcaggtttgctcactccttcatcaaagatacaaggacttctctccttgtcttatacaaggtctactgaaggtcttctttccgggaaaatctgtagatgacttggatgcagataaaaattcgagagccatgaagaagagaagcacactgaaacttttgattgaactgtattttgttggaattgtcgaagatgctagcatatttgtaaatattataaaagatcttacatcagcggaacatttgaaggaccgtgaaggaactcaaaccaacttgtctcttctatctacctttgctcgtcaagggaagttttttttagggctacaacctcatggtcaagaagcttatgatgagttctttaaggagctaaatgttaccgctgagcagaagaagttctttaagaaagccttgaactcttattatgatactgtagctgaactactgcaatcagaacatgtgtctcttcgtctaatggaggcagagaatgcaaaagttttaagtgccaaaggtgaactaagtgatgagaacacagcctcatatgagaaactcaggaagtcttttgatcagttactacgtggtgtatcctcgttggctgaatctcttgatatgcagcctccagtgatgccagatgatggaaatacaacaagagttactacaagaactgatgccttgccttcttctggaaaagattcatctgcattggaacctatctgggatgatgaagataccaaagctttttatgaatctttacctgatctcagagcatttgtgccggctgtattactgggagaggttgagccaaagtcgaatgagcaacatgctaagggccgtgagcaatctagtgagtccacttcagaacaagagactgaactacatgacgattttcaaacttctgcaactgaacatcaactagaagttaaattagatggtggagtgaaagagagtgatgacaaagataaagagaagggaaaggatggagaaaaggaaaaatctaaggagaaggatctggataagaaaaatgacagagagaaggagaaaggaagagccatggacggtgcaagtctggataacatcttgcagaggctaccgggatgtgtcagtcgtgatctcattgatcagttgacggttgagttttgctacctaaattctaaagcaaatcgaaagaaacttgcgcgtgccttattcaatgttaataggacttcactggaactgttgccttactattctcgtttggttgcgacactatcaacttgtatgaaagatgttccaagtatgcttctgtctatgcttgaagaggagttcaactttttaataaataagaaggatcagatcaacattgaaacaaaaataaaaaatatacggtttattggggagttgtgcaagttcaagatggctcctccagctcttgtttttagctgtttgaagtcctgccttgatgatttcagtcatcataatattgatgtggcttgcaaccttctcgagacttgtggccgatttttgtaccgctcacctgaaactacgattcgcatggctaacatgctggagatactgatgagattgaaaaatgttaagaatttggatccacgtcacagtacacttgtagaaaacgcttactacctttgtaaaccacccgaaagatctgcacggatatcaaaagttcggccacctttgcatcaatacataagaaagttgcttttctcagatcttgacaaatcaagtgttgaacatgttttgcgccaactacgcaaagttaccttgggcagaatgtcaacaataccttctgaagtgctttctaaaggttcacaaaggaaagtacagccaagttcatctgattgctcttctcactgctagtctcagccgctatcatgatgactttgctgtcgcagtggtagatgaggttttagaagagataagggttggattggagttgaatgactatgggatgcaacaaaggcggcttgcccacatgcggttccttggagagctatacagctacaagcatatagattcatcagttgtttttgatacactgtaccttatcattgtgtttggtcatggaacacctgaacaagatgtgttggatccaccagaagattgcttcagaatcaggttgatcattacacttttacagacctgtggtcactatttcagtaagggatcttcaaaaaggaagctggacaaattcttgctacactttcaaagatacattattagtaaagggcccttaccactcgacatagaatttgacattcaggatttatttggagagctacgaccaaacatgtctaggtatttatcaatcgaggaacttgttgctgcgttagttgagcttgaagaaaatgagcgctcagccccagtagaaaaggttgaaaatgaaagacactcggacaatgaatctcataaaagacaggcacgagatgctggtccatctgtgaatggtggaagcgctgcaaatggaattgaggaaaatggcaaggatcatgaaatagcagatagtgagagctattcagatagtggcagcattgatggacgggaagatgaggatatattatctgaggataaatcaaatgatggctcagataatgaaggcgacgatgaagatgatggcattcctgttggttctgatgaagatgaaaatgttgaggttagacagaaagttatgaaggttgatcctaaggagcaagaagactttgatcgagagctcaaagcccttcttcaggagagcttggagtcccgcaaatcagaggcccgttcaaggctccctctgaatatgatggtaccgatgaatgtccttgaaggttcatcaaaagactcgagggccacagaatctgagagtggagaagaaacagtagatgaagagggtggcaatgctgggggtagcagcaaggtgcgcgttaaggtgctaatgaagaaagggcacaaacaacagacgaggcaaatgttaattcccgctgatagttcaatcgttcgaagcacgaagcagcaagaagctgccgagcttgaggagaagcagagcattaagcggaggatccttgaatacaatgaaagggaggaggaagaactgaatggagcatcacaaatggggaactggggtcaaggagctaccaacaccagcagtatcagatcaggtggccggggcagctgggatggttcagcacggggaggtggtcgacaacgacaccacatcgccggttctggtggtttctatcacagttatggcaggagaagatgagtttgtcctgatgggaggtggttggcagaggcgccacactgtgggttcttgtggtttctatcagttgttgcaggagaacagttagctgtgtgagctattttgtcctgagcttttttttggcagggccatgcttctctctatttaaccgcctaacgatcagattaacagggaagaaatttcggggaggttaacacagcttgatggacaattgcttccaccaccctaatctgaaagataagataattctaccactgatgggagatagcaatgccttgaaggagctatttttctggtggcccgaatggcttgagttgcttggtagttatgggcttatggctgtacctggagagcatagataccccggttgctcatgtacatataataataacataatttggcaacgagtgtgagtcgtttggagattgtgtgcgcacttgtatctgagtatggatctgatggtggtacttgcatagtttagatgtgcatactgtttcgacgccatgtgtgtgtatggggcacctgataaaaaaattactgtttgattcccatttagttatgcgtgcaggagttattatgattaggggtggtaatagatgacgatccaaatgttttttcacaat

SEQ ID NO: 207626 - DNA, 4364 bp, Zea Mays
cccatccaaatttctagactagaggaccttggcaaacgcccaaacagacttgactgtgtagaaccactgaaccagcgtcgtcttctcgagttgaagtgtgctgcctgttcacccctgcgtctttccctcccctgttacgattatttgcctattgggtgaccgccgacgccgccccacgccaggtgctcaggtcttcggcgggccctttgctggcgaggagcaccaaccctatacggaggatattttggttgcgcataacaagttggatagttctgggttttcgctctgaacaaaatggacaatgctcagagtgagaaccgaattgataccaagcaagatgatgatgtgcgccagatcaaacatgatgatgaggaggctcgccttgaagaatataaaaagatcattgatcaaaagacttccctccgccggagcaacctaaaccctgaaaggcctgatgcaaactacctgagaaccctggactccagtatcaagcgaaatacaacagttataaagaagttgaagacaataaatgatgagcagaaggatgggctaatggatgagttaaaaagtgtgaatttgagcaaatttgtcagcgaagcagtttcttatatttgtgaggccaaacttcgctctgctgatatacaagctgctgttcaggtttgctcactccttcatcaaagatacaaggacttctctccttgtcttatacaaggtctactgaaggtcttctttccgggaaaatctgtagatgacttggatgcagataaaaattcgagagccatgaagaagagaagcacactgaaacttttgattgaactgtattttgttggaattgtcgaagatgctagcatatttgtaaatattataaaagatcttacatcagcggaacatttgaaggaccgtgaaggaactcaaaccaacttgtctcttctatctacctttgctcgtcaagggaagttttttttagggctacaacctcatggtcaagaagcttatgatgagttctttaaggagctaaatgttaccgctgagcagaagaagttctttaagaaagccttgaactcttattatgatactgtagctgaactactgcaatcagaacatgtgtctcttcgtctaatggaggcagagaatgcaaaagttttaagtgccaaaggtgaactaagtgatgagaacacagcctcatatgagaaactcaggaagtcttttgatcagttactacgtggtgtatcctcgttggctgaatctcttgatatgcagcctccagtgatgccagatgatggaaatacaacaagagttactacaagaactgatgccttgccttcttctggaaaagattcatctgcattggaacctatctgggatgatgaagataccaaagctttttatgaatctttacctgatctcagagcatttgtgccggctgtattactgggagaggttgagccaaagtcgaatgagcaacatgctaagggccgtgagcaatctagtgagtccacttcagaacaagagactgaactacatgacgattttcaaacttctgcaactgaacatcaactagaagttaaattagatggtggagtgaaagagagtgatgacaaagataaagagaagggaaaggatggagaaaaggaaaaatctaaggagaaggatctggataagaaaaatgacagagagaaggagaaaggaagagccatggacggtgcaagtctggataacatcttgcagaggctaccgggatgtgtcagtcgtgatctcattgatcagttgacgatgttccaagtatgcttctgtctatgcttgaagaggagttcaactttttaataaataagaaggatcagatcaacattgaaacaaaaataaaaaatatacggtttattggggagttgtgcaagttcaagatggctcctccagctcttgtttttagctgtttgaagtcctgccttgatgatttcagtcatcataatattgatgtggcttgcaaccttctcgagacttgtggccgatttttgtaccgctcacctgaaactacgattcgcatggctaacatgctggagatactgatgagattgaaaaatgttaagaatttggatccacgtcacagtacacttgtagaaaacgcttactacctttgtaaaccacccgaaagatctgcacggatatcaaaagttcggccacctttgcatcaatacataagaaagttgcttttctcagatcttgacaaatcaagtgttgaacatgttttgcgccaactacgcaaagttaccttgggcagaatgtcaacaataccttctgaagtgctttctaaaggttcacaaaggaaagtacagccaagttcatctgattgctcttctcactgctagtctcagccgctatcatgatgactttgctgtcgcagtggtagatgaggttttagaagagataagggttggattggagttgaatgactatgggatgcaacaaaggcggcttgcccacatgcggttccttggagagctatacagctacaagcatatagattcatcagttgtttttgatacactgtaccttatcattgtgtttggtcatggaacacctgaacaagatgtgttggatccaccagaagattgcttcagaatcaggttgatcattacacttttacagacctgtggtcactatttcagtaagggatcttcaaaaaggaagctggacaaattcttgctacactttcaaagatacattattagtaaagggcccttaccactcgacatagaatttgacattcaggatttatttggagagctacgaccaaacatgtctaggtatttatcaatcgaggaacttgttgctgcgttagttgagcttgaagaaaatgagcgctcagccccagtagaaaaggttgaaaatgaaagacactcggacaatgaatctcataaaagacaggcacgagatgctggtccatctgtgaatggtggaagcgctgcaaatggaattgaggaaaatggcaaggatcatgaaatagcagatagtgagagctattcagatagtggcagcattgatggacgggaagatgaggatatattatctgaggataaatcaaatgatggctcagataatgaaggcgacgatgaagatgatggcattcctgttggttctgatgaagatgaaaatgttgaggttagacagaaagttatgaaggttgatcctaaggagcaagaagactttgatcgagagctcaaagcccttcttcaggagagcttggagtcccgcaaatcagaggcccgttcaaggctccctctgaatatgatggtaccgatgaatgtccttgaaggttcatcaaaagactcgagggccacagaatctgagagtggagaagaaacagtagatgaagagggtggcaatgctgggggtagcagcaaggtgcgcgttaaggtgctaatgaagaaagggcacaaacaacagacgaggcaaatgttaattcccgctgatagttcaatcgttcgaagcacgaagcagcaagaagctgccgagcttgaggagaagcagagcattaagcggaggatccttgaatacaatgaaagggaggaggaagaactgaatggagcatcacaaatggggaactggggtcaaggagctaccaacaccagcagtatcagatcaggtggccggggcagctgggatggttcagcacggggaggtggtcgacaacgacaccacatcgccggttctggtggtttctatcacagttatggcaggagaagatgagtttgtcctgatgggaggtggttggcagaggcgccacactgtgggttcttgtggtttctatcagttgttgcaggagaacagttagctgtgtgagctattttgtcctgagcttttttttggcagggccatgcttctctctatttaaccgcctaacgatcagattaacagggaagaaatttcggggaggttaacacagcttgatggacaattgcttccaccaccctaatctgaaagataagataattctaccactgatgggagatagcaatgccttgaaggagctatttttctggtggcccgaatggcttgagttgcttggtagttatgggcttatggctgtacctggagagcatagataccccggttgctcatgtacatataataataacataatttggcaacgagtgtgagtcgtttggagattgtgtgcgcacttgtatctgagtatggatctgatggtggtacttgcatagtttagatgtgcatactgtttcgacgccatgtgtgtgtatggggcacctgataaaaaaattactgtttgattcccatttagttatgcgtgcaggagttattatgattaggggtggtaatagatgacgatccaaatgttttttcacaat

SEQ ID NO: 207627 - DNA, 4515 bp, Zea Mays
cgatcgttggtgttgcccatccaaatttctagactagaggaccttggcaaacgcccaaacagacttgactgtgtagaaccactgaaccagcgtcgtcttctcgagttgaagtgtgctgcctgttcacccctgcgtctttccctcccctgttacgattatttgcctattgggtgaccgccgacgccgccccacgccaggtgctcaggtcttcggcgggccctttgctggcgaggagcaccaaccctatacggaggatattttggttgcgcataacaagttggatagttctgggttttcgctctgaacaaaatggacaatgctcagagtgagaaccgaattgataccaagcaagatgatgatgtgcgccagatcaaacatgatgatgaggaggctcgccttgaagaatataaaaagatcattgatcaaaagacttccctccgccggagcaacctaaaccctgaaaggcctgatgcaaactacctgagaaccctggactccagtatcaagcgaaatacaacagttataaagaagttgaagacaataaatgatgagcagaaggatgggctaatggatgagttaaaaagtgtgaatttgagcaaatttgtcagcgaagcagtttcttatatttgtgaggccaaacttcgctctgctgatatacaagctgctgttcaggtttgctcactccttcatcaaagatacaaggacttctctccttgtcttatacaaggtctactgaaggtcttctttccgggaaaatctgtagatgacttggatgcagataaaaattcgagagccatgaagaagagaagcacactgaaacttttgattgaactgtattttgttggaattgtcgaagatgctagcatatttgtaaatattataaaagatcttacatcagcggaacatttgaaggaccgtgaaggaactcaaaccaacttgtctcttctatctacctttgctcgtcaagggaagttttttttagggctacaacctcatggtcaagaagcttatgatgagttctttaaggagctaaatgttaccgctgagcagaagaagttctttaagaaagccttgaactcttattatgatactgtagctgaactactgcaatcagaacatgtgtctcttcgtctaatggaggcagagaatgcaaaagttttaagtgccaaaggtgaactaagtgatgagaacacagcctcatatgagaaactcaggaagtcttttgatcagttactacgtggtgtatcctcgttggctgaatctcttgatatgcagcctccagtgatgccagatgatggaaatacaacaagagttactacaagaactgatgccttgccttcttctggaaaagattcatctgcattggaacctatctgggatgatgaagataccaaagctttttatgaatctttacctgatctcagagcatttgtgccggctgtattactgggagaggttgagccaaagtcgaatgagcaacatgctaagggccgtgagcaatctagtgagtccacttcagaacaagagactgaactacatgacgattttcaaacttctgcaactgaacatcaactagaagttaaattagatggtggagtgaaagagagtgatgacaaagataaagagaagggaaaggatggagaaaaggaaaaatctaaggagaaggatctggataagaaaaatgacagagagaaggagaaaggaagagccatggacggtgcaagtctggataacatcttgcagaggctaccgggatgtgtcagtcgtgatctcattgatcagttgacggttgagttttgctacctaaattctaaagcaaatcgaaagaaacttgcgcgtgccttattcaatgttaataggacttcactggaactgttgccttactattctcgtttggttgcgacactatcaacttgtatgaaagatgttccaagtatgcttctgtctatgcttgaagaggagttcaactttttaataaataagaaggatcagatcaacattgaaacaaaaataaaaaatatacggtttattggggagttgtgcaagttcaagatggctcctccagctcttgtttttagctgtttgaagtcctgccttgatgatttcagtcatcataatattgatgtggcttgcaaccttctcgagacttgtggccgatttttgtaccgctcacctgaaactacgattcgcatggctaacatgctggagatactgatgagattgaaaaatgttaagaatttggatccacgtcacagtacacttgtagaaaacgcttactacctttgtaaaccacccgaaagatctgcacggatatcaaaagttcggccacctttgcatcaatacataagaaagttgcttttctcagatcttgacaaatcaagtgttgaacatgttttgcgccaactacgcaaagttaccttgggcagaatgtcaacaataccttctgaagtgctttctaaaggttcacaaaggaaagtacagccaagttcatctgattgctcttctcactgctagtctcagccgctatcatgatgactttgctgtcgcagtggtagatgaggttttagaagagataagggttggattggagttgaatgactatgggatgcaacaaaggcggcttgcccacatgcggttccttggagagctatacagctacaagcatatagattcatcagttgtttttgatacactgtaccttatcattgtgtttggtcatggaacacctgaacaagatgtgttggatccaccagaagattgcttcagaatcaggttgatcattacacttttacagacctgtggtcactatttcagtaagggatcttcaaaaaggaagctggacaaattcttgctacactttcaaagatacattattagtaaagggcccttaccactcgacatagaatttgacattcaggatttatttggagagctacgaccaaacatgtctaggtatttatcaatcgaggaacttgttgctgcgttagttgagcttgaagaaaatgagcgctcagccccagtagaaaaggttgaaaatgaaagacactcggacaatgaatctcataaaagacaggcacgagatgctggtccatctgtgaatggtggaagcgctgcaaatggaattgaggaaaatggcaaggatcatgaaatagcagatagtgagagctattcagatagtggcagcattgatggacgggaagatgaggatatattatctgaggataaatcaaatgatggctcagataatgaaggcgacgatgaagatgatggcattcctgttggttctgatgaagatgaaaatgttgaggttagacagaaagttatgaaggttgatcctaaggagcaagaagactttgatcgagagctcaaagcccttcttcaggagagcttggagtcccgcaaatcagaggcccgttcaaggctccctctgaatatgatggtaccgatgaatgtccttgaaggttcatcaaaagactcgagggccacagaatctgagagtggagaagaaacagtagatgaagagggtggcaatgctgggggtagcagcaaggtgcgcgttaaggtgctaatgaagaaagggcacaaacaacagacgaggcaaatgttaattcccgctgatagttcaatcgttcgaagcacgaagcagcaagaagctgccgagcttgaggagaagcagagcattaagcggaggatccttgaatacaatgaaagggaggaggaagaactgaatggagcatcacaaatggggaactggggtcaaggagctaccaacaccagcagtatcagatcaggtggccggggcagctgggatggttcagcacggggaggtggtcgacaacgacaccacatcgccggttctggtggtttctatcacagttatggcaggagaagatgagtttgtcctgatgggaggtggttggcagaggcgccacactgtgggttcttgtggtttctatcagttgttgcaggagaacagttagctgtgtgagctattttgtcctgagcttttttttggcagggccatgcttctctctatttaaccgcctaacgatcagattaacagggaagaaatttcggggaggttaacacagcttgatggacaattgcttccaccaccctaatctgaaagataagataattctaccactgatgggagatagcaatgccttgaaggagctatttttctggtggcccgaatggcttgagttgcttggtagttatgggcttatggctgtacctggagagcatagataccccggttgctcatgtacatataataataacataatttggcaacgagtgtgagtcgtttggagattgtgtgcgcacttgtatctgagtatggatctgatggtggtacttgcatagtttagatgtgcatactgtttcgacgccatgtgtgtgtatggggcacctgataaaaaaattactgtttgattcccatttagttatgcgtgcaggagttattatgattaggggtggtaatagatgacgatccaaatgttttttcacaat

SEQ ID NO: 207628 - DNA, 4321 bp, Zea Mays
ctacgttctacaaacagccctgggagtagacgcggctacggatcctaaacgatacggaggatattttggttgcgcataacaagttggatagttctgggttttcgctctgaacaaaatggacaatgctcagagtgagaaccgaattgataccaagcaagatgatgatgtgcgccagatcaaacatgatgatgaggaggctcgccttgaagaatataaaaagatcattgatcaaaagacttccctccgccggagcaacctaaaccctgaaaggcctgatgcaaactacctgagaaccctggactccagtatcaagcgaaatacaacagttataaagaagttgaagacaataaatgatgagcagaaggatgggctaatggatgagttaaaaagtgtgaatttgagcaaatttgtcagcgaagcagtttcttatatttgtgaggccaaacttcgctctgctgatatacaagctgctgttcaggtttgctcactccttcatcaaagatacaaggacttctctccttgtcttatacaaggtctactgaaggtcttctttccgggaaaatctgtagatgacttggatgcagataaaaattcgagagccatgaagaagagaagcacactgaaacttttgattgaactgtattttgttggaattgtcgaagatgctagcatatttgtaaatattataaaagatcttacatcagcggaacatttgaaggaccgtgaaggaactcaaaccaacttgtctcttctatctacctttgctcgtcaagggaagttttttttagggctacaacctcatggtcaagaagcttatgatgagttctttaaggagctaaatgttaccgctgagcagaagaagttctttaagaaagccttgaactcttattatgatactgtagctgaactactgcaatcagaacatgtgtctcttcgtctaatggaggcagagaatgcaaaagttttaagtgccaaaggtgaactaagtgatgagaacacagcctcatatgagaaactcaggaagtcttttgatcagttactacgtggtgtatcctcgttggctgaatctcttgatatgcagcctccagtgatgccagatgatggaaatacaacaagagttactacaagaactgatgccttgccttcttctggaaaagattcatctgcattggaacctatctgggatgatgaagataccaaagctttttatgaatctttacctgatctcagagcatttgtgccggctgtattactgggagaggttgagccaaagtcgaatgagcaacatgctaagggccgtgagcaatctagtgagtccacttcagaacaagagactgaactacatgacgattttcaaacttctgcaactgaacatcaactagaagttaaattagatggtggagtgaaagagagtgatgacaaagataaagagaagggaaaggatggagaaaaggaaaaatctaaggagaaggatctggataagaaaaatgacagagagaaggagaaaggaagagccatggacggtgcaagtctggataacatcttgcagaggctaccgggatgtgtcagtcgtgatctcattgatcagttgacggttgagttttgctacctaaattctaaagcaaatcgaaagaaacttgcgcgtgccttattcaatgttaataggacttcactggaactgttgccttactattctcgtttggttgcgacactatcaacttgtatgaaagatgttccaagtatgcttctgtctatgcttgaagaggagttcaactttttaataaataagaaggatcagatcaacattgaaacaaaaataaaaaatatacggtttattggggagttgtgcaagttcaagatggctcctccagctcttgtttttagctgtttgaagtcctgccttgatgatttcagtcatcataatattgatgtggcttgcaaccttctcgagacttgtggccgatttttgtaccgctcacctgaaactacgattcgcatggctaacatgctggagatactgatgagattgaaaaatgttaagaatttggatccacgtcacagtacacttgtagaaaacgcttactacctttgtaaaccacccgaaagatctgcacggatatcaaaagttcggccacctttgcatcaatacataagaaagttgcttttctcagatcttgacaaatcaagtgttgaacatgttttgcgccaactacgcaaagttaccttgggcagaatgtcaacaataccttctgaagtgctttctaaaggttcacaaaggaaagtacagccaagttcatctgattgctcttctcactgctagtctcagccgctatcatgatgactttgctgtcgcagtggtagatgaggttttagaagagataagggttggattggagttgaatgactatgggatgcaacaaaggcggcttgcccacatgcggttccttggagagctatacagctacaagcatatagattcatcagttgtttttgatacactgtaccttatcattgtgtttggtcatggaacacctgaacaagatgtgttggatccaccagaagattgcttcagaatcaggttgatcattacacttttacagacctgtggtcactatttcagtaagggatcttcaaaaaggaagctggacaaattcttgctacactttcaaagatacattattagtaaagggcccttaccactcgacatagaatttgacattcaggatttatttggagagctacgaccaaacatgtctaggtatttatcaatcgaggaacttgttgctgcgttagttgagcttgaagaaaatgagcgctcagccccagtagaaaaggttgaaaatgaaagacactcggacaatgaatctcataaaagacaggcacgagatgctggtccatctgtgaatggtggaagcgctgcaaatggaattgaggaaaatggcaaggatcatgaaatagcagatagtgagagctattcagatagtggcagcattgatggacgggaagatgaggatatattatctgaggataaatcaaatgatggctcagataatgaaggcgacgatgaagatgatggcattcctgttggttctgatgaagatgaaaatgttgaggttagacagaaagttatgaaggttgatcctaaggagcaagaagactttgatcgagagctcaaagcccttcttcaggagagcttggagtcccgcaaatcagaggcccgttcaaggctccctctgaatatgatggtaccgatgaatgtccttgaaggttcatcaaaagactcgagggccacagaatctgagagtggagaagaaacagtagatgaagagggtggcaatgctgggggtagcagcaaggtgcgcgttaaggtgctaatgaagaaagggcacaaacaacagacgaggcaaatgttaattcccgctgatagttcaatcgttcgaagcacgaagcagcaagaagctgccgagcttgaggagaagcagagcattaagcggaggatccttgaatacaatgaaagggaggaggaagaactgaatggagcatcacaaatggggaactggggtcaaggagctaccaacaccagcagtatcagatcaggtggccggggcagctgggatggttcagcacggggaggtggtcgacaacgacaccacatcgccggttctggtggtttctatcacagttatggcaggagaagatgagtttgtcctgatgggaggtggttggcagaggcgccacactgtgggttcttgtggtttctatcagttgttgcaggagaacagttagctgtgtgagctattttgtcctgagcttttttttggcagggccatgcttctctctatttaaccgcctaacgatcagattaacagggaagaaatttcggggaggttaacacagcttgatggacaattgcttccaccaccctaatctgaaagataagataattctaccactgatgggagatagcaatgccttgaaggagctatttttctggtggcccgaatggcttgagttgcttggtagttatgggcttatggctgtacctggagagcatagataccccggttgctcatgtacatataataataacataatttggcaacgagtgtgagtcgtttggagattgtgtgcgcacttgtatctgagtatggatctgatggtggtacttgcatagtttagatgtgcatactgtttcgacgccatgtgtgtgtatggggcacctgataaaaaaattactgtttgattcccatttagttatgcgtgcaggagttattatgattaggggtggtaatagatgacgatccaaatgttttttcacaat

SEQ ID NO: 207629 - DNA, 2899 bp, Zea Mays
aatgcgtgttcccccacacataccctcctctcttctccccgtccctctctagctactactactactattctgtagattgatacagatagcggcgctcttctcgcttcgcctcgctgccaatctcgtcgccgatccccgggtccggcgccgccacgagcttccagatccaccgcccgggcaatgctgtagcgcctcgcgccgagatgggcggcgtcggcgccgcctcgcttgccctgctgccgctccccctcctcctcctcctgctcgtccgcgcggaggcctccgctctccacggaactatattgcctaacccagcaccgagtccatctagcccccctgaagcgagatcgtttggacctcgaatttccccttcatatcctccaagggcactgtctccaggatctcctgacattgatgtgcgctctcattcgcacaagcccccacaccatagagagtcaaatcagggcccttcaccatcctcagcagaaggttgttctagttatatatgcactgaaccactgactgcaacaccaattggttccccttgtggctgtgtcgagcctattagtgttatcgttgatctggacttagctccttacctactgttcatgagcatagctgagttagaagttgaagttgcagctgggacatttcttaaacaaagccaagtgaagatcatggctgcagttgcaagtatccaggatgaccagaagacacgggtgaccatttatttggtgccactaagagaagagtttgatacttatacggcatccctaatatctgataggttcagggataaaaaggtccagataaattcatctatatttggagattataaagttatcaatgtcagctatcatggattgcaatccccaccatcatctgtgcctggaggatcggatccttcaggaaccgaagatcctataactgcagaggtgcctgatcagatgaaaaagcacaagaaatcagatattttgatcgtcgtggtagcgttagggtcttctcttggacttctgttgacatgtgctgttgtcctgatcttactagtaagatggaagaaacttggacggcttcatgaggatatgaaccctgcaactaccccaacagttaatagaagatacggtgctagatcaactttgtcaaccggcatggtgagctctgcgtcagcatcagcgttttcaacagtggctacttgcacaacatctgtaaagacattttcactaggccaacttcagaaggccacagatggttttgattcgagaagagttttgggtcaaggtggctttgggtgtgtctaccatgggacaatagaggatggaaacgaaattgctgttaaattgcttacaagggaggacaggagtggtgaccgtgagtttattgcggaggtggaaatgctcagtcgactgcaccaccgtaatcttgtcaaattgattggtatttgcgttgatcggagcaaaagatgtcttgtgtatgagctcatacgcaacggaagtgtggaatctcatcttcatggcgctgacaaggctaagggtaagctgaactgggatgttaggatgaaaattgctcttggggctgctcgaggcttagcatacctgcatgaagattcaaaccctcatgtcatacaccgtgacttcaaggccagcaatatcttgttagaggaagatttcactcccaaagttactgattttggtttagcaagggaagcatccaatgcaactcaacctatatctaccagggtaatgggcactttcggttatgttgctccagaatatgcaatgacgggtcatcttcttgtgaagagcgacgtctacagttacggggttgtcttgctggaacttctatcaggaaggaagcccgtaagcatctccgagtcgaaggatcccgagaaccttgtgacctgggcccgtcctctgctaagccacaaggagggcctggagaagttgatcgacccttctctggaagggaacttcaacttcgacaacgtggctaaggtggcgtccatcgcttccatgtgcgtgcacgcggacccatcgcagaggccgttcatgggcgaagccgtccaggcactgaagctcatctacagtgatccggacgaggcctgcgacgattcctacagcccgaggaactcatccgaccaagacggtggctacgacggagacctggtcttcgggagcgggagctgggggtttggggcctctggctctgggtgcctggactaccggaactccctgccgtttgttaccatggactacagttccggccgaatagaagggccgcgcgaccctcgcgcggcgttgtcggcgggctcccatgcccagccaccggtgctgcagaatagatcaggccccttgcgggtgaagaagaagctggccgcctcctaccgctctagaggcagtgttagcgagcatgggcacctgccgcgccattgatcagtagtagccaatgaagtagtgttaggccgctaccttccggtttgaccttggaggctgcggtggggtttgtcatcacctctcgatgattcgtgcctcgtgctagttagtgtacagttagttcgtggtgacccttggacatgcatgcatgcctgcctgccttgggtgtaggtgtttttttctttcttattcttcttgtttgccttctgcttcttccccggaagcaatgaggatggggttggcagatgctgtctaattttcgcaaaaatgcggctcatgcatctgattggtgtaatctggtttagggctttgacggaattctggacatcatgttgttgtggctaggttgttgtattggatgcagttcgtcactaacaagcgttagggcctgttcgtttcgcatggaacgaaggagtggaataaatctagcttgtattcgtttaataattactataaattttgaagatttt

SEQ ID NO: 207630 - DNA, 2495 bp, Zea Mays
cgacagttgaggtgttgaactcggaaagcctgaagcgcgcagccctcggaagcgaccgccccgccgcgctaccaccgcacgccccacctactactcccctcgctgtccctcgccgtcgccgccctgatcccgcgatgtcctcgtggctgcggagcgcggtgagcaaggccgtcgaggccggcggccgcagcggcgtggcccgcacggtcctgggctacgccgacgccgtcgcacaccacgccggccaggccgtcgccgagggcgccaagattatcaacgagcgcgtgagcactcagaacttcaaaagtgtgaagcaaacagtgaagcgattggaagaggttgcggtttcatcacgcagggatgagagagttcaagtgctaaggcgctggctcggagccctacaggaggttgaggctgaagttggaggttcgggtgggtctcagaggcagaatgtctcttcaagcgagccaaactcttcgaaaccatcattggccaaagttttgttttatgatgctgatattggagggcctcctatgaacttccgagatatattcctttatagccacgcacttgagggtattacgttgtccatgattcttgaagctcctaaagaagaagaggtttcccttcttctagaaattttcggaatatgtcttacagggggcaaagaagttaataatgctatagtgagcagtatacaggacctggcaaagtcattctcaaattaccatgatgaggtcctggtgaaacgtgaagagttacttcagttcacacaaagtgccatttcaggtctaaagaggaatgctgacattgtgaggatagattctgaagctctagatttgtggaagaaactacatgagaaggaggcatcacgagctcaatcaattggcgatcctgataaagttacagaaaagacttcaactattgagtctttcaaagaagcactcaacgaagtccgattttgctctagaatggaggaacttctattgaagaagaaaacaattaatactggggattccttagagatccactcccaaaaggttgagaaattaaaggtattggcgacttcccttgctaattcatcctccaaggcagagaagcgtattttggatcacagacgccagaaagaagaggctcttaactttcgtgctaaaaaggagaacgaagtgattgctgttgaaaaggatttgactgctgagatttctgaattggagaagcaaaaggatgaacttgaggctcagttaaagaaggtcaacatttcactgaatgctgctatttgtcgactaaagcagacaagagaagagagggaccagtttcatgaagcaaacaatcagatgatatttactttacaagcaaaggagaatgacctgtcaaaatctattgactcatgtaacatggaggccagtgtagtcaagacttgggtaaatttcctcgaggatacatggcaacttcagttgtcatacaatgaacagaaggaaactaaaacgaatgacgagctggagagatgcacaagcagttttctgaagttgaccaagcatcatctttcctatttcaaggaagttcttagcccgtcaattgagcggatacgcacatacgtggataatttggcagtcttaaactctagggaggagtcaatagaacatgaaggggatgatgagatttctgtgcagacaagtccacaaaagtcccttgaggaggaatatttggaaactgaaaagaagatcgtgattgccttcagcattgtagatcgcatgaagaagatgttttattctgagcaagcggctaattctaggcaagatgatgcagaggtcaggaccttattttctgagattgagaaactgaaggaagtgtttgagtcggtagaaaggccgacactagacattgaagtccgcaaggcaaaggatccaatgaaggacaagtctggatcgaatcgttcagccaaagacaaatctgaatcgagccattcacctgttcaggtgccctcttcacctaaagatgtgcccgtggagtctccgaaatctccagtgaaacctgagcagacgatggacccagattcagagtttgcaaagttagagctagaattcggaaaagttaacagagaccatgaggagataggcggttgggatttcgacgagcttgaagaggagctgcgagctgacctatctaaatcaaccaatccaaaataaccacgctcaacccgacatctctgaacgcgcattccacctaactttccttgtgctggcttcttctgaaaatttgtagactttgaattgttgaatgtacatagtattgttgtttcattgtgtccatggacgttctatagattatactcactacatgggaggtggagattgttacactgtagactgacatttcattagcttatttgtttggtcttgtcatgtgcattcatacatgaatgaatgaatgataaacattatgtagcattccacattttggacattggaacatatattaactataacgataaaatg

SEQ ID NO: 207631 - DNA, 2571 bp, Zea Mays
cgacagttgaggtgttgaactcggaaagcctgaagcgcgcagccctcggaagcgaccgccccgccgcgctaccaccgcacgccccacctactactcccctcgctgtccctcgccgtcgccgccctgatcccgcgatgtcctcgtggctgcggagcgcggtgagcaaggccgtcgaggccggcggccgcagcggcgtggcccgcacggtcctgggctacgccgacgccgtcgcacaccacgccggccaggccgtcgccgagggcgccaagattatcaacgagcgcgtgagcactcagaacttcaaaagtgtgaagcaaacagtgaagcgattggaagaggttgcggtttcatcacgcagggatgagagagttcaagtgctaaggcgctggctcggagccctacaggaggttgaggctgaagttggaggttcgggtgggtctcagaggcagaatgtctcttcaagcgagccaaactcttcgaaaccatcattggccaaagttttgttttatgatgctgatattggagggcctcctatgaacttccgagatatattcctttatagccacgcacttgagggtattacgttgtccatgattcttgaagctcctaaagaagaagaggtttcccttcttctagaaattttcggaatatgtcttacagggggcaaagaagttaataatgctatagtgagcagtatacaggacctggcaaagtcattctcaaattaccatgatgaggtcctggtgaaacgtgaagagttacttcagttcacacaaagtgccatttcaggtctaaagaggaatgctgacattgtgaggtgaccactattctactgatttgctcatgaagtctaatttttcatgcgtgtgtgagcaaggatggaccagcctgatacaatattctgaagctctagatttgtggaagaaactacatgagaaggaggcatcacgagctcaatcaattggcgatcctgataaagttacagaaaagacttcaactattgagtctttcaaagaagcactcaacgaagtccgattttgctctagaatggaggaacttctattgaagaagaaaacaattaatactggggattccttagagatccactcccaaaaggttgagaaattaaaggtattggcgacttcccttgctaattcatcctccaaggcagagaagcgtattttggatcacagacgccagaaagaagaggctcttaactttcgtgctaaaaaggagaacgaagtgattgctgttgaaaaggatttgactgctgagatttctgaattggagaagcaaaaggatgaacttgaggctcagttaaagaaggtcaacatttcactgaatgctgctatttgtcgactaaagcagacaagagaagagagggaccagtttcatgaagcaaacaatcagatgatatttactttacaagcaaaggagaatgacctgtcaaaatctattgactcatgtaacatggaggccagtgtagtcaagacttgggtaaatttcctcgaggatacatggcaacttcagttgtcatacaatgaacagaaggaaactaaaacgaatgacgagctggagagatgcacaagcagttttctgaagttgaccaagcatcatctttcctatttcaaggaagttcttagcccgtcaattgagcggatacgcacatacgtggataatttggcagtcttaaactctagggaggagtcaatagaacatgaaggggatgatgagatttctgtgcagacaagtccacaaaagtcccttgaggaggaatatttggaaactgaaaagaagatcgtgattgccttcagcattgtagatcgcatgaagaagatgttttattctgagcaagcggctaattctaggcaagatgatgcagaggtcaggaccttattttctgagattgagaaactgaaggaagtgtttgagtcggtagaaaggccgacactagacattgaagtccgcaaggcaaaggatccaatgaaggacaagtctggatcgaatcgttcagccaaagacaaatctgaatcgagccattcacctgttcaggtgccctcttcacctaaagatgtgcccgtggagtctccgaaatctccagtgaaacctgagcagacgatggacccagattcagagtttgcaaagttagagctagaattcggaaaagttaacagagaccatgaggagataggcggttgggatttcgacgagcttgaagaggagctgcgagctgacctatctaaatcaaccaatccaaaataaccacgctcaacccgacatctctgaacgcgcattccacctaactttccttgtgctggcttcttctgaaaatttgtagactttgaattgttgaatgtacatagtattgttgtttcattgtgtccatggacgttctatagattatactcactacatgggaggtggagattgttacactgtagactgacatttcattagcttatttgtttggtcttgtcatgtgcattcatacatgaatgaatgaatgataaacattatgtagcattccacattttggacattggaacatatattaactataacgataaaatg

SEQ ID NO: 207632 - DNA, 2490 bp, Zea Mays
cgacagttgaggtgttgaactcggaaagcctgaagcgcgcagccctcggaagcgaccgccccgccgcgctaccaccgcacgccccacctactactcccctcgctgtccctcgccgtcgccgccctgatcccgcgatgtcctcgtggctgcggagcgcggtgagcaaggccgtcgaggccggcggccgcagcggcgtggcccgcacggtcctgggctacgccgacgccgtcgcacaccacgccggccaggccgtcgccgagggcgccaagattatcaacgagcgcgtgagcactcagaacttcaaaagtgtgaagcaaacagtgaagcgattggaagaggttgcggtttcatcacgcagggatgagagagttcaagtgctaaggcgctggctcggagccctacaggaggttgaggctgaagttggaggttcgggtgggtctcagaggcagaatgtctcttcaagcgagccaaactcttcgaaaccatcattggccaaagttttgttttatgatgctgatattggagggcctcctatgaacttccgagatatattcctttatagccacgcacttgagggtattacgttgtccatgattcttgaagctcctaaagaagaagaggtttcccttcttctagaaattttcggaatatgtcttacagggggcaaagaagttaataatgctatagtgagcagtatacaggacctggcaaagtcattctcaaattaccatgatgaggtcctggtgaaacgtgaagagttacttcagttcacacaaagtgccatttcaggtctaaagaggaatgctgacattgtgagattctgaagctctagatttgtggaagaaactacatgagaaggaggcatcacgagctcaatcaattggcgatcctgataaagttacagaaaagacttcaactattgagtctttcaaagaagcactcaacgaagtccgattttgctctagaatggaggaacttctattgaagaagaaaacaattaatactggggattccttagagatccactcccaaaaggttgagaaattaaaggtattggcgacttcccttgctaattcatcctccaaggcagagaagcgtattttggatcacagacgccagaaagaagaggctcttaactttcgtgctaaaaaggagaacgaagtgattgctgttgaaaaggatttgactgctgagatttctgaattggagaagcaaaaggatgaacttgaggctcagttaaagaaggtcaacatttcactgaatgctgctatttgtcgactaaagcagacaagagaagagagggaccagtttcatgaagcaaacaatcagatgatatttactttacaagcaaaggagaatgacctgtcaaaatctattgactcatgtaacatggaggccagtgtagtcaagacttgggtaaatttcctcgaggatacatggcaacttcagttgtcatacaatgaacagaaggaaactaaaacgaatgacgagctggagagatgcacaagcagttttctgaagttgaccaagcatcatctttcctatttcaaggaagttcttagcccgtcaattgagcggatacgcacatacgtggataatttggcagtcttaaactctagggaggagtcaatagaacatgaaggggatgatgagatttctgtgcagacaagtccacaaaagtcccttgaggaggaatatttggaaactgaaaagaagatcgtgattgccttcagcattgtagatcgcatgaagaagatgttttattctgagcaagcggctaattctaggcaagatgatgcagaggtcaggaccttattttctgagattgagaaactgaaggaagtgtttgagtcggtagaaaggccgacactagacattgaagtccgcaaggcaaaggatccaatgaaggacaagtctggatcgaatcgttcagccaaagacaaatctgaatcgagccattcacctgttcaggtgccctcttcacctaaagatgtgcccgtggagtctccgaaatctccagtgaaacctgagcagacgatggacccagattcagagtttgcaaagttagagctagaattcggaaaagttaacagagaccatgaggagataggcggttgggatttcgacgagcttgaagaggagctgcgagctgacctatctaaatcaaccaatccaaaataaccacgctcaacccgacatctctgaacgcgcattccacctaactttccttgtgctggcttcttctgaaaatttgtagactttgaattgttgaatgtacatagtattgttgtttcattgtgtccatggacgttctatagattatactcactacatgggaggtggagattgttacactgtagactgacatttcattagcttatttgtttggtcttgtcatgtgcattcatacatgaatgaatgaatgataaacattatgtagcattccacattttggacattggaacatatattaactataacgataaaatg

SEQ ID NO: 207633 - DNA, 2442 bp, Zea Mays
cgacagttgaggtgttgaactcggaaagcctgaagcgcgcagccctcggaagcgaccgccccgccgcgctaccaccgcacgccccacctactactcccctcgctgtccctcgccgtcgccgccctgatcccgcgatgtcctcgtggctgcggagcgcggtgagcaaggccgtcgaggccggcggccgcagcggcgtggcccgcacggtcctgggctacgccgacgccgtcgcacaccacgccggccaggccgtcgccgagggcgccaagattatcaacgagcgcgtgagcactcagaacttcaaaagtgtgaagcaaacagtgaagcgattggaagaggttgcggtttcatcacgcagggatgagagagttcaagtgctaaggcgctggctcggagccctacaggaggttgaggctgaagttggaggttcgggtgggtctcagaggcagaatgtctcttcaagcgagccaaactcttcgaaaccatcattggccaaagttttgttttatgatgctgatattggagggcctcctatgaacttccgagatatattcctttatagccacgcacttgagggtattacgttgtccatgaatatgtcttacagggggcaaagaagttaataatgctatagtgagcagtatacaggacctggcaaagtcattctcaaattaccatgatgaggtcctggtgaaacgtgaagagttacttcagttcacacaaagtgccatttcaggtctaaagaggaatgctgacattgtgaggatagattctgaagctctagatttgtggaagaaactacatgagaaggaggcatcacgagctcaatcaattggcgatcctgataaagttacagaaaagacttcaactattgagtctttcaaagaagcactcaacgaagtccgattttgctctagaatggaggaacttctattgaagaagaaaacaattaatactggggattccttagagatccactcccaaaaggttgagaaattaaaggtattggcgacttcccttgctaattcatcctccaaggcagagaagcgtattttggatcacagacgccagaaagaagaggctcttaactttcgtgctaaaaaggagaacgaagtgattgctgttgaaaaggatttgactgctgagatttctgaattggagaagcaaaaggatgaacttgaggctcagttaaagaaggtcaacatttcactgaatgctgctatttgtcgactaaagcagacaagagaagagagggaccagtttcatgaagcaaacaatcagatgatatttactttacaagcaaaggagaatgacctgtcaaaatctattgactcatgtaacatggaggccagtgtagtcaagacttgggtaaatttcctcgaggatacatggcaacttcagttgtcatacaatgaacagaaggaaactaaaacgaatgacgagctggagagatgcacaagcagttttctgaagttgaccaagcatcatctttcctatttcaaggaagttcttagcccgtcaattgagcggatacgcacatacgtggataatttggcagtcttaaactctagggaggagtcaatagaacatgaaggggatgatgagatttctgtgcagacaagtccacaaaagtcccttgaggaggaatatttggaaactgaaaagaagatcgtgattgccttcagcattgtagatcgcatgaagaagatgttttattctgagcaagcggctaattctaggcaagatgatgcagaggtcaggaccttattttctgagattgagaaactgaaggaagtgtttgagtcggtagaaaggccgacactagacattgaagtccgcaaggcaaaggatccaatgaaggacaagtctggatcgaatcgttcagccaaagacaaatctgaatcgagccattcacctgttcaggtgccctcttcacctaaagatgtgcccgtggagtctccgaaatctccagtgaaacctgagcagacgatggacccagattcagagtttgcaaagttagagctagaattcggaaaagttaacagagaccatgaggagataggcggttgggatttcgacgagcttgaagaggagctgcgagctgacctatctaaatcaaccaatccaaaataaccacgctcaacccgacatctctgaacgcgcattccacctaactttccttgtgctggcttcttctgaaaatttgtagactttgaattgttgaatgtacatagtattgttgtttcattgtgtccatggacgttctatagattatactcactacatgggaggtggagattgttacactgtagactgacatttcattagcttatttgtttggtcttgtcatgtgcattcatacatgaatgaatgaatgataaacattatgtagcattccacattttggacattggaacatatattaactataacgataaaatg

SEQ ID NO: 207634 - DNA, 2237 bp, Zea Mays
ctctccgtcccccgcgtcctgtccccagaagcactcagaacttcaaaagtgtgaagcaaacagtgaagcgattggaagaggttgcggtttcatcacgcagggatgagagagttcaagtgctaaggcgctggctcggagccctacaggaggttgaggctgaagttggaggttcgggtgggtctcagaggcagaatgtctcttcaagcgagccaaactcttcgaaaccatcattggccaaagttttgttttatgatgctgatattggagggcctcctatgaacttccgagatatattcctttatagccacgcacttgagggtattacgttgtccatgattcttgaagctcctaaagaagaagaggtttcccttcttctagaaattttcggaatatgtcttacagggggcaaagaagttaataatgctatagtgagcagtatacaggacctggcaaagtcattctcaaattaccatgatgaggtcctggtgaaacgtgaagagttacttcagttcacacaaagtgccatttcaggtctaaagaggaatgctgacattgtgaggatagattctgaagctctagatttgtggaagaaactacatgagaaggaggcatcacgagctcaatcaattggcgatcctgataaagttacagaaaagacttcaactattgagtctttcaaagaagcactcaacgaagtccgattttgctctagaatggaggaacttctattgaagaagaaaacaattaatactggggattccttagagatccactcccaaaaggttgagaaattaaaggtattggcgacttcccttgctaattcatcctccaaggcagagaagcgtattttggatcacagacgccagaaagaagaggctcttaactttcgtgctaaaaaggagaacgaagtgattgctgttgaaaaggatttgactgctgagatttctgaattggagaagcaaaaggatgaacttgaggctcagttaaagaaggtcaacatttcactgaatgctgctatttgtcgactaaagcagacaagagaagagagggaccagtttcatgaagcaaacaatcagatgatatttactttacaagcaaaggagaatgacctgtcaaaatctattgactcatgtaacatggaggccagtgtagtcaagacttgggtaaatttcctcgaggatacatggcaacttcagttgtcatacaatgaacagaaggaaactaaaacgaatgacgagctggagagatgcacaagcagttttctgaagttgaccaagcatcatctttcctatttcaaggaagttcttagcccgtcaattgagcggatacgcacatacgtggataatttggcagtcttaaactctagggaggagtcaatagaacatgaaggggatgatgagatttctgtgcagacaagtccacaaaagtcccttgaggaggaatatttggaaactgaaaagaagatcgtgattgccttcagcattgtagatcgcatgaagaagatgttttattctgagcaagcggctaattctaggcaagatgatgcagaggtcaggaccttattttctgagattgagaaactgaaggaagtgtttgagtcggtagaaaggccgacactagacattgaagtccgcaaggcaaaggatccaatgaaggacaagtctggatcgaatcgttcagccaaagacaaatctgaatcgagccattcacctgttcaggtgccctcttcacctaaagatgtgcccgtggagtctccgaaatctccagtgaaacctgagcagacgatggacccagattcagagtttgcaaagttagagctagaattcggaaaagttaacagagaccatgaggagataggcggttgggatttcgacgagcttgaagaggagctgcgagctgacctatctaaatcaaccaatccaaaataaccacgctcaacccgacatctctgaacgcgcattccacctaactttccttgtgctggcttcttctgaaaatttgtagactttgaattgttgaatgtacatagtattgttgtttcattgtgtccatggacgttctatagattatactcactacatgggaggtggagattgttacactgtagactgacatttcattagcttatttgtttggtcttgtcatgtgcattcatacatgaatgaatgaatgataaacattatgtagcattccacattttggacattggaacatatattaactataacgataaaatg

SEQ ID NO: 207635 - DNA, 2140 bp, Zea Mays
actcagaacttcaaaagtgtgaagcaaacagtgaagcgattggaagaggttgcggtttcatcacgcagggatgagagagttcaagtgctaaggcgctggctcggagccctacaggaggttgaggctgaagttggaggttcgggttttgttttatgatgctgatattggagggcctcctatgaacttccgagatatattcctttatagccacgcacttgagggtattacgttgtccatgattcttgaagctcctaaagaagaagaggtttcccttcttctagaaattttcggaatatgtcttacagggggcaaagaagttaataatgctatagtgagcagtatacaggacctggcaaagtcattctcaaattaccatgatgaggtcctggtgaaacgtgaagagttacttcagttcacacaaagtgccatttcaggtctaaagaggaatgctgacattgtgaggatagattctgaagctctagatttgtggaagaaactacatgagaaggaggcatcacgagctcaatcaattggcgatcctgataaagttacagaaaagacttcaactattgagtctttcaaagaagcactcaacgaagtccgattttgctctagaatggaggaacttctattgaagaagaaaacaattaatactggggattccttagagatccactcccaaaaggttgagaaattaaaggtattggcgacttcccttgctaattcatcctccaaggcagagaagcgtattttggatcacagacgccagaaagaagaggctcttaactttcgtgctaaaaaggagaacgaagtgattgctgttgaaaaggatttgactgctgagatttctgaattggagaagcaaaaggatgaacttgaggctcagttaaagaaggtcaacatttcactgaatgctgctatttgtcgactaaagcagacaagagaagagagggaccagtttcatgaagcaaacaatcagatgatatttactttacaagcaaaggagaatgacctgtcaaaatctattgactcatgtaacatggaggccagtgtagtcaagacttgggtaaatttcctcgaggatacatggcaacttcagttgtcatacaatgaacagaaggaaactaaaacgaatgacgagctggagagatgcacaagcagttttctgaagttgaccaagcatcatctttcctatttcaaggaagttcttagcccgtcaattgagcggatacgcacatacgtggataatttggcagtcttaaactctagggaggagtcaatagaacatgaaggggatgatgagatttctgtgcagacaagtccacaaaagtcccttgaggaggaatatttggaaactgaaaagaagatcgtgattgccttcagcattgtagatcgcatgaagaagatgttttattctgagcaagcggctaattctaggcaagatgatgcagaggtcaggaccttattttctgagattgagaaactgaaggaagtgtttgagtcggtagaaaggccgacactagacattgaagtccgcaaggcaaaggatccaatgaaggacaagtctggatcgaatcgttcagccaaagacaaatctgaatcgagccattcacctgttcaggtgccctcttcacctaaagatgtgcccgtggagtctccgaaatctccagtgaaacctgagcagacgatggacccagattcagagtttgcaaagttagagctagaattcggaaaagttaacagagaccatgaggagataggcggttgggatttcgacgagcttgaagaggagctgcgagctgacctatctaaatcaaccaatccaaaataaccacgctcaacccgacatctctgaacgcgcattccacctaactttccttgtgctggcttcttctgaaaatttgtagactttgaattgttgaatgtacatagtattgttgtttcattgtgtccatggacgttctatagattatactcactacatgggaggtggagattgttacactgtagactgacatttcattagcttatttgtttggtcttgtcatgtgcattcatacatgaatgaatgaatgataaacattatgtagcattccacattttggacattggaacatatattaactataacgataaaatg

SEQ ID NO: 207636 - DNA, 2074 bp, Zea Mays
gatatttcatattcttagtgaatgtgcaattaagattttactttggcctcctatgaaggctcatatggttatacatgttaccttcctaagaaaacaaattttcagcccatcattttctaatcattagtttggctgtggctgtttgacatgattctacttgaacttgagtctcagtatttgttttcttcatgagcatcctctccattttaaatgacagttatttgctacagaatatgtcttacagggggcaaagaagttaataatgctatagtgagcagtatacaggacctggcaaagtcattctcaaattaccatgatgaggtcctggtgaaacgtgaagagttacttcagttcacacaaagtgccatttcaggtctaaagaggaatgctgacattgtgagattctgaagctctagatttgtggaagaaactacatgagaaggaggcatcacgagctcaatcaattggcgatcctgataaagttacagaaaagacttcaactattgagtctttcaaagaagcactcaacgaagtccgattttgctctagaatggaggaacttctattgaagaagaaaacaattaatactggggattccttagagatccactcccaaaaggttgagaaattaaaggtattggcgacttcccttgctaattcatcctccaaggcagagaagcgtattttggatcacagacgccagaaagaagaggctcttaactttcgtgctaaaaaggagaacgaagtgattgctgttgaaaaggatttgactgctgagatttctgaattggagaagcaaaaggatgaacttgaggctcagttaaagaaggtcaacatttcactgaatgctgctatttgtcgactaaagcagacaagagaagagagggaccagtttcatgaagcaaacaatcagatgatatttactttacaagcaaaggagaatgacctgtcaaaatctattgactcatgtaacatggaggccagtgtagtcaagacttgggtaaatttcctcgaggatacatggcaacttcagttgtcatacaatgaacagaaggaaactaaaacgaatgacgagctggagagatgcacaagcagttttctgaagttgaccaagcatcatctttcctatttcaaggaagttcttagcccgtcaattgagcggatacgcacatacgtggataatttggcagtcttaaactctagggaggagtcaatagaacatgaaggggatgatgagatttctgtgcagacaagtccacaaaagtcccttgaggaggaatatttggaaactgaaaagaagatcgtgattgccttcagcattgtagatcgcatgaagaagatgttttattctgagcaagcggctaattctaggcaagatgatgcagaggtcaggaccttattttctgagattgagaaactgaaggaagtgtttgagtcggtagaaaggccgacactagacattgaagtccgcaaggcaaaggatccaatgaaggacaagtctggatcgaatcgttcagccaaagacaaatctgaatcgagccattcacctgttcaggtgccctcttcacctaaagatgtgcccgtggagtctccgaaatctccagtgaaacctgagcagacgatggacccagattcagagtttgcaaagttagagctagaattcggaaaagttaacagagaccatgaggagataggcggttgggatttcgacgagcttgaagaggagctgcgagctgacctatctaaatcaaccaatccaaaataaccacgctcaacccgacatctctgaacgcgcattccacctaactttccttgtgctggcttcttctgaaaatttgtagactttgaattgttgaatgtacatagtattgttgtttcattgtgtccatggacgttctatagattatactcactacatgggaggtggagattgttacactgtagactgacatttcattagcttatttgtttggtcttgtcatgtgcattcatacatgaatgaatgaatgataaacattatgtagcattccacattttggacattggaacatatattaactataacgataaaatg

SEQ ID NO: 207637 - DNA, 1387 bp, Zea Mays
tcgaggcaatactgaaaatatgcttgtcatcaacctccggctgtagctcgatgccagatatcaaatcccaaagctgaaggatttgactgctgagatttctgaattggagaagcaaaaggatgaacttgaggctcagttaaagaaggtcaacatttcactgaatgctgctatttgtcgactaaagcagacaagagaagagagggaccagtttcatgaagcaaacaatcagatgatatttactttacaagcaaagaatgacctgtcaaaatctattgactcatgtaacatggaggccagtgtagtcaagacttgggtaaatttcctcgaggatacatggcaacttcagttgtcatacaatgaacagaaggaaactaaaacgaatgacgagctggagagatgcacaagcagttttctgaagttgaccaagcatcatctttcctatttcaaggaagttcttagcccgtcaattgagcggatacgcacatacgtggataatttggcagtcttaaactctagggaggagtcaatagaacatgaaggggatgatgagatttctgtgcagacaagtccacaaaagtcccttgaggaggaatatttggaaactgaaaagaagatcgtgattgccttcagcattgtagatcgcatgaagaagatgttttattctgagcaagcggctaattctaggcaagatgatgcagaggtcaggaccttattttctgagattgagaaactgaaggaagtgtttgagtcggtagaaaggccgacactagacattgaagtccgcaaggcaaaggatccaatgaaggacaagtctggatcgaatcgttcagccaaagacaaatctgaatcgagccattcacctgttcaggtgccctcttcacctaaagatgtgcccgtggagtctccgaaatctccagtgaaacctgagcagacgatggacccagattcagagtttgcaaagttagagctagaattcggaaaagttaacagagaccatgaggagataggcggttgggatttcgacgagcttgaagaggagctgcgagctgacctatctaaatcaaccaatccaaaataaccacgctcaacccgacatctctgaacgcgcattccacctaactttccttgtgctggcttcttctgaaaatttgtagactttgaattgttgaatgtacatagtattgttgtttcattgtgtccatggacgttctatagattatactcactacatgggaggtggagattgttacactgtagactgacatttcattagcttatttgtttggtcttgtcatgtgcattcatacatgaatgaatgaatgataaacattatgtagcattccacattttggacattggaacatatattaactataacgataaaatg

SEQ ID NO: 207638 - DNA, 857 bp, Zea Mays
cttgtctcgaaaagatttatggtgatgcaggccagctccgctcgcctgatcgtcgctgcgtgctgcaggttggggttccatgcaagaggctcatggacacggtgactgtcaagtgcggccactgcaacaacctctcctacctcagtccacggccccccatggtgcagccgctctcgccgactgatcatcccttggggccattccagtgtcagggaccctgcagtgagtgcaggaggaaccaaccgctgccgctggcctcgccgacatcgactgacctcaccccgagaatgcccttcgttgtcaagcccccggagaagaaacatcgcctcccatctgcttacaatcgcttcatgagggaggagattcagcgcatcaaagctgcgaagccagatatccctcacagggaggccttcagcatggctgccaagaattgggcgaagtgtgacccgcgctgctcgacgactgcctctactgccacttctaacagcgctcctgagcctgctagagtcgtcgtgcccactcctcatgtaactgagccacgctttgatctggaggatagggccaaggagcatgtcattgagagcttcgacatcttcaagcagattgagcgcaacatctagatgtctccatttcgagtaccatcagctctatatataacctatgcatgcatatgcatccccatcttgtactttttacccccatgttactgttgctattattcttgctcttgttggattgtacgcaccctttaattgacagttgctaccctatataatgtttgccatcttatatattgtcgtcgttccttatatagggttatgatcgatatatatgtagtgtgtgcaataatttgcatt

SEQ ID NO: 207639 - DNA, 1415 bp, Zea Mays
aaggaaggaagaacctaggactatatacacacaacagatacgaatcgaaaagcgccgaggaaagaataaacggcgagccgcccgtcaaacaatcgttaaacccagaagcctcctcgtcctctctctgactctctctcaccctctcccctccctcggggtcgcggttgcttcctcgcggccgattcgtatcttccgtggcagcagggagggtacggtactcctccggccggcgggaggagaagaggagcttcgagatgggggcgtccctcgcttccgcgggcttggtgaactacccgcttgtcgcggcgctcctcgcgttcgctctcgcgcagtcctccaagttcttcaccacctggtacaaagaaggtcggtgggatgccagacaacttatagcttctggcgggatgccatcatcccactcagctacagtgacagcactttcagtggcagtgggaatccaagaaggctttcgtagtgcaacatttgcaactgcactagtctttgcatgtgtggtactttgcacatcttcatgttgaactactgcttcaactgcatttgataataatactcagagttggtctgtttcttgcagtgactcaaggatgtggatgtcttgctagatgttacttgttcttatgaatgcagcctttgatttgacttagttggtacttctgtttgcaggttatgcatgatgcttttggagttcggttacatgccggaaagcaggcagaggtgctgaatcaaattgtctatgagctgccagaggaacacccattatcagagacaaagccactgcgtgaaatccttggacatactgttcctcaggtcgtggccggttgcatccttggaatcctcatggctgtcgttatgcttttggctctcgggaggtcttagtcaagtgttgttcaccctatatctcactggtgatggctacaaagcataaaaacatgatctccccatggttctggctgtccaagtgttcgatagtacaaagttctaaccgaatttagatctggactgtaggtttcaggttgtagctcgagttggttgctgtaaatctgaaagggtcacttttaattccaaccacggtgtaatggaagctttgttatacaatcagcagcggtaagatcattttgcggatcagtatggtcgataccatgccgtcgcatttgctttatactcctttaattgaaaactgcgagtcattttggctcttccagacatgttgtttttgctacgtatttaaaagcaatgtatttgaatatacattatatctagatatatagttagagtcatgtatttagaaaaggacaaacattgatatggagggggtaagcggttcattgaccccttgagttgcgggatgatgccattgttgtttagttttacagtgatccatgatagctccagatacc

SEQ ID NO: 207640 - DNA, 973 bp, Zea Mays
cgaattgctctgaaccaaaactttatctgactcgtgatttcattttgcttcctacagcccattcttgcaagctgatgtaaaggtacaaagaaggtcggtgggatgccagacaacttatagcttctggcgggatgccatcatcccactcagctacagtgacagcactttcagtggcagtgggaatccaagaaggctttcgtagtgcaacatttgcaactgcactagtctttgcatgtgtggttatgcatgatgcttttggagttcggttacatgccggaaagcaggcagaggtgctgaatcaaattgtctatgagctgccagaggaacacccattatcagagacaaagccactgcgtgaaatccttggacatactgttcctcaggtcgtggccggttgcatccttggaatcctcatggctgtcgttatgcttttggctctcgggaggtcttagtcaagtgttgttcaccctatatctcactggtgatggctacaaagcataaaaacatgatctccccatggttctggctgtccaagtgttcgatagtacaaagttctaaccgaatttagatctggactgtaggtttcaggttgtagctcgagttggttgctgtaaatctgaaagggtcacttttaattccaaccacggtgtaatggaagctttgttatacaatcagcagcggtaagatcattttgcggatcagtatggtcgataccatgccgtcgcatttgctttatactcctttaattgaaaactgcgagtcattttggctcttccagacatgttgtttttgctacgtatttaaaagcaatgtatttgaatatacattatatctagatatatagttagagtcatgtatttagaaaaggacaaacattgatatggagggggtaagcggttcattgaccccttgagttgcgggatgatgccattgttgtttagttttacagtgatccatgatagctccagatacc

SEQ ID NO: 207641 - DNA, 1206 bp, Zea Mays
cgaactcatctcctttccgtttgggcgccaaaacagcatccgccgcgcgacgcgtctcgtcagcgccgccagccccgtcagaatggctctcaagcatggagccacaaaaggaatgtgatgcacctgtcgtctactgagccatggatggtacaggtgacctcttcaaggacgcggccttcagatctaagtgtagttgtaggttgtctaagaagagggggctttcgttggaggagaaacgggagcaaatgcttcaaatattttatgagagccaggaattctttctgcttaaggagctagagaaaatgggtcctaaaaagggagtgattagtcagtctgtgaaagatgtggtgcaaagcctggtggatgatgatcttgtcttgaaggataaaattgggacttctgtgtacttttggagtcttccaagttgtgctgggaaccagctgaggaatacttacaacaagctggaatctgacctttcaaactctagaaagcgttacatggaccttgttgaacacagagataacttgaaaagaggccgggaagactctgaagagagggaagctgctttggaggagctgaagactgtagaactacaccataagaaactcaaggaggaactggctgcatatgcagatagtgatccagctgcagtagaagcaatgaaggatgctactgatattgctcattcagcagctaacagacaacattttcactttgcaacaatggtgttcaaccacattcccagaagcaaaagaacaactggaacatatgtacagggaggttgggatcacagaagattttgagtatttgcagtgatgtccaacagcctattacagcgtcgaaaatgtgccacggaatgttggatcgatcacagatgcaagtttatcatgttggtgctgtgagttatctgcagtaaatagattttgtatatttcacatgcttggcaacaatgaccgatatggccacatgcatgttagggactacttttcctagatgctaccaagtggctagactataccgaaggctcctgctatgcttgaaaactttaccgaaggctcgattttattggatgtagtggctagactatatcatgaaatgtatatttctttgctgatggaaagaacaacaatagcttggcatctggaaataaaaatactgccctaaaaatagctgaaaataataataccagaacctatagaaactaag

SEQ ID NO: 207642 - DNA, 1009 bp, Zea Mays
ccgaactcatctcctttccgtttgggcgccaaaacagcatccgccgcgcgacgcgtctcgtcagcgccgccagccccgtcagaatgtctaagaagagggggctttcgttggaggagaaacgggagcaaatgcttcaaatattttatgagagccaggaattctttctgcttaaggagctagagaaaatgggtcctaaaaagggagtgattagtcagtctgtgaaagatgtggtgcaaagcctggtggatgatgatcttgtcttgaaggataaaattgggacttctgtgtacttttggagtcttccaagttgtgctgggaaccagctgaggaatacttacaacaagctggaatctgacctttcaaactctagaaagcgttacatggaccttgttgaacacagagataacttgaaaagaggccgggaagactctgaagagagggaagctgctttggaggagctgaagactgtagaactacaccataagaaactcaaggaggaactggctgcatatgcagatagtgatccagctgcagtagaagcaatgaaggatgctactgatattgctcattcagcagctaacaggtggacagacaacattttcactttgcaacaatggtgttcaaccacattcccagaagcaaaagaacaactggaacatatgtacagggaggttgggatcacagaagattttgagtatttgcagtgatgtccaacagcctattacagcgtcgaaaatgtgccacggaatgttggatcgatcacagatgcaagtttatcatggactacttttcctagatgctaccaagtggctagactataccgaaggctcctgctatgcttgaaaactttaccgaaggctcgattttattggatgtagtggctagactatatcatgaaatgtatatttctttgctgatggaaagaacaacaatagcttggcatctggaaataaaaatactgccctaaaaatagctgaaaataataataccagaacctatagaaactaag

SEQ ID NO: 207643 - DNA, 1052 bp, Zea Mays
accgctcctcccgtccccgccgcccccgcccgaaccgaactcatctcctttccgtttgggcgccaaaacagcatccgccgcgcgacgcgtctcgtcagcgccgccagccccgtcagaatgtctaagaagagggggctttcgttggaggagaaacgggagcaaatgcttcaaatattttatgagagccaggaattctttctgcttaaggagctagagaaaatgggtcctaaaaagggagtgattagtcagtctgtgaaagatgtggtgcaaagcctggtggatgatgatcttgtcttgaaggataaaattgggacttctgtgtacttttggagtcttccaagttgtgctgggaaccagctgaggaatacttacaacaagctggaatctgacctttcaaactctagaaagcgttacatggaccttgttgaacacagagataacttgaaaagaggccgggaagactctgaagagagggaagctgctttggaggagctgaagactgtagaactacaccataagaaactcaaggaggaactggctgcatatgcagatagtgatccagctgcagtagaagcaatgaaggatgctactgatattgctcattcagcagctaacaggtggacagacaacattttcactttgcaacaatggtgttcaaccacattcccagaagcaaaagaacaactggaacatatgtacagggaggttgggatcacagaagattttgagtatttgcagtgatgtccaacagcctattacagcgtcgaaaatgtgccacggaatgttggatcgatcacagatgcaagtttatcatgttggtgctggactacttttcctagatgctaccaagtggctagactataccgaaggctcctgctatgcttgaaaactttaccgaaggctcgattttattggatgtagtggctagactatatcatgaaatgtatatttctttgctgatggaaagaacaacaatagcttggcatctggaaataaaaatactgccctaaaaatagctgaaaataataataccagaacctatagaaactaag

SEQ ID NO: 207644 - DNA, 1187 bp, Zea Mays
aaaaaagaagattagacaccgctcctcccgtccccgccgcccccgcccgaaccgaactcatctcctttccgtttgggcgccaaaacagcatccgccgcgcgacgcgtctcgtcagcgccgccagccccgtcagaatggctctcaagcatggagccacaaaaggaatgtgatgcacctgtcgtctactgagccatggatggtacaggtgacctcttcaaggacgcggccttcagatctaagtgtagttgtaggttgtctaagaagagggggctttcgttggaggagaaacgggagcaaatgcttcaaatattttatgagagccaggaattctttctgcttaaggagctagagaaaatgggtcctaaaaagggagtgattagtcagtctgtgaaagatgtggtgcaaagcctggtggatgatgatcttgtcttgaaggataaaattgggacttctgtgtacttttggagtcttccaagttgtgctgggaaccagctgaggaatacttacaacaagctggaatctgacctttcaaactctagaaagcgttacatggaccttgttgaacacagagataacttgaaaagaggccgggaagactctgaagagagggaagctgctttggaggagctgaagactgtagaactacaccataagaaactcaaggaggaactggctgcatatgcagatagtgatccagctgcagtagaagcaatgaaggatgctactgatattgctcattcagcagctaacaggtggacagacaacattttcactttgcaacaatggtgttcaaccacattcccagaagcaaaagaacaactggaacatatgtacagggaggttgggatcacagaagattttgagtatttgcagtgatgtccaacagcctattacagcgtcgaaaatgtgccacggaatgttggatcgatcacagatgcaagtttatcatgttggtgctggactacttttcctagatgctaccaagtggctagactataccgaaggctcctgctatgcttgaaaactttaccgaaggctcgattttattggatgtagtggctagactatatcatgaaatgtatatttctttgctgatggaaagaacaacaatagcttggcatctggaaataaaaatactgccctaaaaatagctgaaaataataataccagaacctatagaaactaag

SEQ ID NO: 207645 - DNA, 1177 bp, Zea Mays
aaaaaagaagattagacaccgctcctcccgtccccgccgcccccgcccgaaccgaactcatctcctttccgtttgggcgccaaaacagcatccgccgcgcgacgcgtctcgtcagcgccgccagccccgtcagaatgtctaagaagagggggctttcgttggaggagaaacgggagcaaatgcttcaaatattttatgagagccaggaattctttctgcttaaggagctagagaaaatgggtcctaaaaagggagtgattagtcagtctgtgaaagatgtggtgcaaagcctggtggatgatgatcttgtcttgaaggataaaattgggacttctgtgtacttttggagtcttccaagttgtgctgggaaccagctgaggaatacttacaacaagctggaatctgacctttcaaactctagaaagcgttacatggaccttgttgaacacagagataacttgaaaagaggccgggaagactctgaagagagggaagctgctttggaggagctgaagactgtagaactacaccataagaaactcaaggaggaactggctgcatatgcagatagtgatccagctgcagtagaagcaatgagtatgagatggcctctttatacaactcttaggatgctactgatattgctcattcagcagctaacaggtggacagacaacattttcactttgcaacaatggtgttcaaccacattcccagaagcaaaagaacaactggaacatatgtacagggaggttgggatcacagaagattttgagtatttgcagtgatgtccaacagcctattacagcgtcgaaaatgtgccacggaatgttggatcgatcacagatgcaagtttatcatgttggtgctgtgagttatctgcagtaaatagattttgtatatttcacatgcttggcaacaatgaccgatatggccacatgcatgttagggactacttttcctagatgctaccaagtggctagactataccgaaggctcctgctatgcttgaaaactttaccgaaggctcgattttattggatgtagtggctagactatatcatgaaatgtatatttctttgctgatggaaagaacaacaatagcttggcatctggaaataaaaatactgccctaaaaatagctgaaaataataataccagaacctatagaaactaag

SEQ ID NO: 207646 - DNA, 1067 bp, Zea Mays
aaaaaagaagattagacaccgctcctcccgtccccgccgcccccgcccgaaccgaactcatctcctttccgtttgggcgccaaaacagcatccgccgcgcgacgcgtctcgtcagcgccgccagccccgtcagaatgcttaaggagctagagaaaatgggtcctaaaaagggagtgattagtcagtctgtgaaagatgtggtgcaaagcctggtggatgatgatcttgtcttgaaggataaaattgggacttctgtgtacttttggagtcttccaagttgtgctgggaaccagctgaggaatacttacaacaagctggaatctgacctttcaaactctagaaagcgttacatggaccttgttgaacacagagataacttgaaaagaggccgggaagactctgaagagagggaagctgctttggaggagctgaagactgtagaactacaccataagaaactcaaggaggaactggctgcatatgcagatagtgatccagctgcagtagaagcaatgaaggatgctactgatattgctcattcagcagctaacaggtggacagacaacattttcactttgcaacaatggtgttcaaccacattcccagaagcaaaagaacaactggaacatatgtacagggaggttgggatcacagaagattttgagtatttgcagtgatgtccaacagcctattacagcgtcgaaaatgtgccacggaatgttggatcgatcacagatgcaagtttatcatgttggtgctgtgagttatctgcagtaaatagattttgtatatttcacatgcttggcaacaatgaccgatatggccacatgcatgttagggactacttttcctagatgctaccaagtggctagactataccgaaggctcctgctatgcttgaaaactttaccgaaggctcgattttattggatgtagtggctagactatatcatgaaatgtatatttctttgctgatggaaagaacaacaatagcttggcatctggaaataaaaatactgccctaaaaatagctgaaaataataataccagaacctatagaaactaag

SEQ ID NO: 207647 - DNA, 1106 bp, Zea Mays
ctgcaggcctaaaaaagaagattagacaccgctcctcccgtccccgccgcccccgcccgaaccgaactcatctcctttccgtttgggcgccaaaacagcatccgccgcgcgacgcgtctcgtcagcgccgccagccccgtcagaatgtctaagaagagggggctttcgttggaggagaaacgggagcaaatgcttcaaatattttatgagagccaggaattctttctgcttaaggagctagagaaaatgggtcctaaaaagggagtgattagtcagtctgtgaaagatgtggtgcaaagcctggtggatgatgatcttgtcttgaaggataaaattgggacttctgtgtacttttggagtcttccaagttgtgctgggaaccagctgaggaatacttacaacaagctggaatctgacctttcaaactctagaaagcgttacatggaccttgttgaacacagagataacttgaaaagaggccgggaagactctgaagagagggaagctgctttggaggagctgaagactgtagaactacaccataagaaactcaagaggatgctactgatattgctcattcagcagctaacaggtggacagacaacattttcactttgcaacaatggtgttcaaccacattcccagaagcaaaagaacaactggaacatatgtacagggaggttgggatcacagaagattttgagtatttgcagtgatgtccaacagcctattacagcgtcgaaaatgtgccacggaatgttggatcgatcacagatgcaagtttatcatgttggtgctgtgagttatctgcagtaaatagattttgtatatttcacatgcttggcaacaatgaccgatatggccacatgcatgttagggactacttttcctagatgctaccaagtggctagactataccgaaggctcctgctatgcttgaaaactttaccgaaggctcgattttattggatgtagtggctagactatatcatgaaatgtatatttctttgctgatggaaagaacaacaatagcttggcatctggaaataaaaatactgccctaaaaatagctgaaaataataataccagaacctatagaaactaag

SEQ ID NO: 207648 - DNA, 850 bp, Zea Mays
cctaaaactgcaggcctaaaaaagaagattagacaccgctcctcccgtccccgccgcccccgcccgaaccgaactcatctcctttccgtttgggcgccaaaacagcatccgccgcgcgacgcgtctcgtcagcgccgccagccccgtcagaatgtctaagaagagggggctttcgttggaggagaaacgggagcaaatgcttcaaatattttatgagagccaggaattctttctgcttaaggagctagagaaaatgggtcctaaaaagggagtgattagtcagtctgtgaaagatgtggtgcaaagcctggtggatgatgatcttgtcttgaaggataaaattgggacttctgtgtacttttggagtcttccaagttgtgctgggaaccagctgaggaatacttacaacaagctggaatctgacctttcaaactctagaaagcgttacatggaccttgttgaacacagagataacttgaaaagaggccgggaagactctgaagagagggaagctgctttggaggagctgaagactgtagaactacaccataagaaactcaaggaggaactggctgcatatgcagatagtgatccagctgcagtagaagcaatgaaggatgctactgatattgctcattcagcagctaacaggtggacagacaacattttcactttgcaacaatggtgttcaaccacattcccagaagcaaaagaacaactggaacatatgtacagggagtatgctgcctgacttccagttgattaagtatgtttcattatgcaatgtgatttacccacaagtgtcaaggacattggtgcctctgtgtctatagtatccagatagcgaaag

SEQ ID NO: 207649 - DNA, 2157 bp, Zea Mays
cgagatgggcctcttcccgtccccgtctctgcctgcccaggcaacagccattcctctcctccagtcctcctcgcatcactcgactcgactcgactcgctcgctccaccgaccaccgtgcggccgcggagcggcgcggctttgctccactccactcgcgccggggcggtttccgtcgccgccagggcaccgcccgtgacaccctgatctcccttcacctactcgtggattcgatcccatccagcccgtcccgtccctctcccaccctttccagatctgcctgcgagcccccgccacgcaccctcatgacccaccactaccccccgacgcgcatcacgcgaggggagcgtcactactgctgccgccgccaatggctctctgccctgaccgagcccatggacgacctcaccgtggggggcctcgcgctcttcgccgccgtcgctgacttcatagacgactccgctcccgcgatgccgcagccagcggcggccagcaccgcgcacgagcccgagcccgagcccgggagcccctgctcagtcgccagcgactgcagcagcgtcgccaccgccgacttcgagggatttgccgacctcggctccgcgctcgtgctcgacgacctcgtctcctccgcctccacctccgccagctctgcctccgggcccagggccgccgccgccgctcccgccaggagcgtcttcgcgctcgactgcgtgccgcgctgggggctccagtccgtgtgcggccgccgacccgagatggaggacgccgcccgcgtgctgccaaccttcttccacgtcccgctctggatgctcgccggcgacgcgcccgtcgacggcctcgaccgggcgtccttccgcctccccgcgcacttcttcggcgtctacgacggacacggcggcctccaggtcgccaactactgccgggagagaatccacgaggtactggcagaggagctcaccaaggcagaggaggccgcgtccgacgctgacctgggtggcctcgaccctaacactcagaagcactgggagaaggcctttgtgggctgcttcagccgtgttgatgcagaggtgggaggagacgcggcgaccgaagccaagcctgtggctccagacaccgtgggctcaacagcggtggttgcgcttgtctgctcatcgcatgtcatcgttgccaactgtggcgactcgcgagcggtgctctgccggggcaagcagcctgtggcgctttccgtggaccataaaccaaacagggaagatgagtatgcaaggattgaggcccagggtggcaaggtcatcaattggaatggctatcgagtcctcggtgttctcgccatgtcccggtcaattggggacagatacctgaagccatatattatcccagtccctgaggtcacaattgtcgcccgtgcaaaagatgatgagtgcctaattattgcaagtgatggcctctgggatgtgatgtcaaacgaggaggtatgtgatgctgctcgcaagcgcatactgctgtggcacaagaagaattcagatgcctcatcgtcagcccaaagaagcggtgattcgccagatgaagcggctcaagcagctgctgagtatttatcgaagctggctctccataaggggagcaaggacaacataaccgtaattgtagtcgacctcaagtcacataggaagatcaagagcagagcataaccgtggattcggtaagacttggacagtagaaatggttgttactacactaggacgctagaaaggtggagaaaaggctcctgttcagtctgctgcacatgtacactggttggcccaacactagtctttttccacaaccatataggctgccacgtttgttcagggactcatacacagatctaatctggttagaaattgggctgacgaagtaaggtaaaggtacaatagaaaccgccagcattaaactgtacctgtgctacttgtgttttggtatattgatgtctaggagtagcagattagcagtgcaaagaatactacgataccccaagttgtttctgcaacaaatgttatgtgcatgtatatcataaaataagaccatctgtaatatgaattcaattcttggcatccgacgttattaattcagttgattgccaacaggatggttgttttgctgctgagaattacatctcattcggt

SEQ ID NO: 207650 - DNA, 2231 bp, Zea Mays
gcggagcggcgcggctttgctccactccactcgcgccggggcggtttccgtcgccgccagggcaccgcccgtgacaccctgatctcccttcacctactcgtggattcgatcccatccagcccgtcccgtccctctcccaccctttccagatctgcctgcgagcccccgccacgcaccctcatgacccaccactaccccccgacgcgcatcacgcgaggggagcgtcactactgctgccgccgccaatggctctctgccctgaccgagcccatggacgacctcaccgtggggggcctcgcgctcttcgccgccgtcgctgacttcatagacgactccgctcccgcgatgccgcagccagcggcggccagcaccgcgcacgagcccgagcccgagcccgggagcccctgctcagtcgccagcgactgcagcagcgtcgccaccgccgacttcgagggatttgccgacctcggctccgcgctcgtgctcgacgacctcgtctcctccgcctccacctccgccagctctgcctccgggcccagggccgccgccgccgctcccgccaggagcgtcttcgcgctcgactgcgtgccgcgctgggggctccagtccgtgtgcggccgccgacccgagatggaggacgccgcccgcgtgctgccaaccttcttccacgtcccgctctggatgctcgccggcgacgcgcccgtcgacggcctcgaccgggcgtccttccgcctccccgcgcacttcttcggcgtctacgacggacacggcggcctccaggtcgccaactactgccgggagagaatccacgaggtactggcagaggagctcaccaaggcagaggaggccgcgtccgacgctgacctgggtggcctcgaccctaacactcagaagcactgggagaaggcctttgtgggctgcttcagccgtgttgatgcagaggtgggaggagacgcggcgaccgaagccaagcctgtggctccagacaccgtgggctcaacagcggtggttgcgcttgtctgctcatcgcatgtcatcgttgccaactgtggcgactcgcgagcggtgctctgccggggcaagcagcctgtggcgctttccgtggaccataaaccaaacagggaagatgagtatgcaaggattgaggcccagggtggcaaggtcatcaattggaatggctatcgagtcctcggtgttctcgccatgtcccggtcaattgtcacaggagagcctcagtgtactgttttgatgcctttgtttcagcgttccaatccacttcacttaaagttgactacaaccgatccaaatagacttgtggatgaaaaggggacagatacctgaagccatatattatcccagtccctgaggtcacaattgtcgcccgtgcaaaagatgatgagtgcctaattattgcaagtgatggcctctgggatgtgatgtcaaacgaggaggtatgtgatgctgctcgcaagcgcatactgctgtggcacaagaagaattcagatgcctcatcgtcagcccaaagaagcggtgattcgccagatgaagcggctcaagcagctgctgagtatttatcgaagctggctctccataaggggagcaaggacaacataaccgtaattgtagtcgacctcaagtcacataggaagatcaagagcagagcataaccgtggattcggtaagacttggacagtagaaatggttgttactacactaggacgctagaaaggtggagaaaaggctcctgttcagtctgctgcacatgtacactggttggcccaacactagtctttttccacaaccatataggctgccacgtttgttcagggactcatacacagatctaatctggttagaaattgggctgacgaagtaaggtaaatctgaaatatatatataacatacatatgtagattccaaatagctattactgactgggtttggggcattgtttctgtttctaacaggtaaaggtacaatagaaaccgccagcattaaactgtacctgtgctacttgtgttttggtatattgatgtctaggagtagcagattagcagtgcaaagaatactacgataccccaagttgtttctgcaacaaatgttatgtgcatgtatatcataaaataagaccatctgtaatatgaattcaattcttggcatccgacgttattaattcagttgattgccaacaggatggttgttttgctgctgagaattacatctcattcggt

SEQ ID NO: 207651 - DNA, 2173 bp, Zea Mays
ctttgctccactccactcgcgccggggcggtttccgtcgccgccagggcaccgcccgtgacaccctgatctcccttcacctactcgtggattcgatcccatccagcccgtcccgtccctctcccaccctttccagatctgcctgcgagcccccgccacgcaccctcatgacccaccactaccccccgacgcgcatcacgcgaggggagcgtcactactgctgccgccgccaatggctctctgccctgaccgagcccatggacgacctcaccgtggggggcctcgcgctcttcgccgccgtcgctgacttcatagacgactccgctcccgcgatgccgcagccagcggcggccagcaccgcgcacgagcccgagcccgagcccgggagcccctgctcagtcgccagcgactgcagcagcgtcgccaccgccgacttcgagggatttgccgacctcggctccgcgctcgtgctcgacgacctcgtctcctccgcctccacctccgccagctctgcctccgggcccagggccgccgccgccgctcccgccaggagcgtcttcgcgctcgactgcgtgccgcgctgggggctccagtccgtgtgcggccgccgacccgagatggaggacgccgcccgcgtgctgccaaccttcttccacgtcccgctctggatgctcgccggcgacgcgcccgtcgacggcctcgaccgggcgtccttccgcctccccgcgcacttcttcggcgtctacgacggacacggcggcctccaggtcgccaactactgccgggagagaatccacgaggtactggcagaggagctcaccaaggcagaggaggccgcgtccgacgctgacctgggtggcctcgaccctaacactcagaagcactgggagaaggcctttgtgggctgcttcagccgtgttgatgcagaggtgggaggagacgcggcgaccgaagccaagcctgtggctccagacaccgtgggctcaacagcggtggttgcgcttgtctgctcatcgcatgtcatcgttgccaactgtggcgactcgcgagcggtgctctgccggggcaagcagcctgtggcgctttccgtggaccataaaccaaacagggaagatgagtatgcaaggattgaggcccagggtggcaaggtcatcaattggaatggctatcgagtcctcggtgttctcgccatgtcccggtcaattgcgttccaatccacttcacttaaagttgactacaaccgatccaaatagacttgtggatgaaaaggggacagatacctgaagccatatattatcccagtccctgaggtcacaattgtcgcccgtgcaaaagatgatgagtgcctaattattgcaagtgatggcctctgggatgtgatgtcaaacgaggaggtatgtgatgctgctcgcaagcgcatactgctgtggcacaagaagaattcagatgcctcatcgtcagcccaaagaagcggtgattcgccagatgaagcggctcaagcagctgctgagtatttatcgaagctggctctccataaggggagcaaggacaacataaccgtaattgtagtcgacctcaagtcacataggaagatcaagagcagagcataaccgtggattcggtaagacttggacagtagaaatggttgttactacactaggacgctagaaaggtggagaaaaggctcctgttcagtctgctgcacatgtacactggttggcccaacactagtctttttccacaaccatataggctgccacgtttgttcagggactcatacacagatctaatctggttagaaattgggctgacgaagtaaggtaaatctgaaatatatatataacatacatatgtagattccaaatagctattactgactgggtttggggcattgtttctgtttctaacaggtaaaggtacaatagaaaccgccagcattaaactgtacctgtgctacttgtgttttggtatattgatgtctaggagtagcagattagcagtgcaaagaatactacgataccccaagttgtttctgcaacaaatgttatgtgcatgtatatcataaaataagaccatctgtaatatgaattcaattcttggcatccgacgttattaattcagttgattgccaacaggatggttgttttgctgctgagaattacatctcattcggt

SEQ ID NO: 207652 - DNA, 2091 bp, Zea Mays
ctcccaccctttccagatctgcctgcgagcccccgccacgcaccctcatgacccaccactaccccccgacgcgcatcacgcgaggggagcgtcactactgctgccgccgccaatggctctctgccctgaccgagcccatggacgacctcaccgtggggggcctcgcgctcttcgccgccgtcgctgacttcatagacgactccgctcccgcgatgccgcagccagcggcggccagcaccgcgcacgagcccgagcccgagcccgggagcccctgctcagtcgccagcgactgcagcagcgtcgccaccgccgacttcgagggatttgccgacctcggctccgcgctcgtgctcgacgacctcgtctcctccgcctccacctccgccagctctgcctccgggcccagggccgccgccgccgctcccgccaggagcgtcttcgcgctcgactgcgtgccgcgctgggggctccagtccgtgtgcggccgccgacccgagatggaggacgccgcccgcgtgctgccaaccttcttccacgtcccgctctggatgctcgccggcgacgcgcccgtcgacggcctcgaccgggcgtccttccgcctccccgcgcacttcttcggcgtctacgacggacacggcggcctccaggtcgccaactactgccgggagagaatccacgaggtactggcagaggagctcaccaaggcagaggaggccgcgtccgacgctgacctgggtggcctcgaccctaacactcagaagcactgggagaaggcctttgtgggctgcttcagccgtgttgatgcagaggtgggaggagacgcggcgaccgaagccaagcctgtggctccagacaccgtgggctcaacagcggtggttgcgcttgtctgctcatcgcatgtcatcgttgccaactgtggcgactcgcgagcggtgctctgccggggcaagcagcctgtggcgctttccgtggaccataaaccaaacagggaagatgagtatgcaaggattgaggcccagggtggcaaggtcatcaattggaatggctatcgagtcctcggtgttctcgccatgtcccggtcaattggagttcacagattcaattaagctatttattacttggacctggactgcttgatcctatgttctataaccatggattccttgcagtcacaggagagcctcagtgtactgttttgatgcctttgtttcagcgttccaatccacttcacttaaagttgactacaaccgatccaaatagacttgtggatgaaaaggggacagatacctgaagccatatattatcccagtccctgaggtcacaattgtcgcccgtgcaaaagatgatgagtgcctaattattgcaagtgatggcctctgggatgtgatgtcaaacgaggaggtatgtgatgctgctcgcaagcgcatactgctgtggcacaagaagaattcagatgcctcatcgtcagcccaaagaagcggtgattcgccagatgaagcggctcaagcagctgctgagtatttatcgaagctggctctccataaggggagcaaggacaacataaccgtaattgtagtcgacctcaagtcacataggaagatcaagagcagagcataaccgtggattcggtaagacttggacagtagaaatggttgttactacactaggacgctagaaaggtggagaaaaggctcctgttcagtctgctgcacatgtacactggttggcccaacactagtctttttccacaaccatataggctgccacgtttgttcagggactcatacacagatctaatctggttagaaattgggctgacgaagtaaggtaaaggtacaatagaaaccgccagcattaaactgtacctgtgctacttgtgttttggtatattgatgtctaggagtagcagattagcagtgcaaagaatactacgataccccaagttgtttctgcaacaaatgttatgtgcatgtatatcataaaataagaccatctgtaatatgaattcaattcttggcatccgacgttattaattcagttgattgccaacaggatggttgttttgctgctgagaattacatctcattcggt

SEQ ID NO: 207653 - DNA, 1672 bp, Zea Mays
tgtatacaaaccaagaagagcacggcaagctctcgtttacatggtttgggccgaccccaagagttctaatcaccgatcccgagcttgcccgggaagtgctgtcgaataagtgtggcgacttcgtgaagtcgctgctctctcccctgtcaacgctgctggttgctgggctcgtcgtccttgacggtgaaaagtgggtcaaacatcgaaggattctgaatccggcattccacgcggagaagctgaagggaatgctgccggcgttcttagcatgttgcaacgaactggttgacagatgggagaaacagatctctgcttccgctgaaccaactgagctggatgtctggccagagttccaaaacttatcgggagatgtgatttcaagagctgcgttcggtgttagctatgaagaaggcagaagaattttcctacttcaggcggagcaagctgaacgccttgttcaatctttcaagacaaattacatccctggcttctctctcctgccaacagaaaacaacagaaggatgaatgaaatcgacagggaggtgaagacgatcctgaggggcataatagagaagagacagaaggcagccaagaacggtgaagcaaccaaggacgacgacctgctgggcttgctactggagtcgaacatgaattacagcgactcggacggcaaatccagcaaggggattacggtggaggaggtgatcggcgagtgcaaggtgttctacttcgcagggatggagaccaccgccgtgctgctcacttggacagtggccgtgctaagcatgcacccggagtggcaggaccgtgccagggaggaggtcctgcaggtctttggtgaaaacaagccggacttcaatggtgtggcacgcctaaaagtggtcaccatggtgctctacgaggtgctgcgcctgtaccctccggtggcggccatcaaccgccggacacgccagccgacaaagctcggaggcgtcacgtacccggcgggggtcatgcttacgacgcccgtcatgttcatccaccgggaccctgccctgtgggggtccgacgccgacgagttcaacccggggaggttcgccgacggcgtgtccaaggcgtgcagggaccccggcgccttcgcccccttcagctggggcccgcgcgtctgcatcggccagaacttcgctctcctggaggccaagctggccgtcagcatgatcctgcagcgcttcgcgttcgaggtgtcgccggcgtacgtccacgcgccctacaccgtgctgacgctgcacccgcagcacggcgctccggtcaggctgcgcaggctatgaatacacgatcggtgcttccgttaagcaatctctctccaatacccgaagactctgtttattcatttcaaagttacgactacaaaacataatgcaaaatctcaaacctatatataccagagcatgtaaaagctagcaaaagctatattgtgataacgaaccaacaatatattactcctatatataacaacaagtcaaatcttgctttcaaacacaataactttaagaattatattatatataaagaaagtcaaggatcaaacgactgaacttgagcatataaatatagagcaaatgtttgttgatctgttcatcgcaagtcttttacccaacgtgttcagacaacatgtagccaacatatgtttaat

SEQ ID NO: 207654 - DNA, 525 bp, Zea Mays
aaagccgggggcacaagcgaaagcgaaagcgcatagtgcccgtgctgcctgtcccttaccgcaacggtagcattcgaattctctccccaaatcgccaccctggggcacccaatgctggcagcctcccttctcgctctccgcttcctcctcgtcggcgccactgcggcggggatggggaccgggacggtgggggtgagtggtggtggccagctgtggtgcgttgcgaagaacaacgcggaggacggcgcgctgcagagcgcgattgattgggcgtgcagtgttgacggtggccgcgcggactgtgcagccatccagcagggtggcgcctgttacgatccgcccgacctccagcagcacgcctcctacgccttcaacgactacttcctccgttccggcggtgccgggagccccgccgcctgcgacttctccggcgccgccgcactcaccgcgctcaaccccagtcatgggagctgcgtgtttccttccagggcaagttagacctcagctggccgagacgaggtggcg

SEQ ID NO: 207655 - DNA, 527 bp, Zea Mays
gccgggggcacaagcgaaagcgaaagcgcatagtgcccgtgctgcctgtcccttaccgcaacggtagcattcgaattctctccccaaatcgccaccctggggcacccaatgctggcagcctcccttctcgctctccgcttcctcctcgtcggcgccactgcggcggggatggggaccgggacggtgggggtgagtggtggtggccagctgtggtgcgttgcgaagaacaacgcggaggacggcgcgctgcagagcgcgattgattgggcgtgcagtgttgacggtggccgcgcggactgtgcagccatccagcagggtggcgcctgttacgatccgcccgacctccagcagcacgcctcctacgccttcaacgactacttcctccgttccggcggtgccgggagccccgccgcctgcgacttctccggcgccgccgcactcaccgcgctcaaccccagtcatgggagctgcgtgtttccttccagtgtcataagcagcacactggctatgcttgtgtctgtttaaac

SEQ ID NO: 207656 - DNA, 2460 bp, Zea Mays
acacccatggttgaacttgaactggagaggcagtagccagagtgtgagctgacggcggacgtgctcgcctctcctctcctcacatttccggctcccctctccgcattccatggcaccgcattaccggtatttttagccgccggaggagacgggttgcgtagagagaggggaaaccagagctcctgactgttcctctctccctcctcacgggcgggctccgtctgttccgtccatccaccgccccggtcgtctcccggccagatccctctcctgcaagagtggccggagaagatgatgggcgggttcctctccagggtcctcctgtaagcgctctattgctccgaatcttgtagcatgttgtttgtagattgacatgttgaggttggagccttatcagaggcatgagtttcgggtttgaatttgtttccttgaaatgggattttgtgggtgcccattcagagagttcagtctcttcttggtttaaactcttcattcgttcttaacatactgctttcttaaaaaaatgaggagatgcgttctgtcttatcgatttgtccccctggttattcgccggaaaatgaggctaagagcacgcaaccattcaaaagtattttattgttctcgaggagcatgggagcaagttttcaatgcattgcacaacgggcaaaggttatgttcgtttattcttccggttcgacgcattcttctttgggaacgtatcatgtgctcatatgagcactttaaatctagtgtctttatttctcattcagggggtgagggcagcagtgtcacacagaagagacaggcggcgcgacgcaacaagggtgacacacagaagaaactaggaaatgtctattcacacttgaatgagaaatgaatgcaccagatttaaagtgcttatatgagcacaagagctccatgagtacatgatacgttcccttattctttatgatgatgttctattaatcatatttcttcaaacggttaagatcggagaatgctgccgtatgcgttaagatatgtcgaattgctgtgttctttttttttatctgtgacctgcttcatcaagaactagatttgatcctgtccatctgtgtgttgatgatttatctatctttttgagcgcatctaaagtgctagtctattgaaggatactttgatactaaaaccatgcagctttagattggcagcttttctttttgtgatttattacagaataaaggaaagaaataaaacaaatagttttcccccctgaaatgccaacttactgtatgagaaagaacaggtttttgtcataatatacaagtgctaacatgccatttatcttccggcatttgatatgccaatttcctgtaggctggcttttggctatgcctatcctgcctatgaatgctacaagaccgttgaactgaacaaaccacagattgagcagctcatattttggtgtcagtattggattttagttgccctgttgacagttttggagagatttggagattttacaatatcatggctaccgttttactcagaagcaaaggtgttgttctttgtatatttgtggtaccctaagacaaagggaactacgtatgtttatggaactttctttaagccatatatttctcagcatgagaatgaaatcgaccgaaatcttcttgagctcagagctcgagccaccgatatggttgtcctttacttccataaggctgcttcggtagggcaaaatactttctttgacgttttaaaatatgttgctgcccagtccccttctcggaaatcaaggctgcaccctcatcaggaaccacagcagcagcaaccacaagtgcaggtggagctgcagcagccgcaaccacaaaaacaagcagcacctgttatgcgcagaggagcatctattgctgctcggcaagcagcaatggcacagcaatctctggagactatacccgttccatcttcacccaagatcaagcgtcaaacatcagggagacctggttcggtggcatccacaaagcctgcagcagctgcatccacaccaaaacctggcggtagcccaaagaaagagggcgcggaagagcttgaccctgcgctcgaggagacgccgatggaggagacgatccgtgtgacgcgcgccaagctaaggaggcgcacggccaccgaggattctgctgggaattagctgcatgccgttgttttccctgcacattgtattgatctttttccgagttttaggctcacatgttgtttgctggaatggagatatgttgttgttcacttggttcttgtgacacagagttaattatcttatttccgtgctttcttagtacctttttgtgtgatttaagttgtaaataacagttcccctccgcatttgtatatagtttagcggcatgggcaacgaatgcctgtaattgcaacattacacgcttcaatctggtcactccttgggtatcttctcaagatgtgtca

SEQ ID NO: 207657 - DNA, 2220 bp, Zea Mays
aaaaaagacgcggcgatttttcgctcctctaatccggtttgcctttatccgtgggacttctttttaaaaggagctactttccttcgccgcttccgcaatcttccattcctcctctctccttccctgtgtctctctcctcgcgagctcttcatcccttcttccagcgcggtttggcgatggcggcagcgcaggcgatctcgaaggggagcgtggtgtctccatgcggcaatcgagcggcgccgggcttccttgccaggcggaggggtgccgtggcggcgcggatggcaccgtcagcggcgcggatcgggggcttctggaggaagaacgcgtttcctggcgggaggctaaccctgaggacgaggagatccagggccgcgtcaccgacgcagatgaacatgaaccttgcgcttgggaaatcgatgaggtggtgggagaaggggttgcagcccaacatgcgtgagatcgagtccgcccaagaccttgtcgatgctttgaccaacgccggcgacaggctcgtcgtcgtcgacttcttctctcctggctgcggcggctgccgtgcttttcaccccaaggtgaggggaaaaagtataacgaattcacgttgcatgatattcttcatatatccgagaactttcgagaagattgtgtcttttttaaggaatctatttcgtgcagatttgtcaatttgcggagcagaatccagatgtgctgttcttgcaagtgaactacgaggagcacaagtctatgtgccacagccttcatgtccatgtcctacccttgttcagattctacaggggagcacagggacgactctgtagcttcagttgtaccaacgcaactgtaagatccggatccgatcagctcctcaataacatgcaacgaacccaaaatgatctatattcattactagtcaccctcttggagctaaatctcgttaataaagttgtgaatccgggtagagcttgttggcaacccaacttcagttttggacccaaatggctaattttgctcctatacttgcagaatatgagaggcaaagaatgaccttttaatttgaatggaaaagaatggccatttaaagttagtgaatttggatagagcttgttgacaacccaactttagttttggactcaaatgttaggtttgttctgatacttgcagaatataacaagcaaagaatgaccttttaagttgaatccaactggcaaagaatgaccattttaagtttcccctagcagttcatgcaatattgcaacacttaactgataggatagaaacattttccctcacgaacccaactggatgttgtgtgattgatttcctggctattatacaattttagctatacttgggattgctgttgggtgttggctgtgatcacccatctggactaacgggagtgttatttccaaatgcagattaagaagttcagggatgcacttgcgaagcacaagccagatagatgtagccttggcccaaccagggggctagaggaatctgagttattagccttggcggcaaacaaggacctgcagttcacctacgcgaagcaggaaccagaactgatccccaggggagatgctcctggggaggtcgttgctcccgagcctgcaaagcttcctgcggctccaaagcctttggtcaggctggggtccgaggagaggtcaggctggtctcgtcaggaagatgaaatgcatatgaggttatcatgaggatgattagatgcttccgttctgtatagttccgcggttcttggtgtgtacaggttgtagcttcccatggtagcagagtgcaggctaagattttttacatgtgaagcctgcccgcctgtcgtccagtagtttagctcggttggattagcagtaccaatgagcggtgttgtggagctctgccttgaggaaatcgtgtggtagatgtatggatgattcgtctacatgctatttcgtcgaattctgtagatcaagtggatgtgtagctcttgtttcatttcccctgtagcgttgggatctgtccgtcgcagaacagaataatcgatcatgccttatgttgtgccagatattgtggtgcttagagatcattgtttgttgtgataatattcgagtccgtgactagtttccttatgttgtatcagacactgtggtgatcattgttgtgataacatttgagttttgtggctagttcctgccttgccttcggggcagggaacggccgattgagaaa

SEQ ID NO: 207658 - DNA, 1658 bp, Zea Mays
ctatttttccgtcggtatggtatagtaataacccggtttgtcatctctagactagggtacccaaacccgagccgtcgtccccagtgtggcagtgtgccgctcgacgcgcagccaaacccaaacccttcctccctcccgacgggcgacggcgatggccgccgcgacagagaagacggctgaggacatccgccgcgagctccaggagctccagcgccagcaccgcgagatcaccgagcgcctgcgcgacccccgtggccttcgccgcggcgcccccggccctggtcctggacctggccccccccgcccgctccgcggcttcgtgagaccccatgtgggtgcggaagtggcggatcaggctccgcagaagcgtcggctgctatcggccgtagttaaggttgatggcgctgaaaataatgaagaaggcacaaaggatgccaatggggaggggcaagaggcgggttcaggtgccactgaaggcagtgacaggaggactttcaacactggcgggttcagaagggacgggagcctgtggatgcagaggagggtggactataattcgctgccagagccagctccaagggagcttcccaggaatgaggacccgagtttggtgagaaggaataagaggatgctggggcagcttcttgtcggtacattagagaaatttcaacaagaggataaaaagctatccaactctgaggcttttctgcgcagatcagagactcagcgaaaggctgagcaaaaggttcgtgaagaaagtgaaaggctgcgacagcaggaacgtgagcaaattgcagagaagcgtaagcgtgatatgacgctccgcgctcgtgtagctgctaaggcagaagaaaagaggttggagctgttgtacattcagtggactgagcatcataaaaggctgtccaatttcttaaggacaaaagctgagccacctatttattacatgccaactaaaccaattattgatgatccagccattgttgagcagaacaaggaaaaggtattcgaagaatggaaatctatgcgcagggctgagctgactcggtttcaaaagcaagttgaggagcaatatctctcaaatgtggagaggcaattggagaggatccagaatgcccggaacgctcggaaggcgaatgggcctggtaacatgcaagaaatggacaaggagctggacacccacagggcggagcatggtccaaagcctcggcgagttcccgaggagggcggcaatgatgatgacgaagatgcagaggacatggctgcggaagacgagctgatggatgaagttttgggcatcaacgatgcaatcaatgaggacccatccaagccgtccgaagaagctactactgaaggtcagccagcaaccgaggaagcacaataggattctttgttcacacaaggtaggcgtaccattccggcattccgtatgcttagttgccgtcttgttgggtgctgtctgtgcgtgtatttttgttagacgtcccccaatggttagactgtgttttaatattgttgttttggccttttgatgttgaggccatacaactgtcaattattatcttataattgttgtaagcatactataattgttaccatgatttggtcgttttttttgtcgtcagacgtttattgccagcaggttatgttctttcact

SEQ ID NO: 207659 - DNA, 1598 bp, Zea Mays
catctctagactagggtacccaaacccgagccgtcgtccccagtgtggcagtgtgccgctcgacgcgcagccaaacccaaacccttcctccctcccgacgggcgacggcgatggccgccgcgacagagaagacggctgaggacatccgccgcgagctccaggagctccagcgccagcaccgcgagatcaccgagcgcctgcgcgacccccgtggccttcgccgcggcgcccccggccctggtcctggacctggccccccccgcccgctccgcggcttcgtgagaccccatgtgggtgcggaagtggcggatcaggctccgcagaagcgtcggctgctatcggccgtagttaaggttgatggcgctgaaaataatgaagaaggcacaaaggatgccaatggggaggggcaagaggcgggttcaggtgccactgaaggcagtgacaggaggactttcaacactggcgggttcagaagggacgggagcctgtggatgcagaggagggtggactataattcgctgccagagccagctccaagggagcttcccaggaatgaggacccgagtttggtgagaaggaataagaggatgctggggcagcttcttgtcggtacattagagaaatttcaacaagaggataaaaagctatccaactctgaggcttttctgcgcagatcagagactcagcgaaaggctgagcaaaaggttcgtgaagaaagtgaaaggctgcgacagcaggaacgtgagcaaattgcagagaagcgtaagcgtgatatgctgctaaggcagaagaaaagaggttggagctgttgtacattcagtggactgagcatcataaaaggctgtccaatttcttaaggacaaaagctgagccacctatttattacatgccaactaaaccaattattgatgatccagccattgttgagcagaacaaggaaaaggtattcgaagaatggaaatctatgcgcagggctgagctgactcggtttcaaaagcaagttgaggagcaatatctctcaaatgtggagaggcaattggagaggatccagaatgcccggaacgctcggaaggcgaatgggcctggtaacatgcaagaaatggacaaggagctggacacccacagggcggagcatggtccaaagcctcggcgagttcccgaggagggcggcaatgatgatgacgaagatgcagaggacatggctgcggaagacgagctgatggatgaagttttgggcatcaacgatgcaatcaatgaggacccatccaagccgtccgaagaagctactactgaaggtcagccagcaaccgaggaagcacaataggattctttgttcacacaaggtaggcgtaccattccggcattccgtatgcttagttgccgtcttgttgggtgctgtctgtgcgtgtatttttgttagacgtcccccaatggttagactgtgttttaatattgttgttttggccttttgatgttgaggccatacaactgtcaattattatcttataattgttgtaagcatactataattgttaccatgatttggtcgttttttttgtcgtcagacgtttattgccagcaggttatgttctttcact

SEQ ID NO: 207660 - DNA, 1962 bp, Zea Mays
gcgggcgacctggtgggcaccgtcccacacgtaccgagtacgtgtccctctccccgcgcgctatccagccgccgacgcacgcccccttttgcccggccggctcgtcgtcttctcctcctgcctttttagtctccacgctcggcgcggggacagaccaaacgccgaggcgcgattccgcaaagcgaccggccgcgcgacacgactgagcgagctcgctcgaccctcctgccgcggtgctgctacacagctagtactactggttccggtggtggaggaagaaggcgcgcgaggggcaggggcagggcggccgcccccgtcacggcgagaaggtggtggtggacgggtcggagatccgggagctggtggaggaccgggaggcgttcgggatgctcgtggacaccaagttccggcagctcgacgccgacggcgacggcatgctctccgtgggggacctgcgccccgccgtggcagacatcggcgccgcgctcggcctgcccgcggagggggcgtcgcccaacgccgaccatgtctgctcagaggtggtgagcgagttgactcatgggacatcccagggcgaggtgagcaaggccgagttccaggaggccctgtcggacatactcctcggcatggcggcggggctcaagagggaccccctcgtgatactgcgcatggacggcgaggacctcagggacttcgccgccggcagcagatacgagcccacagctgccgccgttttctcgcaggtcgtcgatctcggttccgaagtcgcgtcaccgcgccaatgcgtgttggccgctctacagaagctgtccgtcgaccacggagtgcccccggcttcagatgcctgggtcgcgaagcacatcgtggagccggcgttgcagcagcttcttcctgccgatcagcctgggcagcagccggcctcccgcgatgacctgttccagcagctgaagaagctgctgggcgccgtcgctgatcgactccaggagcagcctgtgatcgtcgcgcacaccgagaaccactatgacgggagtggcgtcaagaggctgctggccaacaaattcgagttggacaagctgctggattctgtctggaaaaatttggcagcagaagataagaacaaggcgtccaaggggtgcctcataaccgcgcttgacaagatggccgatgctgcaagccttccatattacagtgctgtgaaagaggtggatgctgtcgtggaagagtcgatcaagacagcgggcgtcgaagaaggaaaggcagtggatgaagcggagttcaagaagtcgctcacagaaatccttagggctatcatgctgaggctgaacgacagccccgtcttcgtctctaccgacgtcgtcgtgcacgagcctttgtccgggacatcatcgtcggtgaactgaagggaaacgtacgacggaaacgtactgggaaaacggaacgggccagggtcattactgttggtatttgagcagtgcctgcgtagttgctttttgtctgatctcgcacagggactgcttttttgactgatctcacactgtgctctgctagcttgtcgcaagtttgcaacatgacaagatgtcaagatgaaggccatcatctggttttgttaacccgattgacatataagtttggaataaggcgttcaagccatacataattacatatcatcgacggcaacctaatagctattctaaattttgttttgctggagctcggagaaatatgttactcgatgcatgcaaaatacacagtcattcaatcagatgttatacactcgagcctaaaggtaaccaagtgaaagtttgcaggatatcctacacaacagtgggcatactatcaagggcctcaaatatgttacattgtagtagactgttttataatctagaattaggattttattattgaagcggtatattttattggtgtcataaattctataaattatactcatttttaaattat

SEQ ID NO: 207661 - DNA, 570 bp, Zea Mays
tcctcctccccaaattcctctcctcgtgacctcgtgtcctccctcgctaccacgcttgggtgaaatgccctcgccgcctctccccgtgctcgcccaaatcgccgcctctccctccctgtcgcccctgcgccacggtgcttcacgccgttgaagtcacttcactcatcccaccgatgctgtcgcccacaccgcctcctcccctcctccgctcaagccgcaccgcgacagctacacgccgcgatgtcagctgccagcagcgcccccctcttaacaacgtcgcgacgtcctcgtgggctaaaccccctccatcacttcttcccgtcgagatgcacaacaccgcgagatccatccaccttctccagcaccctcacccccactcaaatggtgtcgcgatgtccgccaccaacagcgccccttcccccctctcaaacaacgtcgcgacgtctacgagttctgtgcatgtggggtcatcttggcacgatgtgcggccatcgatgaagtagccgctaccttcccacaacgtcactatccgcctccttcgggtgattgagctttaaccttgaagtccta

SEQ ID NO: 207662 - DNA, 878 bp, Zea Mays
aacaaacaggccctaaagtcatcccaatccaattacgccacgcctgcgccgccagcccgccacatctgtcacaccgcccaaagttcggagggaagtcctcaacgacgtcgcggccatttgcagctcggacgatggcgtccaattccgcggccccggctgccgccgacgggggcgacgacctcgaccagctcctcgacagcgcgctcgacgacttcaccagcctcgacctctccgcatctgccgcccccaaaaggatatggactccattgttgaaacaatgatgcagcagcttttgtccaaggagattcttcatgagcccatgaaggacattgtggaaaaatatccaaaatggctggaggataataaaaacaagataagcaaagaagaatatgagcgttataataatcagctagaactcatggtgaagcttattgaggtctatgaaaatgatcctgagaacatgactaagatttttgacatcatgcaaaacatgcaagaatgtggtcagccccccagtgatcttgtccaagatactgtacctgatctggatctgagcaagttgggacagctgtctcctgagatgcttgaatcagcaccaaattgttgcgtaatgtgaagacaaaaaacattccacttgggattcaattccatgaagtttcttagcctgtacgaaccgcctcccccctttctggcttgagtagattcaagataatttccatctggataatctgtaaagccttgcaaatatataatgggctcaatgttctttctggttctttctgttatttttctgtaacactcccgtcgttcctatatacataccttacgtgtcgaagccccttacgtttttgtgacgcatttctattaccactatcgtt

SEQ ID NO: 207663 - DNA, 2607 bp, Zea Mays
cacaaacacaaagccaccaccaacccaccagccgagccgaggcgcccaaccgggcgcgggcgcgggcgcgggcgcgtccatccgccccccgacttcccattcccaccgcgcgcacccgccaaatcaaccaccccttcgtcgcccccgttccgtcccgtcccgttccggcaggcagccactcgcgaaggcgaagacgcaggcgccgagccgccgaccccacgggcccccaccccactcccgccgcgcctctccctccgcgtttccagatccccccgctcgcccgtgccgcggcattggcaccggcaccccgccgagcgcccgcaatgcgagccttctagcttcccgtagcacggacggaatcgcgagaggcatgcatcccaagcccgagggcggcgaagccaacggggccgccgcggaggcgggctccccgcggtccggcaacttccggcagcggagcatgcacgccgcccccgcggatccggaggcggcgcgccgggcgttcgatgtcgagaaccccccgccttgctccgccgccgcgggcggcgggctccggcccagcgagtccgtcaccaagctggagtcgctggagcgcgcggagcgcgccgcgctggcgcccgccgtcgtgctcaggaccgggttctacatcctggtgtggtacgcgttcagcacctgcctcaccctatataacaagacgctgctgggggacaagctcggcaagttcccggcgccgctgctgatgaacaccgtgcacttcgcgctgcaggcggggctctccaagctcataatcttcttacagtccaaggggccggaggccgccgtcgagatggggtggaaagactacttcatcagagtcgtgccaactgctctcgggacggccttggacataaacctgagcaacgcatctcttgtgttcatctcggtgacgtttgctactatgtgtaaatcagcctccccgatattccttttgctttttgcgtttgcatttaggttggagaatgctagcatcaagcttctaggaattatagttgttatttctactggagttctgttgacagtttccaaggagacggagtttgacttcttgggcttcatttttgtgacgcttgctgctgttatgtcgggattccgttggtccatgactcagattctactgcagaaagacacttacggcctgaagaatccaattaccttgatgagccatgttacgccagtgatggccatagccactatgatactatctctattactggacccttggagtgaatttaaaaaaaattcatatttcgataacccttggcatgtcatgcgcagttgcctacttatgcttataggaggaactttagcttttttcatggtgttaacagagtatatacttatttcagcaacaagtgccataaccgtcacaatagctggagtagtaaaagaatctgtaaccattttggttgcggtattttatttccatgatgaatttacttggttgaaaggggttggtcttttcaccattatggttggtgttagcttattcaattggtacaagtatgagaaattcaaaaggggtcatatagatgaggatgatgccaactctccttcatgtactggtgacgtcaagtacattattctagacgacttggagtatcaggatgaatttgaggaggaagatacataattttgtagtacagcgactttcaactgccacaggcttgttcatgcctgacccattgatacctgcccattgaaatattacttatggaggttttctctggaaaacatacatgaacacacctaaggctaggtgtgattatactatgctcgccaaaatctgatgcgatctgtgtgagctatgtttgtcacgatggatgttgaattctcatcttgattgaacagtcaggctaactacactgtcaagcactccatcggatcagaattcccattttgcgaagattagcagcggttacagaatgacatgcatgctatagcaggaactgctgagaatgctcgggatctgtatatttgttgttgtctttgcgttagtgcgcttgcacatattcattcttgaacctccacatttttggtgacgaggtgtactcattctctatataggcctgtttgtaaaactgaccagatgataccccacacgtgctgtttttcccttaaaacctagggagcggcatttggttttcgctgtatactgtttcggggcaccgaatatgttgtggcttgattgggaactggttataagaaaagcatgatagattgggaactgaatttctgttatgccgccaagtaaaggcacctagttcgaataattgccaaaatatctcttcggaggggaaaaaactttggttagcttttatgtttgggatttttctctgctcttgcttttcacaatcgccatgacttcagaattctaatgtttgagcgaaggaatgggacttctgggcattacgaacagtgtctaaggacccgaaagttttcctttactaaacttgttcggatgctaattagaagtatatattaaatctagtgtaaatataaaactaattatatataaggtctaagcgataagacgaatatattatactaattagttcatgattcgattttgca

SEQ ID NO: 207664 - DNA, 1296 bp, Zea Mays
ctcacgtgttttttttggaaaagtttttcttttcttcgtttgtgaaaatgaaaggcaaataattggatcgccagtcaatttgtaagctcaatcaaagagtcccgtctcatccagaccagatcagatcacggacgacacagacggccaccaaatctgcacctgccccagatgcagcagaggtagtcgccacggcgccacctgcccactgcactgcccccagagcctccaagctgcatatcggaagtgaagcgcctcgcagtcctcctctcggatctcgcggtggaagtcgccggtccactcgatcagcgagcgagtcggtgccgcgcggcggattccccgacccgagcaaaggaaccggacatgcggccgcggctggtgctcttcggcgactccataaccgagctgtccttcgcgtccggcggatggggggccgcgctcaccgaccgcttcgcccgccaggctgacgtggtgctgcgcgggctcagcggctacaacacgcggtgggcgctcaagcacgtgccgctcaaggagtaccagagcaacctccgcgccatctgcgcctatttcaaggagcgatggccctccactgctgtcatactcatcactcccccaccgatttacgagccagcgagaatccgagacatgtatggagacgacgagccttcacgccaaccagaaaggagcaatgaggctgccggcgcttacgcacaggcatgcatagatgttgccacagaattgaaccatccagttatagacatctggaccaagatgcaggaatttccagactggcaaacatctgcattgagcgacgggctccacttcaccccagtaggaaacaagatcctgttcgaggaggtggtgaagacgctggagacgagcatcggtttcagccaggagcggctcccgtcggacctcccgctgttccacgagatcgaccccaaggaccccatgaaagccttcggagcttagcttgggccttatcggaggagacgcacggtcgttggatcagccacgtctgctgcatttgagttcgtcgtcagtatgcccgaggcctgctgaggccattacaggaacagtgagctttaataagcggtgttttcagtaccgtttggttgtcagcgcatcacgtgttgttggaacactgtggttggataaaaaaatcataccctctccgtccgaaattaaaattcattttaccttttttataattcgtacaataattaattaatacatgtgttatatatatatatagattcattattatttatttgaatataaacataaacataaagaact

SEQ ID NO: 207665 - DNA, 714 bp, Zea Mays
tactgatactgctgctcatcactctgccaggaacctcctgcagtagtctgtagtcgagacatgtatggagacgacgagccttcacgccaaccagaaaggagcaatgaggctgccggcgcttacgcacaggcatgcatagatgttgccacagaattgaaccatccagttatagacatctggaccaagatgcaggaatttccagactggcaaacatctgcattgagcgacgggctccacttcaccccagtaggaaacaagatcctgttcgaggaggtggtgaagacgctggagacgagcatcggtttcagccaggagcggctcccgtcggacctcccgctgttccacgagatcgaccccaaggaccccatgaaagccttcggagcttagcttgggccttatcggaggagacgcacggtcgttggatcagccacgtctgctgcatttgagttcgtcgtcagtatgcccgaggcctgctgaggccattacaggaacagtgagctttaataagcggtgttttcagtaccgtttggttgtcagcgcatcacgtgttgttggaacactgtggttggataaaaaaatcataccctctccgtccgaaattaaaattcattttaccttttttataattcgtacaataattaattaatacatgtgttatatatatatatagattcattattatttatttgaatataaacataaacataaagaact

SEQ ID NO: 207666 - DNA, 787 bp, Zea Mays
atttttttgctgaggaatctcagagtgctattagttgctaaaggcactgccatacacaaatctttccttgtgccattttttgctcttcaggcaccttgcagcataatctcatggatcaagggtgactatggtcagtggactgcttttcttgctctgttggtgaactggagcttccactgtcaacaatgctgcttgtgagtgttgctccttaccaattcatggatctgaggggaactcaaggtggtgccgtactgtcactggccatagctgcgtatctcgccttccagcacttcactagggtgggcggcccaggcaaagccttcgagcagggatccattgttgcgaccttggccatcatctgcatcatgattgtgcccttgatgcttctattctgatttgcatttagttggaatgaatttgcttctcattatgtgcgtatagaaggacaaataaatttaaccttgtaatgcagcatccgagttctctttcccaaaacgtatgcactgatatatccttccctgttagtgctcttcggtggttattgctcttcggtggttattgagttctctcagcatgtttattctcttgttggatcttgcatggactataatttggaagccacaaaaccacctgagggcttgtttggacaatctcggattgaagtagattgagctggtatgggatgtatcgaagtgtaatatgaactaatttctctttcaatcccttcaatacacctcaattcgctccaattgctctttacccaaacaaaacctgagggaattggatg

SEQ ID NO: 207667 - DNA, 2136 bp, Zea Mays
cggcccctcgtggacgggatggcgcgaggcccacgggctccacgtgtccgtccggccactcccacgcccgcgcctttcactcgcggccgcttccctgccctgccaatccgcatcacagcttgccacttcagactcctctgcgctccatccctctgcactccggtccgcgcgagacgagcagcttctcccagacgctagacacgccaccgcatcgtctgcgccgcgagatcgagaatgtccatctctatgcggctcgcgatccctgctcctgccgtcaccgccgccgcgccgacgcggctgagggtgcgagcggcagcggcggggaaccgcggctctctctccgtcgcgcgcgccgccgtacgggcggagacgggcgcgctcaggggatgcgcctcgctgccaaagaagccgctgggagcggcccagccgtgccggagcagaggggccgccgccgtgtgtcactcgtcggcgcacctcagcgcgcgcaccatccagtggatctccgccggagccagcgcagtgctattagttgctaaaggcactgccatacacaaatctttccttgtgccattttttgctcttcaggcaccttgcagcataatctcatggatcaagggtgactatggtcagtggactgcttttcttgctctgttggtgcgtctattcttcttcattccaggtagagtagcaaacatggttcatataagagtactttttagattcattctgtctgctaataatcaaatgtgtacttcttttttgagataattgaatactatgtttttcgaaggaacaaagtagaccatgtgcccaacctgaacaaattttattacttctttgaaatcattcatttgcatgattcaagaaaaaaggaaaatggagattataaagtatctattgtaatcgtatgatagcaaacttgaaggcagttcacctctttgtagcatcggttctgaaccgatatatgtttaggtctacccagttgtttattattgtaggtgaactggagcttccactgtcaacaatgctgcttgtgagtgttgctccttaccaattcatggatctgaggtatggaagattttaacaatggccctgatgcatatcatgatgaagttttgtttacacaacttcttattaactaacgtaaagtcggttgtttagactactgctgctatagagacaaacattgtagaagcagtagaagccggtacggattaaagtcaaacgaacaaactaaaatacaagaacattttggttaaccaagtagtaaccattttttcattgtagtactgaactatgttatgtgtgaatagcaggaagcacttatgtctatatatcaataattgatatagaaccaatccagtttttttaagttgacaccctgatcagaagccatacaacataccttgaagccacattttctttgataaggacttttaacctacatgccactgagacattttttggggggtggggtggggacaccccgagacttgtagtggtagcatactttgaagtattatcatgctggctttcatattctcaagttcccttatgaaaactgcttaatttttccaggggaactcaaggtggtgccgtactgtcactggccatagctgcgtatctcgccttccagcacttcactagggtgggcggcccaggcaaagccttcgagcagggatccattgttgcgaccttggccatcatctgcatcatgattgtgcccttgatgcttctattctgatttgcatttagttggaatgaatttgcttctcattatgtgcgtatagaaggacaaataaatttaaccttgtaatgcagcatccgagttctctttcccaaaacgtatgcactgatatatccttccctgttagtgctcttcggtggttattgctcttcggtggttattgagttctctcagcatgtttattctcttgttggatcttgcatggactataatttggaagccacaaaaccacctgagggcttgtttggacaatctcggattgaagtagattgagctggtatgggatgtatcgaagtgtaatatgaactaatttctctttcaatcccttcaatacacctcaattcgctccaattgctctttacccaaacaaaacctgagggaattggatg

SEQ ID NO: 207668 - DNA, 1950 bp, Zea Mays
taatcctttttcctctggagcttctgagtgaaccaaggatcagaaagaaggctctgcaaaatctgtcaatgcaacttaggaagtgttgcaatcatccctacctattcgtagagcattataacatgtaccagcgggaggaaatagttagagcatccggaaagtttgaattgcttgatcgtctacttccgaaattgcagagagctggtcacagggttttacttttctctcagatgacaaaattgcttgacgttttagaaatatatttgcagatgtacaatttcaagtacatgaggcttgatggatccacaaagactgaagaacgtgggaggttactggcagattttaataagaagaattcagaatatttcatgtttcttctcagcacacgagccggaggtcttggattgaacttgcagactgcagacaccgtcattatctttgatagtgactggaaccctcagatggaccaacaagctgaggaccgtgcccatcgtatagggcaaaagaacgaagtacgtgtgtttgttcttgttagcgttggttcaattgaagaagagatattggatcgtgcgaaacagaagatgggtattgatgcaaaagtaatccaggctgggttgtttaacacgacctccacagcacaggacaggcgagcattgctgcaggagatactcaggagaggaacaagctcactgggaacggatatccccagtgaacgtgagataaaccgcttggctgctcgaaacgatgaagaattccggttgtttgagaagatggatgaagaaaggaggctaaaggagaactacaaatctagacttatggatggaaatgaggtcccagattgggtgtttgccaatgataatgaaaccttacgcaagaaaaccgtggcagatgaattccggaatataattgttggttcaaagagacgtagaaaggaggttgtctattcggactcttttggtgatcagtggatgaaatccgacgagggatttgaagagattgcaaagatgactccaagggtgaagcgaactgcttattcgcctgacattcaagttgagtacaatgaaaggaggaaaaggcccaagtctgtggaaaacagcgcagatggcgcaagcaacccaacacggacacccgacaaaggaagggctggagtttcatcatacagcaaggatgagaccgaagatgatggtgaagacgaagtcatcaccagtggcttacagaagggtaacagtttcacatggaagacccttggaagaaaaaggtcaagccacttaagttcgtcgtcggactcaaaagggcgaccatcattctaatgtcagttgccttgatgcttttgctcgatgaagcccttctaataatggagtacccctggaggctagcagcgctaccatttcgaaagtaccttgaacctataaacttcaggatggaggctgtagctagcaggactaccattttgaaagtacattgaagctataaacttcagaattagtagtatactctggacttgttgccatgaattcgtaactcaaacgaacttaaattgcgttacagttcaagcctattttgggggtaaaggttattggtaaatagctggtgatggcttgccctgaatttgggctgtcttgtctgcacattccgttgagcagtcttcggctaatgcctgtccagattttactggtttatatggcaagcaaaactgtactaggtgctatctgatgtgcttccaccgaggcaagtcctcaaacaagtgtcatcttttattgtgtatagctagtagagttggctctgtgaatctatatgcacttacatagcctgatagacacacgataactacgtaaaaatagctttgtgcaaagataatttctttttgagttttcccctttaattaatcgcgttgaaactacgcgttcaaatttgtgcttccaagtgccaaacggaattcgctgcgactcg

SEQ ID NO: 207669 - DNA, 4864 bp, Zea Mays
gccgtctcggcccgcgggggcgaagccctagagatgtcggcgtccgtcgacgccgcgtcggcagtagcggtgccggcggtgccccccgcggtggaggaggccggcggcgcggtggagcaggccaggacgctcatcgcagcgctcaacctgctctctcgcaacctaccgctgccccctgatgtcatgcgcgccgtctcgtccatctaccacgacgggggtgccggcgacagggcgggggaggaggagaagggaggggacgaggagatgccggccgcggatggggcggccgaggggaactgctcggtgtacgccgctggcggcgcgaccgagggtaaagcttttactttacaggggaccaccttgattgaagagcttgaagatgcaatattgaagaatcaaagaacgcccataacctactcagaattggcagcaatacgagaagggcggttcaatgcatccattcagcatcgactagctgaacttgaaggattaccttctactaggggtgaagacttgcaaatgaaatgtttgcttgaattgtatgggctaaagttgttagacttacagaagaaagttcggtcagatatcagtgctgagtattggctacaaaagaaatgtgcatatcctgagaggcaactcttcgattgggggatgatgcggatacggcatcctttttccatgtatggaataggagatagcttttcagtggatgttgatgatgttcaccgcagaaagagattcacagagaggatgtcaagacttgaggaggaaggaaaaaatcaggcagatatcaggaagaggaagttctttgcagaaattctcaatgcttctagagaacaccaggtgcaattagggactactttcaaacaaagaaagcagcggaatgatggcgttatggcatggcatgttcgggcacgccaacgtattacacggcaagaaaaaagcagaattaatcttctgaaaactggtgatcaagaagcatatatgaggatggttgaagagagcaagaatgaacgcttgaaaatgctccttgataaaacaaatgagcttcttgaaggaattggaaaagctgtacagcgacaaaaagatgctgaacatgttagtaagccagaaggagggagtgaagtgccaaaagggtcagaatctgaggattgttctcaaatttcgggcatcaagagtgaatcagctgaggagtctccttcagatgacgatggagacctccctggccctgcagatgaaagtaaattcaatgcaggacgtagacttgattttactgttcattctattgaagaaaagaacacgcccacagaactcgtggcggcggatgtgctgacgacggctccaatcgacgacgacgactccaatcagtggcagttggcggcgcgcatacaggagaagcggaggcttccgctgcaggcctttggctgcgctacagtatcacatgcactgtatacggagttagaatttcccaatacgtcccggatacgtatccggaagtatccaaggagtatccgtatccgatacggtatccgacaccggtacgtaacagaacaaccatctgctctcgaaggtggtgaattgagaccatatcagctagaaggtctccaatggatgctttctctatttaacaacaatttgaatggcattctggctgatgaaatgggtttggggaagacaattcaaaccatagctttgatcgcttatctgttggaaaagaaggaggttgcaggaccacacttaataattgctccaaaagcagtattaccaaattggtctaatgaattcaaaacttgggctcccagcattgggacaattctttatgatggccgtccagaggaaaggaggctgttaagggataagaattttgacggagagcaatttaatgttttgctcacacattatgacctgatactgaaagataagaagttcctaaagaaggttcactggcattatttgattgttgatgaaggacatcgtctgaaaaatcatgaatgcgctcttgctcgaacactggtttctgggtaataccgtttattcatatttttactgtcttcaggcttggaatgacatgtatccacttaattatatgatgctctgattgccatgtctttttggcggtggacatattggtctataaccatttgaaataccagccattgaaatatgaagaccttcaatcttcacactcattactactaggtgtcagaacattgttgttagagtggacgcagtaaccagttcaacccaaaagcttaagctgatgggagaaggtagtcaatccacttatacacttcaacactctcactcacgtgcaaccagagagaaagacgcaaatgtggaaataaataggtggagacataaataaagcctttgctaggatttgaactcgaggcctctggcttcgataccatgttaggcgccgttcggttgttacggtttggtgggttggaacgattcctaaccgggttgcttctctaatttatataaactttgattagctggaacgattccgggtgcaatccggcaccaacgaacaagaccttaaagtggacgcataaccagttcaactcaaaagcttaagcagatgggagaagatacatgatccgccggagactacttttaacaggcactcctatccaaaacagcctgcaagagctctggtctttgcttaacttcatcctgcccaatatttttaattcatcccagaattttgaggaatggtttaatgcaccatttgcatgtgatgtcagtcttaatgatgaggaacaactactaatcatacatcgtttgcatcaagttttgcgtccattcttgctgaggaggaagaaagatgaagtagagaaatatctccctgtgaaaacacaagtaattctcaagtgtgacatgtctgcttggcaaaaagcatactacgaacaagtcacaagcagggaaaaggttgcgctaggatatgggatcagaaagaaggctctgcaaaatctgtcaatgcaacttaggaagtgttgcaatcatccctacctattcgtagagcattataacatgtaccagcgggaggaaatagttagagcatccggaaagtttgaattgcttgatcgtctacttccgaaattgcagagagctggtcacagggttttacttttctctcagatgacaaaattgcttgacgttttagaaatatatttgcagatgtacaatttcaagtacatgaggcttgatggatccacaaagactgaagaacgtgggaggttactggcagattttaataagaagaattcagaatatttcatgtttcttctcagcacacgagccggaggtcttggattgaacttgcagactgcagacaccgtcattatctttgatagtgactggaaccctcagatggaccaacaagctgaggaccgtgcccatcgtatagggcaaaagaacgaagtacgtgtgtttgttcttgttagcgttggttcaattgaagaagagatattggatcgtgcgaaacagaagatgggtattgatgcaaaagtaatccaggctgggttgtttaacacgacctccacagcacaggacaggcgagcattgctgcaggagatactcaggagaggaacaagctcactgggaacggatatccccagtgaacgtgagataaaccgcttggctgctcgaaacgatgaagaattccggttgtttgagaagatggatgaagaaaggaggctaaaggagaactacaaatctagacttatggatggaaatgaggtcccagattgggtgtttgccaatgataatgaaaccttacgcaagaaaaccgtggcagatgaattccggaatataattgttggttcaaagagacgtagaaaggaggttgtctattcggactcttttggtgatcagtggatgaaatccgacgagggatttgaagagattgcaaagatgactccaagggtgaagcgaactgcttattcgcctgacattcaagttgagtacaatgaaaggaggaaaaggcccaagtctgtggaaaacagcgcagatggcgcaagcaacccaacacggacacccgacaaaggaagggctggagtttcatcatacagcaaggatgagaccgaagatgatggtgaagacgaagtcatcaccagtggcttacagaagggtaacagtttcacatggaagacccttggaagaaaaaggtcaagccacttaagttcgtcgtcggactcaaaagggcgaccatcattctaatgtcagttgccttgatgcttttgctcgatgaagcccttctaataatggagtacccctggaggctagcagcgctaccatttcgaaagtaccttgaacctataaacttcaggatggaggctgtagctagcaggactaccattttgaaagtacattgaagctataaacttcagaattagtagtatactctggacttgttgccatgaattcgtaactcaaacgaacttaaattgcgttacagttcaagcctattttgggggtaaaggttattggtaaatagctggtgatggcttgccctgaatttgggctgtcttgtctgcacattccgttgagcagtcttcggctaatgcctgtccagattttactggtttatatggcaagcaaaactgtactaggtgctatctgatgtgcttccaccgaggcaagtcctcaaacaagtgtcatcttttattgtgtatagctagtagagttggctctgtgaatctatatgcacttacatagcctgatagacacacgataactacgtaaaaatagctttgtgcaaagataatttctttttgagttttcccctttaattaatcgcgttgaaactacgcgttcaaatttgtgcttccaagtgccaaacggaattcgctgcgactcg

SEQ ID NO: 207670 - DNA, 4116 bp, Zea Mays
gtgcgaaaacgcccatcaaacccctcccaaaacccagcgtaccgttgccgcgcgccgattcgaacccgccggctgggggaggagccgccgacgccgtctcggcccgcgggggcgaagccctagagatgtcggcgtccgtcgacgccgcgtcggcagtagcggtgccggcggtgccccccgcggtggaggaggccggcggcgcggtggagcaggccaggacgctcatcgcagcgctcaacctgctctctcgcaacctaccgctgccccctgatgtcatgcgcgccgtctcgtccatctaccacgacgggggtgccggcgacagggcgggggaggaggagaagggaggggacgaggagatgccggccgcggatggggcggccgaggggaactgctcggtgtacgccgctggcggcgcgaccgaggggaccaccttgattgaagagcttgaagatgcaatattgaagaatcaaagaacgcccataacctactcagaattggcagcaatacgagaagggcggttcaatgcatccattcagcatcgactagctgaacttgaaggattaccttctactaggggtgaagacttgcaaatgaaatgtttgcttgaattgtatgggctaaagttgttagacttacagaagaaagttcggtcagatatcagtgctgagtattggctacaaaagaaatgtgcatatcctgagaggcaactcttcgattgggggatgatgcggatacggcatcctttttccatgtatggaataggagatagcttttcagtggatgttgatgatgttcaccgcagaaagagattcacagagaggatgtcaagacttgaggaggaaggaaaaaatcaggcagatatcaggaagaggaagttctttgcagaaattctcaatgcttctagagaacaccaggtgcaattagggactactttcaaacaaagaaagcagcggaatgatggcgttatggcatggcatgttcgggcacgccaacgtattacacggcaagaaaaaagcagaattaatcttctgaaaactggtgatcaagaagcatatatgaggatggttgaagagagcaagaatgaacgcttgaaaatgctccttgataaaacaaatgagcttcttgaaggaattggaaaagctgtacagcgacaaaaagatgctgaacatgttagtaagccagaaggagggagtgaagtgccaaaagggtcagaatctgaggattgttctcaaatttcgggcatcaagagtgaatcagctgaggagtctccttcagatgacgatggagacctccctggccctgcagatgaaagtaaattcaatgcaggacgtagacttgattttactgttcattctattgaagaaaaggtaacagaacaaccatctgctctcgaaggtggtgaattgagaccatatcagctagaaggtctccaatggatgctttctctatttaacaacaatttgaatggcattctggctgatgaaatgggtttggggaagacaattcaaaccatagctttgatcgcttatctgttggaaaagaaggaggttgcaggaccacacttaataattgctccaaaagcagtattaccaaattggtctaatgaattcaaaacttgggctcccagcattgggacaattctttatgatggccgtccagaggaaaggaggctgttaagggataagaattttgacggagagcaatttaatgttttgctcacacattatgacctgatactgaaagataagaagttcctaaagaaggttcactggcattatttgattgttgatgaaggacatcgtctgaaaaatcatgaatgcgctcttgctcgaacactggtttctggatacatgatccgccggagactacttttaacaggcactcctatccaaaacagcctgcaagagctctggtctttgcttaacttcatcctgcccaatatttttaattcatcccagaattttgaggaatggtttaatgcaccatttgcatgtgatgtcagtcttaatgatgaggaacaactactaatcatacatcgtttgcatcaagttttgcgtccattcttgctgaggaggaagaaagatgaagtagagaaatatctccctgtgaaaacacaagtaattctcaagtgtgacatgtctgcttggcaaaaagcatactacgaacaagtcacaagcagggaaaaggttgcgctaggatatgggatcagaaagaaggctctgcaaaatctgtcaatgcaacttaggaagtgttgcaatcatccctacctattcgtagagcattataacatgtaccagcgggaggaaatagttagagcatccggaaagtttgaattgcttgatcgtctacttccgaaattgcagagagctggtcacagggttttacttttctctcagatgacaaaattgcttgacgttttagaaatatatttgcagatgtacaatttcaagtacatgaggcttgatggatccacaaagactgaagaacgtgggaggttactggcagattttaataagaagaattcagaatatttcatgtttcttctcagcacacgagccggaggtcttggattgaacttgcagactgcagacaccgtcattatctttgatagtgactggaaccctcagatggaccaacaagctgaggaccgtgcccatcgtatagggcaaaagaacgaagtacgtgtgtttgttcttgttagcgttggttcaattgaagaagagatattggatcgtgcgaaacagaagatgggtattgatgcaaaagtaatccaggctgggttgtttaacacgacctccacagcacaggacaggcgagcattgctgcaggagatactcaggagaggaacaagctcactgggaacggatatccccagtgaacgtgagataaaccgcttggctgctcgaaacgatgaagaattccggttgtttgagaagatggatgaagaaaggaggctaaaggagaactacaaatctagacttatggatggaaatgaggtcccagattgggtgtttgccaatgataatgaaaccttacgcaagaaaaccgtggcagatgaattccggaatataattgttggttcaaagagacgtagaaaggaggttgtctattcggactcttttggtgatcagtggatgaaatccgacgagggatttgaagagattgcaaagatgactccaagggtgaagcgaactgcttattcgcctgacattcaagttgagtacaatgaaaggaggaaaaggcccaagtctgtggaaaacagcgcagatggcgcaagcaacccaacacggacacccgacaaaggaagggctggagtttcatcatacagcaaggatgagaccgaagatgatggtgaagacgaagtcatcaccagtggcttacagaagggtaacagtttcacatggaagacccttggaagaaaaaggtcaagccacttaagttcgtcgtcggactcaaaagggcgaccatcattctaatgtcagttgccttgatgcttttgctcgatgaagcccttctaataatggagtacccctggaggctagcagcgctaccatttcgaaagtaccttgaacctataaacttcaggatggaggctgtagctagcaggactaccattttgaaagtacattgaagctataaacttcagaattagtagtatactctggacttgttgccatgaattcgtaactcaaacgaacttaaattgcgttacagttcaagcctattttgggggtaaaggttattggtaaatagctggtgatggcttgccctgaatttgggctgtcttgtctgcacattccgttgagcagtcttcggctaatgcctgtccagattttactggtttatatggcaagcaaaactgtactaggtgctatctgatgtgcttccaccgaggcaagtcctcaaacaagtgtcatcttttattgtgtatagctagtagagttggctctgtgaatctatatgcacttacatagcctgatagacacacgataactacgtaaaaatagctttgtgcaaagataatttctttttgagttttcccctttaattaatcgcgttgaaactacgcgttcaaatttgtgcttccaagtgccaaacggaattcgctgcgactcg

SEQ ID NO: 207671 - DNA, 3732 bp, Zea Mays
ctccgatcgatcgaagcttcggcttccaacacaggccggggaccaccttgattgaagagcttgaagatgcaatattgaagaatcaaagaacgcccataacctactcagaattggcagcaatacgagaagggcggttcaatgcatccattcagcatcgactagctgaacttgaaggattaccttctactaggggtgaagacttgcaaatgaaatgtttgcttgaattgtatgggctaaagttgttagacttacagaagaaagttcggtcagatatcagtgctgagtattggctacaaaagaaatgtgcatatcctgagaggcaactcttcgattgggggatgatgcggatacggcatcctttttccatgtatggaataggagatagcttttcagtggatgttgatgatgttcaccgcagaaagagattcacagagaggatgtcaagacttgaggaggaaggaaaaaatcaggcagatatcaggaagaggaagttctttgcagaaattctcaatgcttctagagaacaccaggtgcaattagggactactttcaaacaaagaaagcagcggaatgatggcgttatggcatggcatgttcgggcacgccaacgtattacacggcaagaaaaaagcagaattaatcttctgaaaactggtgatcaagaagcatatatgaggatggttgaagagagcaagaatgaacgcttgaaaatgctccttgataaaacaaatgagcttcttgaaggaattggaaaagctgtacagcgacaaaaagatgctgaacatgttagtaagccagaaggagggagtgaagtgccaaaagggtcagaatctgaggattgttctcaaatttcgggcatcaagagtgaatcagctgaggagtctccttcagatgacgatggagacctccctggccctgcagatgaaagtaaattcaatgcaggacgtagacttgattttactgttcattctattgaagaaaaggtaacagaacaaccatctgctctcgaaggtggtgaattgagaccatatcagctagaaggtctccaatggatgctttctctatttaacaacaatttgaatggcattctggctgatgaaatgggtttggggaagacaattcaaaccatagctttgatcgcttatctgttggaaaagaaggaggttgcaggaccacacttaataattgctccaaaagcagtattaccaaattggtctaatgaattcaaaacttgggctcccagcattgggacaattctttatgatggccgtccagaggaaaggaggctgttaagggataagaattttgacggagagcaatttaatgttttgctcacacattatgacctgatactgaaagataagaagttcctaaagaaggttcactggcattatttgattgttgatgaaggacatcgtctgaaaaatcatgaatgcgctcttgctcgaacactggtttctggatacatgatccgccggagactacttttaacaggcactcctatccaaaacagcctgcaagagctctggtctttgcttaacttcatcctgcccaatatttttaattcatcccagaattttgaggaatggtttaatgcaccatttgcatgtgatgtcagtcttaatgatgaggaacaactactaatcatacatcgtttgcatcaagttttgcgtccattcttgctgaggaggaagaaagatgaagtagagaaatatctccctgtgaaaacacaagtaattctcaagtgtgacatgtctgcttggcaaaaagcatactacgaacaagtcacaagcagggaaaaggttgcgctaggatatgggatcagaaagaaggctctgcaaaatctgtcaatgcaacttaggaagtgttgcaatcatccctacctattcgtagagcattataacatgtaccagcgggaggaaatagttagagcatccggaaagtttgaattgcttgatcgtctacttccgaaattgcagagagctggtcacagggttttacttttctctcagatgacaaaattgcttgacgttttagaaatatatttgcagatgtacaatttcaagtacatgaggcttgatggatccacaaagactgaagaacgtgggaggttactggcagattttaataagaagaattcagaatatttcatgtttcttctcagcacacgagccggaggtcttggattgaacttgcagactgcagacaccgtcattatctttgatagtgactggaaccctcagatggaccaacaagctgaggaccgtgcccatcgtatagggcaaaagaacgaagtacgtgtgtttgttcttgttagcgttggttcaattgaagaagagatattggatcgtgcgaaacagaagatgggtattgatgcaaaagtaatccaggctgggttgtttaacacgacctccacagcacaggacaggcgagcattgctgcaggagatactcaggagaggaacaagctcactgggaacggatatccccagtgaacgtgagataaaccgcttggctgctcgaaacgatgaagaattccggttgtttgagaagatggatgaagaaaggaggctaaaggagaactacaaatctagacttatggatggaaatgaggtcccagattgggtgtttgccaatgataatgaaaccttacgcaagaaaaccgtggcagatgaattccggaatataattgttggttcaaagagacgtagaaaggaggttgtctattcggactcttttggtgatcagtggatgaaatccgacgagggatttgaagagattgcaaagatgactccaagggtgaagcgaactgcttattcgcctgacattcaagttgagtacaatgaaaggaggaaaaggcccaagtctgtggaaaacagcgcagatggcgcaagcaacccaacacggacacccgacaaaggaagggctggagtttcatcatacagcaaggatgagaccgaagatgatggtgaagacgaagtcatcaccagtggcttacagaagggtaacagtttcacatggaagacccttggaagaaaaaggtcaagccacttaagttcgtcgtcggactcaaaagggcgaccatcattctaatgtcagttgccttgatgcttttgctcgatgaagcccttctaataatggagtacccctggaggctagcagcgctaccatttcgaaagtaccttgaacctataaacttcaggatggaggctgtagctagcaggactaccattttgaaagtacattgaagctataaacttcagaattagtagtatactctggacttgttgccatgaattcgtaactcaaacgaacttaaattgcgttacagttcaagcctattttgggggtaaaggttattggtaaatagctggtgatggcttgccctgaatttgggctgtcttgtctgcacattccgttgagcagtcttcggctaatgcctgtccagattttactggtttatatggcaagcaaaactgtactaggtgctatctgatgtgcttccaccgaggcaagtcctcaaacaagtgtcatcttttattgtgtatagctagtagagttggctctgtgaatctatatgcacttacatagcctgatagacacacgataactacgtaaaaatagctttgtgcaaagataatttctttttgagttttcccctttaattaatcgcgttgaaactacgcgttcaaatttgtgcttccaagtgccaaacggaattcgctgcgactcg

SEQ ID NO: 207672 - DNA, 1660 bp, Zea Mays
gcaccacgaggatagcagtgctatgtcaaaagctccagatgatcatttacaagcaactgagcaggaaggaagtgtccatccaagtcaacaagcagggcaacaacatgtgaatgcagcataccagttctcgaaaacagaactaactgaaggttcaaaaaatgaacagcctgtccaagtagagcaactgagttcccacctacaacaagcatatccagaaattcaactacagcaggctgaaacagatagcttccagttagctgaaaaagaaacagggtattttggtcaacagagttttgcaggcgccaaggtggatgtagcccagccttcagtagttcagcagaatgtaaagcaaactgttggtcaacaagcatcatctggtacccaggatacaaggaaaggaccatcgataccatttaatatgttaattccaatcctacaggcacatcttgacagagacaaagatatgcagcttcaaactgtttgggcaaaacttaggcgtaatgaagtcaacaaagatgatttcttaagagttaccgtgaatattgttggggatcaaatgctcaagcaggcagctcataaagtttttgtacagatgcaagcacagatgcaaagaaatagccaggcaaattcaagtcagcagtctttattctctcaactttctgcacagcagatggcttccagtggttcagcacagttacatgatcagaaaattcggccacctggaccacccaaccaaggccagaaaaaccaggtgtcatcttcacctcaggcttttgcaccaccatcaggtacccaaccgcagaatagtgtacactatcttgctcatgataaccctaaccaaaaccctgatgcaaagggaacaaatgttgtaccaaatcaaccatctagaatgaacacatcagttccattgcaaacaaaggacaaacagcatcaaccaacacagttgcagcaggcctcacaacaaatatatggagcaaataatcctggtgcccaggcttaccctcggtcaatcactggttctcttagatcaccgagtcctgttccagaaacacagccatccatgcatgctcctggaatggctcctgcaaaaatggttcctcctcctactcatccaatgatgcagcacaatgcaactgcatggaaaatgcatcaaaacagggaattgaaaactaacgctccccctccaaatgctaatatgaagcaaaattctgaatctgttggcaaagtgcgcatggctggcacaggaaattcttcagctaaaggaaagcagggaactcctaactctacaccgaatgctagtggaggtacaaagagtagcaagaaatcgggcgggcagaagaaatcattggaagcagcaggctctatgcaaccttcaagcaaaaagcagaagaaatctggagccccccaggaacaaagtatcgatgaactaaatgatgtcacagccgctagtggtgttaatattagggaagaggaagaacagttactgtctgcccctaaggaagagagctttgcttcacaagaagcacgaagaattgcacaggaagaagaaaatattttcctacgtaagggtccacttctgaggaaactagcagaaatcggttagcttctttgaacttgttgccaaaactcaaatcctacaactttagtgggcagtggcaac

SEQ ID NO: 207673 - DNA, 3786 bp, Zea Mays
ccacgagcagtgctatgtcaaaagctccagatgatcatttacaagcaactgagcaggaaggaagtgtccatccaagtcaacaagcagggcaacaacatgtgaatgcagcataccagttctcgaaaacagaactaactgaaggttcaaaaaatgaacagcctgtccaagtagagcaactgagttcccacctacaacaagcatatccagaaattcaactacagcaggctgaaacagatagcttccagttagctgaaaaagaaacagggtattttggtcaacagagttttgcaggcgccaaggtggatgtagcccagccttcagtagttcagcagaatgtaaagcaaactgttggtcaacaagcatcatctggtacccaggatacaaggaaaggaccatcgataccatttaatatgttaattccaatcctacaggcacatcttgacagagacaaagatatgcagcttcaaactgtttgggcaaaacttaggcgtaatgaagtcaacaaagatgatttcttaagagttaccgtgaatattgttggggatcaaatgctcaagcaggcagctcataaagtttttgtacagatgcaagcacagatgcaaagaaatagccaggcaaattcaagtcagcagtctttattctctcaactttctgcacagcagatggcttccagtggttcagcacagttacatgatcagaaaattcggccacctggaccacccaaccaaggccagaaaaaccaggtgtcatcttcacctcaggcttttgcaccaccatcaggtacccaaccgcagaatagtgtacactatcttgctcatgataaccctaaccaaaaccctgatgcaaagggaacaaatgttgtaccaaatcaaccatctagaatgaacacatcagttccattgcaaacaaaggacaaacagcatcaaccaacacagttgcagcaggcctcacaacaaatatatggagcaaataatcctggtgcccaggcttaccctcggtcaatcactggttctcttagatcaccgagtcctgttccagaaacacagccatccatgcatgctcctggaatggctcctgcaaaaatggttcctcctcctactcatccaatgatgcagcacaatgcaactgcatggaaaatgcatcaaaacagggaattgaaaactaacgctccccctccaaatgctaatatgaagcaaaattctgaatctgttggcaaagtgcgcatggctggcacaggaaattcttcagctaaaggaaagcagggaactcctaactctacaccgaatgctagtggaggtacaaagagtagcaagaaatcgggcgggcagaagaaatcattggaagcagcaggctctatgcaaccttcaagcaaaaagcagaagaaatctggagccccccaggaacaaagtatcgatgaactaaatgatgtcacagccgctagtggtgttaatattagggataacaaagagatagatatttgccgggaaatgctggataaaatgggttatccgaagcttgaacttggtctatctgcaatgccgaaggaccaacttgcagacaaccttgcttataacagcttgaagggtcttatccttagcaaggctttgatggctcagaaagatgccgaagatgaaagcactcggatagccttcgaaaacctacgctcggaagttatatcacttcggaatgaggcccttgagaaggacaaaatcttgctttctttagttgagaggttaaagtctagcgacgctagattggctagtctttctgaagtggaacaaaaaatggagaaatttgaaaagaagaaagaagcagatgcgaagcgtattgctgatttagaatatgctctatctattcaagcgagattgcaaagattcgaagtagaaggactggagaagaagcttgatgaaatcactgaaaacttcaatgtcgaacagacagaacgtgagatatctgataccaaacgattgagagttcaaaagaatgtttaaaagcttcgtcaggcgaaggaggaatgctacaaggttgccatgcaatgttgcaacaaactgaagagtacttttgctaaggttggcgcattctctactaaacgagactttatccgtggttatcctgacggagttatcagattgattgaaggcgaggccgaagcttttgatgaaatccttagtgataggggggatttttgtgcctgcatcgacgcccgaggagctatctctctgctcgaaaaagctggctatgagcatgtgaaggctgtaattcagccagaattctcagtttcagcgagtgatgtcaaggatccttcagccgaaggcatcgcctttagtggaaaattttattctgaagtatgggtgaatggtggccgaaaaatggcagatgaggctattagacaaaatgaagaagaatctcgtactgctttataagaagtaaggaaagctgaagaagccgcagaacgtgaaagacttatagccgagctttctccttctccggagccgtacgaccctgaggccgatccagccctgaagggcgctcttgatgtgattaggataacaaatgaggctgttgacgaagctgtgaatagactcttgaacgaagctgctgaaaaaattctgaaggaggatgaacatactttatatatgaaaacacttgtagaatttttgtgtactgctctgttatgtacttgtaataaatttctttgtggagcgtgaaatcttcgtacgtaccgtttttgtgccacatgcgaaaaaatactttcccttttttcacgcttcataaagaaaaatatcccttttcagccgaagtgacattagtagactcgaaggccttgccgtagatcttgcataagaaatacctgttcccgaaaccgtagatctttgcctaagaatatcgttgccgaaggcatggatcttgcatttttgaaacatcctttcataattctttgtcaaaaataaacttaacctcaagagttagccaacatgtttgaaggggcaatttccttttttccaatgttgcggatgatgcgagatgatgaatgatgcgatgctatgcaacatgatgcaatgatatgatgcaacaaatgttaacgcataaatgctttcgtaaaagtaagactctgcatccccttaggaacgactttagagtctcttcaccttttatttaggtgatattttagctctgcatccccgtaggaacaattttgaagttaagctctgcatccctttaggaacgtctttgtagcttcttcatcttttacttaggtggcattttagttccgcatcctcgtagaaacgactttggagctaagctctgcatccccttaagaacgactttgaagattattcaccttttactcaggtggttttttagctctgcatccccgtaggaacgactttggagctaagctctgtattcccttagtaacgactttaaaacttcttcacattttacttatgtggcattttagctttgcatccccgtaagaacgactttggagcttcttcactttttttgttacactcgatggtgtaactcaatatttattacaacaggctgaaggttgtaccttctcaaattgtcttttaggtagagaaataaaaccaagagaaataaaaattacattgaatgtgtatgaaagttttttgattgagcccctctgtcgcttcagtaaatatgtcttgattctggtatagtgttgttgactgtccgagcttcagactcttcacgtgcgtcgcattgttgctggatttgacggtgcccttctggttgttgattgcgagacgaagttgg

SEQ ID NO: 207674 - DNA, 4044 bp, Zea Mays
aatttgcccgactactccagccgcttctgcgccttttcttctaccgtacacccccggtggtctctgtgtcaagtctcaactctcaagtggacagggcgaccgccgaccccgacgcctacactacaccctacccttctacaggccggcgaactcaagtctcaagtgcggcagggcgaccgccgacgcgggcactctacgcaagccttcttctctagggcgtcgtttgccggcgacgagcaccacgaggtactttgtgctaggatagcagtgctatgtcaaaagctccagatgatcatttacaagcaactgagcaggaaggaagtgtccatccaagtcaacaagcagggcaacaacatgtgaatgcagcataccagttctcgaaaacagaactaactgaaggttcaaaaaatgaacagcctgtccaagtagagcaactgagttcccacctacaacaagcatatccagaaattcaactacagcaggctgaaacagatagcttccagttagctgaaaaagaaacagggtattttggtcaacagagttttgcaggcgccaaggtggatgtagcccagccttcagtagttcagcagaatgtaaagcaaactgttggtcaacaagcatcatctggtacccaggatacaaggaaaggaccatcgataccatttaatatgttaattccaatcctacaggcacatcttgacagagacaaagatatgcagcttcaaactgtttgggcaaaacttaggcgtaatgaagtcaacaaagatgatttcttaagagttaccgtgaatattgttggggatcaaatgctcaagcaggcagctcataaagtttttgtacagatgcaagcacagatgcaaagaaatagccaggcaaattcaagtcagcagtctttattctctcaactttctgcacagcagatggcttccagtggttcagcacagttacatgatcagaaaattcggccacctggaccacccaaccaaggccagaaaaaccaggtgtcatcttcacctcaggcttttgcaccaccatcaggtacccaaccgcagaatagtgtacactatcttgctcatgataaccctaaccaaaaccctgatgcaaagggaacaaatgttgtaccaaatcaaccatctagaatgaacacatcagttccattgcaaacaaaggacaaacagcatcaaccaacacagttgcagcaggcctcacaacaaatatatggagcaaataatcctggtgcccaggcttaccctcggtcaatcactggttctcttagatcaccgagtcctgttccagaaacacagccatccatgcatgctcctggaatggctcctgcaaaaatggttcctcctcctactcatccaatgatgcagcacaatgcaactgcatggaaaatgcatcaaaacagggaattgaaaactaacgctccccctccaaatgctaatatgaagcaaaattctgaatctgttggcaaagtgcgcatggctggcacaggaaattcttcagctaaaggaaagcagggaactcctaactctacaccgaatgctagtggaggtacaaagagtagcaagaaatcgggcgggcagaagaaatcattggaagcagcaggctctatgcaaccttcaagcaaaaagcagaagaaatctggagccccccaggaacaaagtatcgatgaactaaatgatgtcacagccgctagtggtgttaatattagggataacaaagagatagatatttgccgggaaatgctggataaaatgggttatccgaagcttgaacttggtctatctgcaatgccgaaggaccaacttgcagacaaccttgcttataacagcttgaagggtcttatccttagcaaggctttgatggctcagaaagatgccgaagatgaaagcactcggatagccttcgaaaacctacgctcggaagttatatcacttcggaatgaggcccttgagaaggacaaaatcttgctttctttagttgagaggttaaagtctagcgacgctagattggctagtctttctgaagtggaacaaaaaatggagaaatttgaaaagaagaaagaagcagatgcgaagcgtattgctgatttagaatatgctctatctattcaagcgagattgcaaagattcgaagtagaaggactggagaagaagcttgatgaaatcactgaaaacttcaatgtcgaacagacagaacgtgagatatctgataccaaacgattgagagttcaaaagaatgtttaaaagcttcgtcaggcgaaggaggaatgctacaaggttgccatgcaatgttgcaacaaactgaagagtacttttgctaaggttggcgcattctctactaaacgagactttatccgtggttatcctgacggagttatcagattgattgaaggcgaggccgaagcttttgatgaaatccttagtgataggggggatttttgtgcctgcatcgacgcccgaggagctatctctctgctcgaaaaagctggctatgagcatgtgaaggctgtaattcagccagaattctcagtttcagcgagtgatgtcaaggatccttcagccgaaggcatcgcctttagtggaaaattttattctgaagtatgggtgaatggtggccgaaaaatggcagatgaggctattagacaaaatgaagaagaatctcgtactgctttataagaagtaaggaaagctgaagaagccgcagaacgtgaaagacttatagccgagctttctccttctccggagccgtacgaccctgaggccgatccagccctgaagggcgctcttgatgtgattaggataacaaatgaggctgttgacgaagctgtgaatagactcttgaacgaagctgctgaaaaaattctgaaggaggatgaacatactttatatatgaaaacacttgtagaatttttgtgtactgctctgttatgtacttgtaataaatttctttgtggagcgtgaaatcttcgtacgtaccgtttttgtgccacatgcgaaaaaatactttcccttttttcacgcttcataaagaaaaatatcccttttcagccgaagtgacattagtagactcgaaggccttgccgtagatcttgcataagaaatacctgttcccgaaaccgtagatctttgcctaagaatatcgttgccgaaggcatggatcttgcatttttgaaacatcctttcataattctttgtcaaaaataaacttaacctcaagagttagccaacatgtttgaaggggcaatttccttttttccaatgttgcggatgatgcgagatgatgaatgatgcgatgctatgcaacatgatgcaatgatatgatgcaacaaatgttaacgcataaatgctttcgtaaaagtaagactctgcatccccttaggaacgactttagagtctcttcaccttttatttaggtgatattttagctctgcatccccgtaggaacaattttgaagttaagctctgcatccctttaggaacgtctttgtagcttcttcatcttttacttaggtggcattttagttccgcatcctcgtagaaacgactttggagctaagctctgcatccccttaagaacgactttgaagattattcaccttttactcaggtggttttttagctctgcatccccgtaggaacgactttggagctaagctctgtattcccttagtaacgactttaaaacttcttcacattttacttatgtggcattttagctttgcatccccgtaagaacgactttggagcttcttcactttttttgttacactcgatggtgtaactcaatatttattacaacaggctgaaggttgtaccttctcaaattgtcttttaggtagagaaataaaaccaagagaaataaaaattacattgaatgtgtatgaaagttttttgattgagcccctctgtcgcttcagtaaatatgtcttgattctggtatagtgttgttgactgtccgagcttcagactcttcacgtgcgtcgcattgttgctggatttgacggtgcccttctggttgttgattgcgagacgaagttgg

SEQ ID NO: 207675 - DNA, 1625 bp, Zea Mays
cccgggaatccggaaggttcgcgcgagagctcgagctccccgtctctgcaccagacaccagtgcaccaccaaatccgagccgaatcttctcgaccccgctcctcccccgccctccgacccagcgccattttcacgatcctaaggtccttgcccgaccaaacgacccgtgacctccgccacagctgctgcagagctaaccaatggacgtgctgaagcgcgagctgcagcgcaagcgccagctcctcaacgccgatttcggcggccgcaagatcatccgccgcgccgaaatcgaggcacgcgagctccagcgcatccgcgaggtcgagcgccagctcctcctccaaaagcagcacaggcattcccgcccgctgtcctccccctccagttcctcctcaagctcctcgcccacctccgcagccgctgacgccgacgccgacgcgtcgcgggcagagagcggctccaaggagtcgctcccgagggaggaggtcatccggcgcctgcgcgtgctgcggcagccggccacgctcttcggcgaggatgacatcgcgcgcctccgccgcctccaggtcctgatcgaggactccggcgcgctcgccgacatcgacgcggcggagatcggggagggccagaccaacgacttcctccgcgacatccaggcgatgcgtgctaaagctgcgactgtcacgaagcccaaggcggccggcgcggaggccgagcgtggggagggcgacagcgtatcgatagatgtgccgttcgaggagctctgcgacgaggacaagatcactgcgttcttcaggagactgttggacgagtggacccaggaggtggacggtatgcctgaggcggaacggaggacggcaaaagggaaggccgcgatagccacctgcaagcagtgcacgcgatacctcgaccctctgttcaagcagtgcaagaagaaggctctcccttctgatgtccgacaagcattgctggaggtggtcaggtgctgtaggagacgagactacttggctgcagtggacaactatatcaagctagcgataggtaactcgccctggccaattggtgtgaccatggttggtattcatgagcgatcggctcgcgaaaagatctacacgaacagcgtggctcacatcatgaatgatgagacgaccagaaagtacctgcagtctgtgaagaggctcataacattctgccagaggaagtaccccactgatccatcaaggtcggtagagttcaacagcctggcaaatggtagcgatctgcagtctctcctggcgcagcaaaacgcgaagaattcagaagaaacgcttcggttagtggcagcgtcatgaaaggttggattatatctgtcagcggaattctaggaacctaatttaactggagcacagcatactgatactgtttgtggacatggtgacggttcacgaaatgtaactgttgagcaccatattgagcgggcggacggtccggcctgtccgcggtccggacagtccgtgcctgtgggccggacggtccgcgcatgcgcagagcagtttagggttccgagttttgtgctatgtttgttggctagatttgcggaattaatctggaatccagtcatgtaaagggtccagcccccctcctct

SEQ ID NO: 207676 - DNA, 1737 bp, Zea Mays
cgggaatccggaaggttcgcgcgagagctcgagctccccgtctctgcaccagacaccagtgcaccaccaaatccgagccgaatcttctcgaccccgctcctcccccgccctccgacccagcgccattttcacgatcctaaggtccttgcccgaccaaacgacccgtgacctccgccacagctgctgcagagctaaccaatggacgtgctgaagcgcgagctgcagcgcaagcgccagctcctcaacgccgatttcggcggccgcaagatcatccgccgcgccgaaatcgaggcacgcgagctccagcgcatccgcgaggtcgagcgccagctcctcctccaaaagcagcacaggcattcccgcccgctgtcctccccctccagttcctcctcaagctcctcgcccacctccgcagccgctgacgccgacgccgacgcgtcgcgggcagagagcggctccaaggagtcgctcccgagggaggaggtcatccggcgcctgcgcgtgctgcggcagccggccacgctcttcggcgaggatgacatcgcgcgcctccgccgcctccaggtcctgatcgaggactccggcgcgctcgccgacatcgacgcggcggagatcggggagggccagaccaacgacttcctccgcgacatccaggcgatgcgtgctaaagctgcgactgtcacgaagcccaaggcggccggcgcggaggccgagcgtggggagggcgacagcgtatcgatagatgtgccgttcgaggagctctgcgacgaggacaagatcactgcgttcttcaggagactgttggacgagtggacccaggaggtggacggtatgcctgaggcggaacggaggacggcaaaagggaaggccgcgatagccacctgcaagcagtgcacgcgatacctcgaccctctgttcaagcagtgcaagaagaaggtatggctctcccttctgatgtccgacaagcattgctggaggtggtcaggtgctgtaggagacgagactacttggctgcagtggacaactatatcaagctagcgataggtaactcgccctggccaattggtgtgaccatggttggtattcatgagcgatcggctcgcgaaaagatctacacgaacagcgtggctcacatcatgaatgatgagacgaccagaaagtacctgcagtctgtgaagaggctcataacattctgccagaggaagtaccccactgatccatcaaggtcggtagagttcaacagcctggcaaatggtagcgatctgcagtctctcctggcgcagcaaaacgcgaagaattcagaagaaacgcttcggttagtggcagcgtcatgaaaggttggattatatctgtcagcggaattctaggcaagttcgattcttgtgtgatttatttgtgatacgaattagtacttgtaagaacctgaattgtatgttcggtcgttactcgttactgccttactgaaccgtggaacaggaacctaatttaactggagcacagcatactgatactgtttgtggacatggtgacggttcacgaaatgtaactgttgagcaccatattgagcgggcggacggtccggcctgtccgcggtccggacagtccgtgcctgtgggccggacggtccgcgcatgcgcagagcagtttagggttccgagttttgtgctatgtttgttggctagatttgcggaattaatctggaatccagtcatgtaaagggtccagcccccctcctct

SEQ ID NO: 207677 - DNA, 1738 bp, Zea Mays
cgggaatccggaaggttcgcgcgagagctcgagctccccgtctctgcaccagacaccagtgcaccaccaaatccgagccgaatcttctcgaccccgctcctcccccgccctccgacccagcgccattttcacgatcctaaggtccttgcccgaccaaacgacccgtgacctccgccacagctgctgcagagctaaccaatggacgtgctgaagcgcgagctgcagcgcaagcgccagctcctcaacgccgatttcggcggccgcaagatcatccgccgcgccgaaatcgaggcacgcgagctccagcgcatccgcgaggtcgagcgccagctcctcctccaaaagcagcacaggcattcccgcccgctgtcctccccctccagttcctcctcaagctcctcgcccacctccgcagccgctgacgccgacgccgacgcgtcgcgggcagagagcggctccaaggagtcgctcccgagggaggaggtcatccggcgcctgcgcgtgctgcggcagccggccacgctcttcggcgaggatgacatcgcgcgcctccgccgcctccaggtcctgatcgaggactccggcgcgctcgccgacatcgacgcggcggagatcggggagggccagaccaacgacttcctccgcgacatccaggcgatgcgtgctaaagctgcgactgtcacgaagcccaaggcggccggcgcggaggccgagcgtggggagggcgacagcgtatcgatagatgtgccgttcgaggagctctgcgacgaggacaagatcactgcgttcttcaggagactgttggacgagtggacccaggaggtggacggtatgcctgaggcggaacggaggacggcaaaagggaaggccgcgatagccacctgcaagcagtgcacgcgatacctcgaccctctgttcaagcagtgcaagaagaagagtatggctctcccttctgatgtccgacaagcattgctggaggtggtcaggtgctgtaggagacgagactacttggctgcagtggacaactatatcaagctagcgataggtaactcgccctggccaattggtgtgaccatggttggtattcatgagcgatcggctcgcgaaaagatctacacgaacagcgtggctcacatcatgaatgatgagacgaccagaaagtacctgcagtctgtgaagaggctcataacattctgccagaggaagtaccccactgatccatcaaggtcggtagagttcaacagcctggcaaatggtagcgatctgcagtctctcctggcgcagcaaaacgcgaagaattcagaagaaacgcttcggttagtggcagcgtcatgaaaggttggattatatctgtcagcggaattctaggcaagttcgattcttgtgtgatttatttgtgatacgaattagtacttgtaagaacctgaattgtatgttcggtcgttactcgttactgccttactgaaccgtggaacaggaacctaatttaactggagcacagcatactgatactgtttgtggacatggtgacggttcacgaaatgtaactgttgagcaccatattgagcgggcggacggtccggcctgtccgcggtccggacagtccgtgcctgtgggccggacggtccgcgcatgcgcagagcagtttagggttccgagttttgtgctatgtttgttggctagatttgcggaattaatctggaatccagtcatgtaaagggtccagcccccctcctct

SEQ ID NO: 207678 - DNA, 741 bp, Zea Mays
atcctaaatgcacaaacacaaccatcgacgatcagattacaacttgtgttctaagctctcccttctgatgtccgacaagcattgctggaggtggtcaggtgctgtaggagacgagactacttggctgcagtggacaactatatcaagctagcgataggtaactcgccctggccaattggtgtgaccatggttggtattcatgagcgatcggctcgcgaaaagatctacacgaacagcgtggctcacatcatgaatgatgagacgaccagaaagtacctgcagtctgtgaagaggctcataacattctgccagaggaagtaccccactgatccatcaaggtcggtagagttcaacagcctggcaaatggtagcgatctgcagtctctcctggcgcagcaaaacgcgaagaattcagaagaaacgcttcggttagtggcagcgtcatgaaaggttggattatatctgtcagcggaattctaggaacctaatttaactggagcacagcatactgatactgtttgtggacatggtgacggttcacgaaatgtaactgttgagcaccatattgagcgggcggacggtccggcctgtccgcggtccggacagtccgtgcctgtgggccggacggtccgcgcatgcgcagagcagtttagggttccgagttttgtgctatgtttgttggctagatttgcggaattaatctggaatccagtcatgtaaagggtccagcccccctcctct

SEQ ID NO: 207679 - DNA, 1384 bp, Zea Mays
ggaaaaccaccgcggtagctggtacaagaagctgctggtggcatggaagaaagcccggccgcctccgaagacgcccgaggaagccgcggccttcgttgtgcagacgctcaagaaccatcagaaagcagatgtggagggcctgttgtctttctacggcctgccgcatccgaacgcggcggcagcagcagcaggcgcgcccgccgctcgcccgccgcccaagaaggcccagcagggcgccaagttcgagctgcacacgctccccattgaccccaagtctgtggccgacggcgacacggtgaacgtgtacgtcgacgcggcggacccgcgggaggccggcagcgtgccccgcgaggtgcagaaggctgcggcggagcgggccagggcgcgggctgccaaggactaccagaaggccgacgcgctgcagaaggtcatagtcgacgcagggtacaggccggttcctaacgcgagaggcgaggaggtgctggcgaagaagtacaggatcaggctgagggggatcgatgcgcccgagagcgcgatgccgtatggcaaggaagccaaggaggcgctgctcaaacttgtccaggggaagagcttgaaggtctacgtgtacgacgaggaccggtacggtagatgcgtcggagacatctactgcgacggggtatttgtgcaggagcaaatgctgaagaagggtttcgcgtggcactacaccgcctacgatcaacgcccggagctggccaaggttagactagcgctcgtttgacgccacacagatatgccaatcacttgactggacaaaagagaaaaaacaccgtacaccttacgaactataccctggcctgaaataagggtccaatgcattgtatgatatctgaaatagaaatgcccttcttctttaaccaacagtgggagaaacaagcgcagaccggccggaagggcctgtgggcggcgtcgaagccacagaaaccatgggagtggaggaaggacaagcgcaacgggacagcatgaacaaacccccccgtgcatggttcagtgtgtgtgtgtccatgaacacctgatacattgatgtacctgcagacttttaggacggtatgtgtcggggattcagtagcggtgcagtatggttgtgtgtacactgtaatagacgattccttacagttacagggatgtgaagcaggacaagagagattggcgtgatccctaatttcgtatggggattcgtcgtgcaactgtatcaaatgcattgtaccatcatttacacccatgtgacctgtcatcatttacactcatgtgacctgttgtgaaggagagtagctgagattgtgacctgtgttgtatgcaaagcaaatgttgatggtgggagcagttccacgtagccgaaccaagt

SEQ ID NO: 207680 - DNA, 2012 bp, Zea Mays
aagttttcccgtccacgcacacggcatacggcacacaaagcgagtagagacatctcaatgacactgggtcaccgatccctgatctccggggcctcgtcgtcaaccacagcagccggcagcgcgtgcacgcagcgagggtagcgccacacatgccactgacactgggctcaacaaagtgacggatccgcaacccagtgggacgtcacctccctgcacgggcccactctgttccagcttccgtgtgtacacagtacaccacagcacacgggcctactcaccctcgcctccgaggcttcgagtccgagagagcgcttgagaagaagctcaggcgaggcgaggcaagggatgccgtgattgacgacggaaacgaagccgagagggagaagcgaagctagccttgcatacacccggccccgtcccaatgcccaccgcttccggctcggatcccaaaccctaaccctactcggccgtccgcgggcccgccgccggcgacgcgatcgggtgccgacgctgatgcgctctgtgccgcgtgcgtgattctctcgcgcaagtaagcgttggaaaaggggctccctggctgcagcgacgcgtggccgaggtgcggatcggggaggggaggacggtcggagcgagatgccgggggacgtcgcgacctcgccggcgccggcgccgccgtccgtgtcctcgtcgtcgcagaaccaccaccatcacggccccacgaccgcccgcggcctcctctgccacgctgtcgccggcgcctccgctggcgtggtggcggcgaccttcgtgtgcccgctcgatgtcatcaagaccaggttccaggtacacggatggcccaagcttaccacaggcacaattggagtgtaattattgggagtttacagcagattgctcaacgggaaggttttcggggcatgtaccgtggcctctccccaactgttctagcgctcttgcctaactgggcggtctactttactgtgtatgagcagcttaaaagcttactttcttccaatgatggaagtcatcaactttctttaggggcaaatgttgttgctgcatcatgtgctggtgctgcaacaactactgtaacaaatccactttgggttgttaagacaagatttcagactcaaggaataagagccgggccaatgccatataaaggtacacttgctgccttgcgaagaatagcacatgaagaaggcatccgaggactatacagtggtctggtccctgccttggctggtatcagtcatgttgctattcagtttccctgcatacgagaagataaaagcttatctggctgagcgagataatactactgtagaagcattgagttttggtgatgttgctgttgcgtcgtctctggctaaagtagctgcatcaacattgacatatcctcatgaggttgttcggtcaaggctgcaagaccagcgagcgcactctgatgctagatacaagggtgtagtagactgcatcagaaaggtttatcataaagagggtgtggctggcttctacagtggatgcgccacaaatctattgcggacgacccctgccgcagtgataacattcactagcttcgagatgatccacaggttccttcttgatctattccctgctgaatctgaaccgcacatccaacctctcaagcattgatcatacaacatttgtaccctatccatgctgccattcgagtttaggaccccagcaaccatccagcaatgttgtttactgtgccagatggctgttgtaaaagagagaattgtttttttcccggatatgcaacagtaattcggaagttcaaacaatagtgttggctgagcattagcaacttgtatgtaatagatttgttagcatgcatttgcgggaggtatattgggtatgttttcttgatgatgatgaaaagaaaacaatcttaccacatatgaaagaatgattgctatatttttttcccacacctatgagctgtgaatccttgattctcatgcctacaatatcttgtggtaatttgctgg

SEQ ID NO: 207681 - DNA, 3354 bp, Zea Mays
tctgcgacgcgttggcccatccctgctccccgccatggtctctcgcccaccgaggtatgttcgaggagcaaataagatgaggagccagttttcttcttccgttcttctctcgcattagccaaggaaggcaccgtagaaagatccccaaagctttccagaaatccgctttcacgatcaagttctcgtggcaggggaattccaagcggaaaaggggggaattctggaataaaaggtggctcggtcttaactgttgaggtttcagttgggaggaactacgaagacacctcatcactagttcatggttgcttatacagtgctcttataatttccataaggggcatacatgttatcatcttaggctcttagccatagtatgatagcagcccacatccctgtaagaattatgtggtgtaactctttgtgaagcaagttaaagtccacatcccttggtttttacagtgctgtggatgatcatcttctctgaggagtggcaatcgactaattggatcgtaaagagagtcaagatggcctgagtttggtttactgttcgctattaagcttagtggtctggtgtcttccatactttcgctgattaacattatttctgcaccatgaatagtgtgcatagtatagaatctctggctgctggggatgctcaacataaacttttccaaacccttggaccaacgctcttgatttcgatggcatatattgaccttggaaagtggttggtagcagtggatgctggatctcggttcggctatgatcttgtgctactggtgctgttcttcaatttctcagccattttattccaatatctgtcaacgtgtatcggcatggtcactgggaagaatcttgcagagatctgctgcctggaatacagtaaggtgatatgtgttgttcttggtctccaggcatggctatccttattgacctctgaattgacaatgattgcaggcatggcagtggggttcaaccttgtgtttgaacatgacaatcttatcacagccatatgttttgcaagtgttgttgttaatctactaccatacacactctcccgactggataaggtggctgggatatgtaatgcctgtatagctggatttacacttctttgttttgtgcttggtttattaatcagtcacccacataccccagtcaatatgaatgcgatgtttcccaagttgagtggtgaaagcgcttattcactgatggcacttcttggcgcaaatataatagtacacaacttttatacgcattcggcatttgttcaggtccagagaagatcatctcatacccttggttccctgtttcatgaccaccttttctctatattatttatatttactgggatttaccttgtgaattatattctcctgagttcagccgcagatgaatccagtgagacagtggtcatgaactttcaagatgctacagagctaatgcaccagatattcacaaatcctgcaggaccaattgtgctattagtgatccttctcttttcaagccatatcatctcattgacatgcattgttagtggtgaagtaatttcagagaacttctttggtgttaaactgccgctttcggcacatcatctgctacctaagggtctggccatggttcttaatatctattttgcgaaggttgctggtcctgaagggatatatcagttacttattatgtgcccagttatccaggctatgcttcttccttcatcgattatacccattttacgtgtttcctcgtcaagattattgatgggaagatacaggatagctttatgtattgaaatctttgccttcctcgcattccttcttgtggtgttcacaaatataattttcacagcagaaattatgtttggtactagcacttggacaaacaacctgaaaggagatactggaagccctgctatacttccatattctgttgtagtcctaatttcatgtgcatcgattggatttacactgttacttgctgttactccactaaaatcagcaagtaatgaagctcagactcatttatcgtccatgcactcacaaagaggagctttaggcactactcagagagaagcaacatctctgaaaaaatttgagcatgaagaagttcagagctgttctgttggagctgttcttatgggttcatcggaaggtcataagaagtcagtccatctgcggagaactttatctggataattgtgcagatgaagaaattaaggggtcctctgttgatgctgttccaagggattcattggagggtcttcagaagtcaacttttgagattaagtatgattcggacgcctctgatggtggcgccgagcaatttgtggatagattgaagctgaaccatcaccatctataaccaatgaggagccaaaatcagttgtgtagtggatgcaaccagttccagaggtttgtgctatcatcgtaccagtaccataccatagtgtttcagaaaatttcgagatgaagccctcaaatgaaaaaggtggttaaacaagaaggtgaaggtaactcagatgaaggggaaatagatgagctcttaactagacattcaacctgttgatgcccttcctgttatagtgtgttcctatattatccatgtatgtggttgccgctccattaggattagggtttccataggtgtatatatgtaaccattctctattggattagggtttccataggtgtatatatgtaaccattctctatgcaatggaagtgtaatctcaatctgttacatggtataagagctaggtcttctctggcgcccccgcctccctgccccagatctggcgccctcgcctccttgcctctgttgtggtgcctcatgcacacacgtttgcctagccgcggcagagagcacgggcgccgtgcaagcgccgtcgctgttgcgggctagccatgcgagcgtgcgagtgtcgctgtgggccagccacacgtacaggcacgaccatcaccccttgcctggccccttcaagcttcacctgtcgtcgacgtcgctccttcgcctggctagatccggcgtagccccctgcttggatgaaccgcccagccgccctcccattctcttcatcgccgtcacaaccggattcaacgctatcgcgaccttcacggtcgggttcaccgtcttcctggttggatctggcgcggccttctcgtgtggatccatcgtcgcctcctctgttccacgtcgtcggctcccctggccagaatccgacatggcccctccagcgggagcggccaccctgatcgacgcaaacgtgcgcgctgccgtcggcctttctggtggggcttctggatgaccggtcaagggaaaaagcaaacgaccgaccccttcgaagagcaaggttgctgc

SEQ ID NO: 207682 - DNA, 4204 bp, Zea Mays
tctgcgacgcgttggcccatccctgctccccgccatggtctctcgcccaccgaggtatgttcgaggagcaaataagatgaggagccagttttcttcttccgttcttctctcgcattagccaaggaaggcaccgtagaaagatccccaaagctttccagaaatccgctttcacgatcagtagggctcgcagtttttttttctttcctacagcgcatttctcggtcttcacctcgctcctgttgtagagttctcgtggcaggggaattccaagcggaaaaggggggaattctggaataaaaggtggctcggtcttaactgttgaggtttcagttgggaggaactacgaagacacctcatcactagttcatgtgctgtggatgatcatcttctctgaggagtggcaatcgactaattggatcgtaaagagagtcaagatggcctgagtttggtttactgttcgctattaagcttagtggtctggtgtcttccatactttcgctgattaacattatttctgcaccatgaatagtgtgcatagtatagaatctctggctgctggggatgctcaacataaacttttccaaacccttggaccaacgctcttgatttcgatggcatatattgaccttggaaagtggttggtagcagtggatgctggatctcggttcggctatgatcttgtgctactggtgctgttcttcaatttctcagccattttattccaatatctgtcaacgtgtatcggcatggtcactgggaagaatcttgcagaggtacgatttactgtgatctttcttgttcttgccgttgcagagataattcgtggaactcttgccagtcaatacaaccactgtgcagagatctcactaattttagttgacatagtagtgcttagcataaccttgaaaatgttgcgtttcttatgcaattcataacaatgatttggcatctcatctatggtctatggacctggcacttatctttgagtagacaagggcaggcttggattctcaagttctgaatgtttgtctcagaatctaaaaagaagcgtatccctttctgagtgaaatataatgtaacttagttactctgtgcctgtatttacttcttactgttaagattatttctgggttgctggtgaggactttaaaatatacagtattttctcacaataacctcggtttcatggatataatgacagtacagataataggaaactaaggtatcatttgtctcttatctttcaacaagcaaacatgcatgtgtattgcattatccgttccaatacatcttggaatcagactctatacttcgttggacatgccctattttaactcagttactcacatgttgtgagttcgggtcaaggacgagacagtaaactaatttggattcttattctaattcatcacaacagtaaaccaattaggattcgtatctctaattcattacgtactgctactctcagtaaaaccggttaggaattatgcttggggagtggagggacagacggaccggggcatgaatgaaaattacttcttttagtattagatgcaaataagaaacaaggagaactgccaacaataaactttatagcttggagtttaagttctatcaatttagtgttcttttcattctaaagccttttaaactgtttcctgtgtagtcttttggagatatcaaccttattctgtacttctacatgactgatagatctgctgcctggaatacagtaaggtgatatgtgttgttcttggtctccaggcatggctatccttattgacctctgaattgacaatgattgcaggcatggcagtggggttcaaccttgtgtttgaacatgacaatcttatcacagccatatgttttgcaagtgttgttgttaatctactaccatacacactctcccgactggataaggtggctgggatatgtaatgcctgtatagctggatttacacttctttgttttgtgcttggtttattaatcagtcacccacataccccagtcaatatgaatgcgatgtttcccaagttgagtggtgaaagcgcttattcactgatggcacttcttggcgcaaatataatagtacacaacttttatacgcattcggcatttgttcaggtccagagaagatcatctcatacccttggttccctgtttcatgaccaccttttctctatattatttatatttactgggatttaccttgtgaattatattctcctgagttcagccgcagatgaatccagtgagacagtggtcatgaactttcaagatgctacagagctaatgcaccagatattcacaaatcctgcaggaccaattgtgctattagtgatccttctcttttcaagccatatcatctcattgacatgcattgttagtggtgaagtaatttcagagaacttctttggtgttaaactgccgctttcggcacatcatctgctacctaagggtctggccatggttcttaatatctattttgcgaaggttgctggtcctgaagggatatatcagttacttattatgtgcccagttatccaggctatgcttcttccttcatcgattatacccattttacgtgtttcctcgtcaagattattgatgggaagatacaggatagctttatgtattgaaatctttgccttcctcgcattccttcttgtggtgttcacaaatataattttcacagcagaaattatgtttggtactagcacttggacaaacaacctgaaaggagatactggaagccctgctatacttccatattctgttgtagtcctaatttcatgtgcatcgattggatttacactgttacttgctgttactccactaaaatcagcaagtaatgaagctcagactcatttatcgtccatgcactcacaaagaggagctttaggcactactcagagagaagcaacatctctgaaaaaatttgagcatgaagaagttcagagctgttctgttggagctgttcttatgggttcatcggaaggtcataagaagtcagtccatctgcggagaactttatctggataattgtgcagatgaagaaattaaggggtcctctgttgatgctgttccaagggattcattggagggtcttcagaagtcaacttttgagattaagtatgattcggacgcctctgatggtggcgccgagcaatttgtggatagattgaagctgaaccatcaccatctataaccaatgaggagccaaaatcagttgtgtagtggatgcaaccagttccagaggtttgtgctatcatcgtaccagtaccataccatagtgtttcagaaaatttcgagatgaagccctcaaatgaaaaaggtggttaaacaagaaggtgaaggtaactcagatgaaggggaaatagatgagctcttaactagacattcaacctgttgatgcccttcctgttatagtgtgttcctatattatccatgtatgtggttgccgctccattaggattagggtttccataggtgtatatatgtaaccattctctattggattagggtttccataggtgtatatatgtaaccattctctatgcaatggaagtgtaatctcaatctgttacatggtataagagctaggtcttctctggcgcccccgcctccctgccccagatctggcgccctcgcctccttgcctctgttgtggtgcctcatgcacacacgtttgcctagccgcggcagagagcacgggcgccgtgcaagcgccgtcgctgttgcgggctagccatgcgagcgtgcgagtgtcgctgtgggccagccacacgtacaggcacgaccatcaccccttgcctggccccttcaagcttcacctgtcgtcgacgtcgctccttcgcctggctagatccggcgtagccccctgcttggatgaaccgcccagccgccctcccattctcttcatcgccgtcacaaccggattcaacgctatcgcgaccttcacggtcgggttcaccgtcttcctggttggatctggcgcggccttctcgtgtggatccatcgtcgcctcctctgttccacgtcgtcggctcccctggccagaatccgacatggcccctccagcgggagcggccaccctgatcgacgcaaacgtgcgcgctgccgtcggcctttctggtggggcttctggatgaccggtcaagggaaaaagcaaacgaccgaccccttcgaagagcaaggttgctgc

SEQ ID NO: 207683 - DNA, 3022 bp, Zea Mays
tctgcgacgcgttggcccatccctgctccccgccatggtctctcgcccaccgagagttctcgtggcaggggaattccaagcggaaaaggggggaattctggaataaaaggtggctcggtcttaactgttgaggtttcagttgggaggaactacgaagacacctcatcactagttcatgtgctgtggatgatcatcttctctgaggagtggcaatcgactaattggatcgtaaagagagtcaagatggcctgagtttggtttactgttcgctattaagcttagtggtctggtgtcttccatactttcgctgattaacattatttctgcaccatgaatagtgtgcatagtatagaatctctggctgctggggatgctcaacataaacttttccaaacccttggaccaacgctcttgatttcgatggcatatattgaccttggaaagtggttggtagcagtggatgctggatctcggttcggctatgatcttgtgctactggtgctgttcttcaatttctcagccattttattccaatatctgtcaacgtgtatcggcatggtcactgggaagaatcttgcagaggcatggctatccttattgacctctgaattgacaatgattgcaggcatggcagtggggttcaaccttgtgtttgaacatgacaatcttatcacagccatatgttttgcaagtgttgttgttaatctactaccatacacactctcccgactggataaggtggctgggatatgtaatgcctgtatagctggatttacacttctttgttttgtgcttggtttattaatcagtcacccacataccccagtcaatatgaatgcgatgtttcccaagttgagtggtgaaagcgcttattcactgatggcacttcttggcgcaaatataatagtacacaacttttatacgcattcggcatttgttcaggtccagagaagatcatctcatacccttggttccctgtttcatgaccaccttttctctatattatttatatttactgggatttaccttgtgaattatattctcctgagttcagccgcagatgaatccagtgagacagtggtcatgaactttcaagatgctacagagctaatgcaccagatattcacaaatcctgcaggaccaattgtgctattagtgatccttctcttttcaagccatatcatctcattgacatgcattgttagtggtgaagtaatttcagagaacttctttggtgttaaactgccgctttcggcacatcatctgctacctaagggtctggccatggttcttaatatctattttgcgaaggttgctggtcctgaagggatatatcagttacttattatgtgcccagttatccaggctatgcttcttccttcatcgattatacccattttacgtgtttcctcgtcaagattattgatgggaagatacaggatagctttatgtattgaaatctttgccttcctcgcattccttcttgtggtgttcacaaatataattttcacagcagaaattatgtttggtactagcacttggacaaacaacctgaaaggagatactggaagccctgctatacttccatattctgttgtagtcctaatttcatgtgcatcgattggatttacactgttacttgctgttactccactaaaatcagcaagtaatgaagctcagactcatttatcgtccatgcactcacaaagaggagctttaggcactactcagagagaagcaacatctctgaaaaaatttgagcatgaagaagttcagagctgttctgttggagctgttcttatgggttcatcggaaggtcataagaagtcagtccatctgcggagaactttatctggataattgtgcagatgaagaaattaaggggtcctctgttgatgctgttccaagggattcattggagggtcttcagaagtcaacttttgagattaagtatgattcggacgcctctgatggtggcgccgagcaatttgtggatagattgaagctgaaccatcaccatctataaccaatgaggagccaaaatcagttgtgtagtggatgcaaccagttccagaggtttgtgctatcatcgtaccagtaccataccatagtgtttcagaaaatttcgagatgaagccctcaaatgaaaaaggtggttaaacaagaaggtgaaggtaactcagatgaaggggaaatagatgagctcttaactagacattcaacctgttgatgcccttcctgttatagtgtgttcctatattatccatgtatgtggttgccgctccattaggattagggtttccataggtgtatatatgtaaccattctctattggattagggtttccataggtgtatatatgtaaccattctctatgcaatggaagtgtaatctcaatctgttacatggtataagagctaggtcttctctggcgcccccgcctccctgccccagatctggcgccctcgcctccttgcctctgttgtggtgcctcatgcacacacgtttgcctagccgcggcagagagcacgggcgccgtgcaagcgccgtcgctgttgcgggctagccatgcgagcgtgcgagtgtcgctgtgggccagccacacgtacaggcacgaccatcaccccttgcctggccccttcaagcttcacctgtcgtcgacgtcgctccttcgcctggctagatccggcgtagccccctgcttggatgaaccgcccagccgccctcccattctcttcatcgccgtcacaaccggattcaacgctatcgcgaccttcacggtcgggttcaccgtcttcctggttggatctggcgcggccttctcgtgtggatccatcgtcgcctcctctgttccacgtcgtcggctcccctggccagaatccgacatggcccctccagcgggagcggccaccctgatcgacgcaaacgtgcgcgctgccgtcggcctttctggtggggcttctggatgaccggtcaagggaaaaagcaaacgaccgaccccttcgaagagcaaggttgctgc

SEQ ID NO: 207684 - DNA, 3078 bp, Zea Mays
ctcaccgccaccaccccgccgcctctatctcggtctgcgacgcgttggcccatccctgctccccgccatggtctctcgcccaccgagagttctcgtggcaggggaattccaagcggaaaaggggggaattctggaataaaaggtggctcggtcttaactgttgaggtttcagttgggaggaactacgaagacacctcatcactagttcatgtgctgtggatgatcatcttctctgaggagtggcaatcgactaattggatcgtaaagagagtcaagatggcctgagtttggtttactgttcgctattaagcttagtggtctggtgtcttccatactttcgctgattaacattatttctgcaccatgaatagtgtgcatagtatagaatctctggctgctggggatgctcaacataaacttttccaaacccttggaccaacgctcttgatttcgatggcatatattgaccttggaaagtggttggtagcagtggatgctggatctcggttcggctatgatcttgtgctactggtgctgttcttcaatttctcagccattttattccaatatctgtcaacgtgtatcggcatggtcactgggaagaatcttgcagagtcttttggagatatcaaccttattctgtacttctacatgactgatagatctgctgcctggaatacagcatggcagtggggttcaaccttgtgtttgaacatgacaatcttatcacagccatatgttttgcaagtgttgttgttaatctactaccatacacactctcccgactggataaggtggctgggatatgtaatgcctgtatagctggatttacacttctttgttttgtgcttggtttattaatcagtcacccacataccccagtcaatatgaatgcgatgtttcccaagttgagtggtgaaagcgcttattcactgatggcacttcttggcgcaaatataatagtacacaacttttatacgcattcggcatttgttcaggtccagagaagatcatctcatacccttggttccctgtttcatgaccaccttttctctatattatttatatttactgggatttaccttgtgaattatattctcctgagttcagccgcagatgaatccagtgagacagtggtcatgaactttcaagatgctacagagctaatgcaccagatattcacaaatcctgcaggaccaattgtgctattagtgatccttctcttttcaagccatatcatctcattgacatgcattgttagtggtgaagtaatttcagagaacttctttggtgttaaactgccgctttcggcacatcatctgctacctaagggtctggccatggttcttaatatctattttgcgaaggttgctggtcctgaagggatatatcagttacttattatgtgcccagttatccaggctatgcttcttccttcatcgattatacccattttacgtgtttcctcgtcaagattattgatgggaagatacaggatagctttatgtattgaaatctttgccttcctcgcattccttcttgtggtgttcacaaatataattttcacagcagaaattatgtttggtactagcacttggacaaacaacctgaaaggagatactggaagccctgctatacttccatattctgttgtagtcctaatttcatgtgcatcgattggatttacactgttacttgctgttactccactaaaatcagcaagtaatgaagctcagactcatttatcgtccatgcactcacaaagaggagctttaggcactactcagagagaagcaacatctctgaaaaaatttgagcatgaagaagttcagagctgttctgttggagctgttcttatgggttcatcggaaggtcataagaagtcagtccatctgcggagaactttatctggataattgtgcagatgaagaaattaaggggtcctctgttgatgctgttccaagggattcattggagggtcttcagaagtcaacttttgagattaagtatgattcggacgcctctgatggtggcgccgagcaatttgtggatagattgaagctgaaccatcaccatctataaccaatgaggagccaaaatcagttgtgtagtggatgcaaccagttccagaggtttgtgctatcatcgtaccagtaccataccatagtgtttcagaaaatttcgagatgaagccctcaaatgaaaaaggtggttaaacaagaaggtgaaggtaactcagatgaaggggaaatagatgagctcttaactagacattcaacctgttgatgcccttcctgttatagtgtgttcctatattatccatgtatgtggttgccgctccattaggattagggtttccataggtgtatatatgtaaccattctctattggattagggtttccataggtgtatatatgtaaccattctctatgcaatggaagtgtaatctcaatctgttacatggtataagagctaggtcttctctggcgcccccgcctccctgccccagatctggcgccctcgcctccttgcctctgttgtggtgcctcatgcacacacgtttgcctagccgcggcagagagcacgggcgccgtgcaagcgccgtcgctgttgcgggctagccatgcgagcgtgcgagtgtcgctgtgggccagccacacgtacaggcacgaccatcaccccttgcctggccccttcaagcttcacctgtcgtcgacgtcgctccttcgcctggctagatccggcgtagccccctgcttggatgaaccgcccagccgccctcccattctcttcatcgccgtcacaaccggattcaacgctatcgcgaccttcacggtcgggttcaccgtcttcctggttggatctggcgcggccttctcgtgtggatccatcgtcgcctcctctgttccacgtcgtcggctcccctggccagaatccgacatggcccctccagcgggagcggccaccctgatcgacgcaaacgtgcgcgctgccgtcggcctttctggtggggcttctggatgaccggtcaagggaaaaagcaaacgaccgaccccttcgaagagcaaggttgctgc

SEQ ID NO: 207685 - DNA, 3128 bp, Zea Mays
cgccgactttggcggtttgccggccctgcgaatgccaccgctcttcctagctggggtcgtacactctccacgcctcccacgtcttactgctcaccgccaccaccccgccgcctctatctcggtctgcgacgcgttggcccatccctgctccccgccatggtctctcgcccaccgagagttctcgtggcaggggaattccaagcggaaaaggggggaattctggaataaaaggtggctcggtcttaactgttgaggtttcagttgggaggaactacgaagacacctcatcactagttcatgtgctgtggatgatcatcttctctgaggagtggcaatcgactaattggatcgtaaagagagtcaagatggcctgagtttggtttactgttcgctattaagcttagtggtctggtgtcttccatactttcgctgattaacattatttctgcaccatgaatagtgtgcatagtatagaatctctggctgctggggatgctcaacataaacttttccaaacccttggaccaacgctcttgatttcgatggcatatattgaccttggaaagtggttggtagcagtggatgctggatctcggttcggctatgatcttgtgctactggtgctgttcttcaatttctcagccattttattccaatatctgtcaacgtgtatcggcatggtcactgggaagaatcttgcagagtcttttggagatatcaaccttattctgtacttctacatgactgatagatctgctgcctggaatacagtaaggtgatatgtgttgttcttggtctccaggcatggctatccttattgacctctgaattgacaatggataaggtggctgggatatgtaatgcctgtatagctggatttacacttctttgttttgtgcttggtttattaatcagtcacccacataccccagtcaatatgaatgcgatgtttcccaagttgagtggtgaaagcgcttattcactgatggcacttcttggcgcaaatataatagtacacaacttttatacgcattcggcatttgttcaggtccagagaagatcatctcatacccttggttccctgtttcatgaccaccttttctctatattatttatatttactgggatttaccttgtgaattatattctcctgagttcagccgcagatgaatccagtgagacagtggtcatgaactttcaagatgctacagagctaatgcaccagatattcacaaatcctgcaggaccaattgtgctattagtgatccttctcttttcaagccatatcatctcattgacatgcattgttagtggtgaagtaatttcagagaacttctttggtgttaaactgccgctttcggcacatcatctgctacctaagggtctggccatggttcttaatatctattttgcgaaggttgctggtcctgaagggatatatcagttacttattatgtgcccagttatccaggctatgcttcttccttcatcgattatacccattttacgtgtttcctcgtcaagattattgatgggaagatacaggatagctttatgtattgaaatctttgccttcctcgcattccttcttgtggtgttcacaaatataattttcacagcagaaattatgtttggtactagcacttggacaaacaacctgaaaggagatactggaagccctgctatacttccatattctgttgtagtcctaatttcatgtgcatcgattggatttacactgttacttgctgttactccactaaaatcagcaagtaatgaagctcagactcatttatcgtccatgcactcacaaagaggagctttaggcactactcagagagaagcaacatctctgaaaaaatttgagcatgaagaagttcagagctgttctgttggagctgttcttatgggttcatcggaaggtcataagaagtcagtccatctgcggagaactttatctggataattgtgcagatgaagaaattaaggggtcctctgttgatgctgttccaagggattcattggagggtcttcagaagtcaacttttgagattaagtatgattcggacgcctctgatggtggcgccgagcaatttgtggatagattgaagctgaaccatcaccatctataaccaatgaggagccaaaatcagttgtgtagtggatgcaaccagttccagaggtttgtgctatcatcgtaccagtaccataccatagtgtttcagaaaatttcgagatgaagccctcaaatgaaaaaggtggttaaacaagaaggtgaaggtaactcagatgaaggggaaatagatgagctcttaactagacattcaacctgttgatgcccttcctgttatagtgtgttcctatattatccatgtatgtggttgccgctccattaggattagggtttccataggtgtatatatgtaaccattctctattggattagggtttccataggtgtatatatgtaaccattctctatgcaatggaagtgtaatctcaatctgttacatggtataagagctaggtcttctctggcgcccccgcctccctgccccagatctggcgccctcgcctccttgcctctgttgtggtgcctcatgcacacacgtttgcctagccgcggcagagagcacgggcgccgtgcaagcgccgtcgctgttgcgggctagccatgcgagcgtgcgagtgtcgctgtgggccagccacacgtacaggcacgaccatcaccccttgcctggccccttcaagcttcacctgtcgtcgacgtcgctccttcgcctggctagatccggcgtagccccctgcttggatgaaccgcccagccgccctcccattctcttcatcgccgtcacaaccggattcaacgctatcgcgaccttcacggtcgggttcaccgtcttcctggttggatctggcgcggccttctcgtgtggatccatcgtcgcctcctctgttccacgtcgtcggctcccctggccagaatccgacatggcccctccagcgggagcggccaccctgatcgacgcaaacgtgcgcgctgccgtcggcctttctggtggggcttctggatgaccggtcaagggaaaaagcaaacgaccgaccccttcgaagagcaaggttgctgc

SEQ ID NO: 207686 - DNA, 3199 bp, Zea Mays
ggagtactgtactcatgtgtactgtattcctgatgccgccgcccgccgactttggcggtttgccggccctgcgaatgccaccgctcttcctagctggggtcgtacactctccacgcctcccacgtcttactgctcaccgccaccaccccgccgcctctatctcggtctgcgacgcgttggcccatccctgctccccgccatggtctctcgcccaccgagagttctcgtggcaggggaattccaagcggaaaaggggggaattctggaataaaaggtggctcggtcttaactgttgaggtttcagttgggaggaactacgaagacacctcatcactagttcatgtgctgtggatgatcatcttctctgaggagtggcaatcgactaattggatcgtaaagagagtcaagatggcctgatgtgcatagtatagaatctctggctgctggggatgctcaacataaacttttccaaacccttggaccaacgctcttgatttcgatggcatatattgaccttggaaagtggttggtagcagtggatgctggatctcggttcggctatgatcttgtgctactggtgctgttcttcaatttctcagccattttattccaatatctgtcaacgtgtatcggcatggtcactgggaagaatcttgcagagtcttttggagatatcaaccttattctgtacttctacatgactgatagatctgctgcctggaatacagtaaggtgatatgtgttgttcttggtctccaggcatggctatccttattgacctctgaattgacaatgattgcaggcatggcagtggggttcaaccttgtgtttgaacatgacaatcttatcacagccatatgttttgcaagtgttgttgttaatctactaccatacacactctcccgactggataaggtggctgggatatgtaatgcctgtatagctggatttacacttctttgttttgtgcttggtttattaatcagtcacccacataccccagtcaatatgaatgcgatgtttcccaagttgagtggtgaaagcgcttattcactgatggcacttcttggcgcaaatataatagtacacaacttttatacgcattcggcatttgttcaggtccagagaagatcatctcatacccttggttccctgtttcatgaccaccttttctctatattatttatatttactgggatttaccttgtgaattatattctcctgagttcagccgcagatgaatccagtgagacagtggtcatgaactttcaagatgctacagagctaatgcaccagatattcacaaatcctgcaggaccaattgtgctattagtgatccttctcttttcaagccatatcatctcattgacatgcattgttagtggtgaagtaatttcagagaacttctttggtgttaaactgccgctttcggcacatcatctgctacctaagggtctggccatggttcttaatatctattttgcgaaggttgctggtcctgaagggatatatcagttacttattatgtgcccagttatccaggctatgcttcttccttcatcgattatacccattttacgtgtttcctcgtcaagattattgatgggaagatacaggatagctttatgtattgaaatctttgccttcctcgcattccttcttgtggtgttcacaaatataattttcacagcagaaattatgtttggtactagcacttggacaaacaacctgaaaggagatactggaagccctgctatacttccatattctgttgtagtcctaatttcatgtgcatcgattggatttacactgttacttgctgttactccactaaaatcagcaagtaatgaagctcagactcatttatcgtccatgcactcacaaagaggagctttaggcactactcagagagaagcaacatctctgaaaaaatttgagcatgaagaagttcagagctgttctgttggagctgttcttatgggttcatcggaaggtcataagaagtcagtccatctgcggagaactttatctggataattgtgcagatgaagaaattaaggggtcctctgttgatgctgttccaagggattcattggagggtcttcagaagtcaacttttgagattaagtatgattcggacgcctctgatggtggcgccgagcaatttgtggatagattgaagctgaaccatcaccatctataaccaatgaggagccaaaatcagttgtgtagtggatgcaaccagttccagaggtttgtgctatcatcgtaccagtaccataccatagtgtttcagaaaatttcgagatgaagccctcaaatgaaaaaggtggttaaacaagaaggtgaaggtaactcagatgaaggggaaatagatgagctcttaactagacattcaacctgttgatgcccttcctgttatagtgtgttcctatattatccatgtatgtggttgccgctccattaggattagggtttccataggtgtatatatgtaaccattctctattggattagggtttccataggtgtatatatgtaaccattctctatgcaatggaagtgtaatctcaatctgttacatggtataagagctaggtcttctctggcgcccccgcctccctgccccagatctggcgccctcgcctccttgcctctgttgtggtgcctcatgcacacacgtttgcctagccgcggcagagagcacgggcgccgtgcaagcgccgtcgctgttgcgggctagccatgcgagcgtgcgagtgtcgctgtgggccagccacacgtacaggcacgaccatcaccccttgcctggccccttcaagcttcacctgtcgtcgacgtcgctccttcgcctggctagatccggcgtagccccctgcttggatgaaccgcccagccgccctcccattctcttcatcgccgtcacaaccggattcaacgctatcgcgaccttcacggtcgggttcaccgtcttcctggttggatctggcgcggccttctcgtgtggatccatcgtcgcctcctctgttccacgtcgtcggctcccctggccagaatccgacatggcccctccagcgggagcggccaccctgatcgacgcaaacgtgcgcgctgccgtcggcctttctggtggggcttctggatgaccggtcaagggaaaaagcaaacgaccgaccccttcgaagagcaaggttgctgc

SEQ ID NO: 207687 - DNA, 3316 bp, Zea Mays
ctaatttgtataaatttttattagctcaaacgattccggacgcaatccaatacaaacgaacaagccgtcaggtgtcatggagtactgtactcatgtgtactgtattcctgatgccgccgcccgccgactttggcggtttgccggccctgcgaatgccaccgctcttcctagctggggtcgtacactctccacgcctcccacgtcttactgctcaccgccaccaccccgccgcctctatctcggtctgcgacgcgttggcccatccctgctccccgccatggtctctcgcccaccgagagttctcgtggcaggggaattccaagcggaaaaggggggaattctggaataaaaggtggctcggtcttaactgttgaggtttcagttgggaggaactacgaagacacctcatcactagttcatgtgctgtggatgatcatcttctctgaggagtggcaatcgactaattggatcgtaaagagagtcaagatggcctgagtttggtttactgttcgctattaagcttagtggtctggtgtcttccatactttcgctgattaacattatttctgcaccatgaatagtgtgcatagtatagaatctctggctgctggggatgctcaacataaacttttccaaacccttggaccaacgctcttgatttcgatggcatatattgaccttggaaagtggttggtagcagtggatgctggatctcggttcggctatgatcttgtgctactggtgctgttcttcaatttctcagccattttattccaatatctgtcaacgtgtatcggcatggtcactgggaagaatcttgcagagatctgctgcctggaatacagtaaggtgatatgtgttgttcttggtctccaggcatggctatccttattgacctctgaattgacaatgattgcaggcatggcagtggggttcaaccttgtgtttgaacatgacaatcttatcacagccatatgttttgcaagtgttgttgttaatctactaccatacacactctcccgactggataaggtggctgggatatgtaatgcctgtatagctggatttacacttctttgttttgtgcttggtttattaatcagtcacccacataccccagtcaatatgaatgcgatgtttcccaagttgagtggtgaaagcgcttattcactgatggcacttcttggcgcaaatataatagtacacaacttttatacgcattcggcatttgttcaggtccagagaagatcatctcatacccttggttccctgtttcatgaccaccttttctctatattatttatatttactgggatttaccttgtgaattatattctcctgagttcagccgcagatgaatccagtgagacagtggtcatgaactttcaagatgctacagagctaatgcaccagatattcacaaatcctgcaggaccaattgtgctattagtgatccttctcttttcaagccatatcatctcattgacatgcattgttagtggtgaagtaatttcagagaacttctttggtgttaaactgccgctttcggcacatcatctgctacctaagggtctggccatggttcttaatatctattttgcgaaggttgctggtcctgaagggatatatcagttacttattatgtgcccagttatccaggctatgcttcttccttcatcgattatacccattttacgtgtttcctcgtcaagattattgatgggaagatacaggatagctttatgtattgaaatctttgccttcctcgcattccttcttgtggtgttcacaaatataattttcacagcagaaattatgtttggtactagcacttggacaaacaacctgaaaggagatactggaagccctgctatacttccatattctgttgtagtcctaatttcatgtgcatcgattggatttacactgttacttgctgttactccactaaaatcagcaagtaatgaagctcagactcatttatcgtccatgcactcacaaagaggagctttaggcactactcagagagaagcaacatctctgaaaaaatttgagcatgaagaagttcagagctgttctgttggagctgttcttatgggttcatcggaaggtcataagaagtcagtccatctgcggagaactttatctggataattgtgcagatgaagaaattaaggggtcctctgttgatgctgttccaagggattcattggagggtcttcagaagtcaacttttgagattaagtatgattcggacgcctctgatggtggcgccgagcaatttgtggatagattgaagctgaaccatcaccatctataaccaatgaggagccaaaatcagttgtgtagtggatgcaaccagttccagaggtttgtgctatcatcgtaccagtaccataccatagtgtttcagaaaatttcgagatgaagccctcaaatgaaaaaggtggttaaacaagaaggtgaaggtaactcagatgaaggggaaatagatgagctcttaactagacattcaacctgttgatgcccttcctgttatagtgtgttcctatattatccatgtatgtggttgccgctccattaggattagggtttccataggtgtatatatgtaaccattctctattggattagggtttccataggtgtatatatgtaaccattctctatgcaatggaagtgtaatctcaatctgttacatggtataagagctaggtcttctctggcgcccccgcctccctgccccagatctggcgccctcgcctccttgcctctgttgtggtgcctcatgcacacacgtttgcctagccgcggcagagagcacgggcgccgtgcaagcgccgtcgctgttgcgggctagccatgcgagcgtgcgagtgtcgctgtgggccagccacacgtacaggcacgaccatcaccccttgcctggccccttcaagcttcacctgtcgtcgacgtcgctccttcgcctggctagatccggcgtagccccctgcttggatgaaccgcccagccgccctcccattctcttcatcgccgtcacaaccggattcaacgctatcgcgaccttcacggtcgggttcaccgtcttcctggttggatctggcgcggccttctcgtgtggatccatcgtcgcctcctctgttccacgtcgtcggctcccctggccagaatccgacatggcccctccagcgggagcggccaccctgatcgacgcaaacgtgcgcgctgccgtcggcctttctggtggggcttctggatgaccggtcaagggaaaaagcaaacgaccgaccccttcgaagagcaaggttgctgc

SEQ ID NO: 207688 - DNA, 2397 bp, Zea Mays
gctcgtttgttgacccagaaggccagaactgacctatctgccgagcaaaatgccggcggcgttggtgccttatcggcaagatgagctcaagattctccgtggcgacgataatcctggaccataccaggagcatgatcgcgtctaccgttacgactactacaatgaccttggtgatcccgacaagggcgaagagcacgctcggccgatcctcggtggcagccaagaacacccgtatccccgtcgctgcagaactggccggcacccaacaaagaaagacccaaattcggagagcaggcttttcctgctgaacctgaacatctacgtcccgcgtgacgaacgctttgggcatctcaagatgtcggacttccttgggtactcgctgaagacgatcatcgaggctgttcttccaacactggggactttcgtcgatgacacgcccaaggagttcgattcgtttgaggatatcctcgggctctacgagctgggcccagaggcacccaacaacccactgatagcagagatcaggaagaagatccccagcgagttccttcgaagcattctgccgaacggtagccatgaccacccgctaaagatgccccttccaaatgtcatcaaatcagatgtgttgaaaaaggctccggagtttaagtttggctggaggactgacgaagagttcgcgagagagacacttgcaggcgtgaacccagtaatcatcaaacgtctgacggagttccccgctaaaagcaccctggacccaaggcagtacggagaccacaccagcaagatcactgaagctcacatccggcataacatgggaggcctgtcggtgcagaacgcactgaggaacaagaggctcttcatcctagaccaccatgaccatttcatgccgtacctcgacgagatcaacgagctggaggggaacttcatctacgccagcaggaccctactgttcctgaaggacgatggcacgctgaagcccctggccatcgagctgagcctgccccaccctgacggccagcagcgcggcgcggtcagcaaggtgtacaccccggctcacaccggcgtcgagggccacgtctggcagctcgccaaggcttatgcctgcgtaaacgactctgcctggcatcagctgatcagccactggctgaacacgcacgcggtgatcgagccgttcgtaatcgcgacaaaccggcagctcagcgtggtgcatcccgtgcacaagctgctgagcccgcactaccgtgacacgctgaacatcaacgccctggcacgccagacactcatcaacgccggcggcgtcttcgagcgcaccgtgttccctgcaaagtacgcgctggggatgtcggcagacgtgtacaagagctggaatttcaacgagcaggctctcccagcagatctcgtcaagagaggtgtggctgtgccggaccagtcaagcccatatggtgtccgactgctgatcaaggactacccctatgccgttgacgggctcgtcatctggtgggcgatcgagcggtgggtcaaggagtacctggacatctactaccctaacgacggcgagctccagcgtgacgtggagctgcaggcgtggtggaaggaggtgcgtgaggaggcgcacggcgacctcaaggaccgagactggtggcccaggatggacaccgtccagcagctggctagggcgtgcacgaccatcatctgggtggcatccgcgctgcacgcggctgtcaactttgggcagtacccatacgccgggtacctcccgaaccggccgacggccagccggcgcccgatgccggagccaggcagccacgactacaagaagctgggagcggggcagaaggaggcggacatggtgttcatccgcaccatcaccagccagttccagaccatcctgggcatctcgctcatcgagatcctctccaagcactcctccgacgaggtgtacctcggccagcgtgacgagcctgatcgctggacgtcagacgccaaggcgctggatgcgttcaaaagattcgggagccggctggtgcagattgagaatcggatcaagacgatgaacgacagtccggacttgaagaaccggaaggggcctgtggaaatgccgtacatgctgctgtaccccaacacgtcggacgttaccggcgagaaggccgaggggcttactgccatgggcattcccaacagcatctccatatgagcctgggcagattgtgtctcgtagtaaattgttgtgctgcgccgtgcgatgtgtttcttcattggttttgtcagtctcagggtaggggatggagatcataccatgatctttgtagggttgagagaggagtccacgcttgaatattgttgtcatgtatgtaattcttggttaataataaagttcgtcagttcatttcttagcct

SEQ ID NO: 207689 - DNA, 3091 bp, Zea Mays
aagccgaggcgagcagccgtcgccgcctatatatcgcggcgcagggcagcaggagttccacacttccatacacgcctgccttgtgccttcccttcccttgccttgcttcgcttattgccggcacatcacatcggcaggcgagggacggagcgagcagggaagcccatccaccagccagccaccgcgttcctgagaagcgaggagcgagaaaagcgaagagcggccatgttctggcacggggtcgcggaccggctgacgggaaagaacaaggaggcgtggagcgagggcaagatccgcggcacggtgaggctggtcaagaaggaggtgctggacgtcggcgacttcaacgcctcgctcctcgacggcgtccacaggatcctcggctgggacgacggcgtcgccttccagctcgtcagcgccaccgcggccgaccccgcaacgggggccgtggcaaggtggggaaggcggcgcacctggaggaggcggtggtgtcgctcaagtccacggcggacggggagaccgtgtaccgggtgagcttcgagtgggacgagtcgcagggcatcccgggcgccgtcctggtcaggaacctgcagcacgccgagttcttcctcaagacgctcaccctcgagggcgtcccaggcaagggcaccgtcgtcttcgtcgccaactcgtgggtctacccgcacaagctctactcccaggaacgcatcttcttcgccaacgacacctatctgccgagcaaaatgccggcggcgttggtgccttatcggcaagatgagctcaagattctccgtggcgacgataatcctggaccataccaggagcatgatcgcgtctaccgttacgactactacaatgaccttggtgatcccgacaagggcgaagagcacgctcggccgatcctcggtggcagccaagaacacccgtatccccgtcgctgcagaactggccggcacccaacaaagaaagacccaaattcggagagcaggcttttcctgctgaacctgaacatctacgtcccgcgtgacgaacgctttgggcatctcaagatgtcggacttccttgggtactcgctgaagacgatcatcgaggctgttcttccaacactggggactttcgtcgatgacacgcccaaggagttcgattcgtttgaggatatcctcgggctctacgagctgggcccagaggcacccaacaacccactgatagcagagatcaggaagaagatccccagcgagttccttcgaagcattctgccgaacggtagccatgaccacccgctaaagatgccccttccaaatgtcatcaaatcagatgtgttgaaaaaggctccggagtttaagtttggctggaggactgacgaagagttcgcgagagagacacttgcaggcgtgaacccagtaatcatcaaacgtctgacggagttccccgctaaaagcaccctggacccaaggcagtacggagaccacaccagcaagatcactgaagctcacatccggcataacatgggaggcctgtcggtgcagaacgcactgaggaacaagaggctcttcatcctagaccaccatgaccatttcatgccgtacctcgacgagatcaacgagctggaggggaacttcatctacgccagcaggaccctactgttcctgaaggacgatggcacgctgaagcccctggccatcgagctgagcctgccccaccctgacggccagcagcgcggcgcggtcagcaaggtgtacaccccggctcacaccggcgtcgagggccacgtctggcagctcgccaaggcttatgcctgcgtaaacgactctgcctggcatcagctgatcagccactggctgaacacgcacgcggtgatcgagccgttcgtaatcgcgacaaaccggcagctcagcgtggtgcatcccgtgcacaagctgctgagcccgcactaccgtgacacgctgaacatcaacgccctggcacgccagacactcatcaacgccggcggcgtcttcgagcgcaccgtgttccctgcaaagtacgcgctggggatgtcggcagacgtgtacaagagctggaatttcaacgagcaggctctcccagcagatctcgtcaagagaggtgtggctgtgccggaccagtcaagcccatatggtgtccgactgctgatcaaggactacccctatgccgttgacgggctcgtcatctggtgggcgatcgagcggtgggtcaaggagtacctggacatctactaccctaacgacggcgagctccagcgtgacgtggagctgcaggcgtggtggaaggaggtgcgtgaggaggcgcacggcgacctcaaggaccgagactggtggcccaggatggacaccgtccagcagctggctagggcgtgcacgaccatcatctgggtggcatccgcgctgcacgcggctgtcaactttgggcagtacccatacgccgggtacctcccgaaccggccgacggccagccggcgcccgatgccggagccaggcagccacgactacaagaagctgggagcggggcagaaggaggcggacatggtgttcatccgcaccatcaccagccagttccagaccatcctgggcatctcgctcatcgagatcctctccaagcactcctccgacgaggtgtacctcggccagcgtgacgagcctgatcgctggacgtcagacgccaaggcgctggatgcgttcaaaagattcgggagccggctggtgcagattgagaatcggatcaagacgatgaacgacagtccggacttgaagaaccggaaggggcctgtggaaatgccgtacatgctgctgtaccccaacacgtcggacgttaccggcgagaaggccgaggggcttactgccatgggcattcccaacagcatctccatatgagcctgggcagattgtgtctcgtagtaaattgttgtgctgcgccgtgcgatgtgtttcttcattggttttgtcagtctcagggtaggggatggagatcataccatgatctttgtagggttgagagaggagtccacgcttgaatattgttgtcatgtatgtaattcttggttaataataaagttcgtcagttcatttcttagcct

SEQ ID NO: 207690 - DNA, 555 bp, Zea Mays
cttccctccagagaggcagagagagactcgagtactagactagagtctcaactcttgagcagggaaaacgagagatccttggagtcagcaatggagtctaccgcgctaatgaccgcgagactaccactgctgacctctggctcccgttccaaacccctcccctttgcttccttcaccagggcggcttgccgtctcgcctccgcccccttctccggcagcggcagcgtcgtcctgctgtcgcgccggagccgcgactatgctggcgttggttccttggtctccgccgcggcggatcctggggatacggcggacgccggatccgagtccatcctgctcagcgtccaggggatgatgtgcgacgggtgcgccgcgagcgtgaagcggatcctggagagccaagcgtagcaccgtgccgcggagttggacgcttggaagctgctgtagccgtgacttcgacgccttggacagtgtcgtcgcgacatcagcaacctcgttcagtgtttgcctaagagaataacagccacagctgcatctgcaacacaactacaacagctg

SEQ ID NO: 207691 - DNA, 1420 bp, Zea Mays
ataaacaactagtatagtgtttacttatctttttgccatgtaaactggaaagggatctaggacgtcgtttggtctctctgctgccttcttcctccttcctccacccctgccttgctcaaagtagtcagtcgtcatcgtctcctccgatcgcctccagttcattccagttagcgccgctgatcccctccctaatcaccatccatccatccggtaggattccccagccatgtcggcgaccgcggtgaagtttcccgtggaggcgccgccgaggacagtgaaggtcaccaacgtctctcttagtgcaaccgtgcaagacattaaggagttcttttccttttcaggagatattgaacatgtggagatgcagagcttgtttctctttactttggcagtggtgatgagtggtctcaaattgcatatgtcactttcaaagatgcacaaggcgcagaaactgcacttcttctttcgggtgccacaatagttgatctttctgtgatcattggacctgctccagagtatcagccaccccctattgcctctgctccaccaatgagtggaaccagagttccagttggtggagacaacaacgttgtccacaaggccgaggatgttgtgagcactatgcttgccaagggtttcgtgctaggaaaagacgcggttggcaaggccaaagcgttcgatgagaagcacggcttcacatccacagccggtgctaaggtggcctccatcgacaagaagattgggctgagcaataagattaccacaggcacttcgttggtcagcgggaaggtgaaggagatggaccagaagttccaggtctctgacaagacaaagtcagcgttcgcggctgccgagcagaaggtgagcagtgccgggtccgccatcatgaagaacaggtacgtcttcaccggcgcgtcgtgggtcaccggcgcgttcaacaaggtcgccaaggctgccacggacgtcgggacaatgaccaaggagaagatggcggccgaggagcagcagaagggtttctctggcccatcgtctaggagccactcgtacacgcccatccgatgattcgttggctttctgttatgcgccctccctcagacagacaatgttgtattgtattacacataacacattggtggatgtaagacatagatagctatatatagaacagatcatcaggccccctcgcaccacttgttcaccgttccatgttctgttaaatttcgtactgcagggatttgtttctttaggacaagcaagtatggtggtgataccaatctgttggtttttacaaatccatgttcagactgtttgtggtttgaatgaacattttgtagaagtggtgggaagttaactggataatatgatgttgctgaaacaacatgctatcactatttgcagttatttggaatgcttcttgttt

SEQ ID NO: 207692 - DNA, 2707 bp, Zea Mays
agttcgggatttcttgcgcgttagtcccttcggaagtcaggatcgtgagaaggaggctcgggaaatggggtgggcgcacccggcggtgaccatggaggaggtgctccgtctggtgcggggtttcgtcgacgtccttgtccttgccggcggccgcacctcgtccggcgccgctgctacttggagcgccgacgagatcaagaaggccctccggtgggcgctcttcttcgaggagattttcaaggacctgctcgactcgggccagtacgaggattctgcaagagaactcgatgcggcactccttgagctcacttcaagtcccgagttccctaagggtcttgctgctgtacgttcagatttgctatccatggcaagggtgttggttatgcgacattttctgaaaccaaacacaatgagcgtggaaaacttttgtgctcttcttgaagcggttgctggcatggatattgatggcatttgtgctagtggtgcgcacaacgcatgccaagagtatgctgagtcaatattgaatatgaatacatcatgttttgcgcagaccatgaatgcttgtgatggtggacttcccactagttcttatgatctgcgggctgaatccacgggccattcatggattatagttaaagaatttcagaagacgctggattcggcatcgtgtggacggttggctgatagaggactggaaacgtttttgaacagtgtgaaaaggaacatcttggaaaatggtagtaataagccttgtgtcccagcaattccgaaaacatcgcaaatgatcgacgagtttctaatgtggaagcaatggagagcaaagtgtttgtcatatttgcttgatcaacggaccattcgagttctgtctggagctagtttgatttttaaagctcctaaagagcagtggatgaaagtgtttgagcccttaaaaagtatagaagaaacatgtcatagtggtcttgttgaaaccatggagctatgcttgctgggttcgattacaaggcgatggaacacattgatagagggcttcatgtcacacactttctgttccattcctatatccaagaagcacgctgatctgcaccagtgccttcacagaacctttcaggacaaattccaagacgaatatcttaatttggaggtttttcatattttggtcttatatcatgttcatagtttgcgaagtattctgtacgttagaaactttaactcggtgtgaaatttttgaaatgtggggattgtacccctctcaaccaagtaggtatccgtacatcttaactcttaagaataaattcaggaaggttttcacctaaatactgaacactgattgtgtcttcgtgcaaactatcaatggtgtttctgtgaatcctcaatgtacttatgtaactaaaatatatcgagggcctacgatcaaacttctctgccagaacttgtaatgggctgtataccaaatcaggtcttcggtgcacttgctgtaactgtgtttacacatgtgagtatgtgacaggaaactgacacaaaactattttttgttgaaagctgctaatgctcagtccttagtctacattcaaaaatggtaaataacattattaaaaccaattacttgtcatactaccttggtctagtttgatttacaagtgatgctcgaccaatttaaacaatacttgagtcagtgaactgtaagttccaaagaaaatttcgtagattaaaggtccaacatagtgtctactgtctattttttatcagtaagcggtccaaaacctaccaggattcatgggccagtggaaggctcctacttgattagatatattataaacgaattaatgatttcagaaaataaatattagcatagaaaggttaggaacttgcatgatagttctaagtagtaatgattagcatgcctttcagagacctctcaggaaataaattgcataacggacctgtcacaactcacaataacaattgttagcaagacggcatatattttagaatcttggtatctacgatgtttcgttttctcacacctcacgaaataatgtatcttcatctaaagcttcgaactacaggaaaaggatattcttgactatgcaagacagacattagagaggaaaccatccgtactatggcttctacctccagttcttaccgccgcagcaattccaccgcagtcaagcttgttccagatatacctagctcaaatcgataagcaaattcatgaagctgctcctgcagatcgaaagtgtagttgcagaggagatgaaatagatcggcatgttaactgtgagattactgaaaggattcaatgtctatatgcattccttattcagcaactttcatataacggttccacaagattacactgaatgttagcagtgtgcactgtatgacgtttcacttttaattgagtgactggccgactatgcatggcttccttggccatattacttttcatttaacgtttgtcactggtggggggtgcgtacatctttgactttgtactcttcttatttaatgaaatgaaatggcactaactctggtgcatccttcgagaagggaaaaaaaagtgactggttctcccagctgactgcacatatacattggctgaacctgggacagcagaaaatggattgagtacgtaagccttttggcatcctgggaacagttgaactgaaagagagattgattatggatgttgcatgacctggag

SEQ ID NO: 207693 - DNA, 2852 bp, Zea Mays
agttcgggatttcttgcgcgttagtcccttcggaagtcaggatcgtgagaaggaggctcgggaaatggggtgggcgcacccggcggtgaccatggaggaggtgctccgtctggtgcggggtttcgtcgacgtccttgtccttgccggcggccgcacctcgtccggcgccgctgctacttggagcgccgacgagatcaagaaggccctccggtgggcgctcttcttcgaggagattttcaaggacctgctcgactcgggccagtacgaggattctgcaagagaactcgatgcggcactccttgagctcacttcaagtcccgagttccctaagggtcttgctgctgtacgttcagatttgctatccatggcaagggtgttggttatgcgacattttctgaaaccaaacacaatgagcgtggaaaacttttgtgctcttcttgaagcggttgctggcatggatattgatggcatttgtgctagtggtgcgcacaacgcatgccaagagtatgctgagtcaatattgaatatgaatacatcatgttttgcgcagaccatgaatgcttgtgatggtggacttcccactagttcttatgatctgcgggctgaatccacgggccattcatggattatagttaaagaatttcagaagacgctggattcggcatcgtgtggacggttggctgatagaggactggaaacgtttttgaacagtgtgaaaaggaacatcttggaaaatggtagtaataagccttgtgtcccagcaattccgaaaacatcgcaaatgatcgacgagtttctaatgtggaagcaatggagagcaaagtgtttgtcatatttgcttgatcaacggaccattcgagttctgtctggagctagtttgatttttaaagctcctaaagagcagtggatgaaagtgtttgagcccttaaaaagtatagaagaaacatgtcatagtggtcttgttgaaaccatggagctatgcttgctgggttcgattacaaggcgatggaacacattgatagagggcttcatgtcacacactttctgttccattcctatatccaagaagcacgctgatctgcaccagtgccttcacagaacctttcaggacaaattccaagacgaatatcttaatttggaggtttttcatattttggtcttatatcatgttcatagtttgcgaagtattctgtacgttagaaactttaactcggtgtgaaatttttgaaatgtggggattgtacccctctcaaccaagtaggtatccgtacatcttaactcttaagaataaattcaggaaggttttcacctaaatactgaacactgattgtgtcttcgtgcaaactatcaatggtgtttctgtgaatcctcaatgtacttatgtaactaaaatatatcgagggcctacgatcaaacttctctgccagaacttgtaatgggctgtataccaaatcaggtcttcggtgcacttgctgtaactgtgtttacacatgtgagtatgtgacaggaaactgacacaaaactattttttgttgaaagctgctaatgctcagtccttagtctacattcaaaaatggtaaataacattattaaaaccaattacttgtcatactaccttggtctagtttgatttacaagtgatgctcgaccaatttaaacaatacttgagtcagtgaactgtaagttccaaagaaaatttcgtagattaaaggtccaacatagtgtctactgtctattttttatcagtaagcggtccaaaacctaccaggattcatgggccagtggaaggctcctacttgattagatatattataaacgaattaatgatttcagaaaataaatattagcatagaaaggttaggaacttgcatgatagttctaagtagtaatgattagcatgcctttcagagacctctcaggaaataaattgcataacggacctgtcacaactcacaataacaattgttagcaagacggcatatattttagaatcttggtatctacgatgtttcgttttctcacacctcacgaaataatgtatcttcatctaaagcttcgaactacaggaaaaggatattcttgactatgcaagacagacattagagaggaaaccatccgtactatggcttctacctccagttcttaccgccgcagcaattccaccgcagtcaagcttgttccagatatacctagctcaaatcgataagcaaattcatgaagctgctcctgcagatcgaaagtgtagttgcagaggagatgaaatagatcggcatgttaactggctgtggatgtccaggaagggcagcgacgcccgccctcaaggtgttggatgaaatggtgcacgcttatgggagggtgacactgagcagtccttctggttgagaagatgaaagacatctgcaagtataatcatctacaatttgctgctaaaaggaactcaatcattgatgcaagatccatgatgagcatgcattggttatcttatcgcagaaaatcttccggcatgagacaactacacagactttggccagcttctgattcgatagtgattgcaaatgttgatatcttcagctagctggctataattatgtgcacacttgaaagtcaatctaaatttattttgagccccagccatgtgtcatgcctcgacgacaactggctagctagctacatgtcgtggcaatcagaaaaagggtccacagatagaaagggtgatgaagtggactctccccgtcgttcgttcatggttttcagtcgggacactgaaacaaatgagaaaagcaattactaggatttaaacatactaatgccaaagacgtcgtcatgtaattcgatggcatgtaacaaatgag

SEQ ID NO: 207694 - DNA, 2920 bp, Zea Mays
gacgcaatggcaaattcgtaaaacacgtgaaatcaggaaaggaaaacagcaatcccctcatcatcgcttcctccaaaccctagcctgcctcttaccccgcccgacgacctgtttctgccagtcatatttcccgggcagcgcgcgatctcaacgctcccgtcgcgccctgcccctgcgcttcaaccgctccatccaggcgagatcctgcggatggaacccccggcggcaaaggaggcgccgtcaccgccgctccagcctgcggcggaggaggacgcgatgctctctgcgacggcggtcatggcgaaggaagcctctgtagcgttccagggacgtcgctacgccgactgcgcagaagtgctcacgaggctgctggacatgaaagagggcgatcccaaggtccaccataacatggccatcaccaaagccttcttggatggttgtcctgattcaaacaggctgcttaaaattctttgtgatgctaagagaagaagtgaagagcttgcatgtgcaactagagaacaagctgattctgcaaatggggtaggaaatagtgctccttcaggatcaagagggagtggcgttgcactacctttttctgctacacataatgtgtcgacttatggggatgagtttgacacgaccataattacattcaacatggctgtcatcctgtatcatcttcatgactatgaatctgcactatctgttttggacccattgtaccgaaacattgaaccaatggatgagacaactgctcttcatgtatgctttttattattggatatcacattagctttgcaagatgcaacaaaggctgcggacataatacagtacatggaaagggcatttggagtagctaacataacgagcccgaatgaaaatccaagcatagctcagcagcaattagctcaaccgaagcctcctgtgaaaattagcgtgcctccagattctgaattaaatgcttatgctggtggatatgagaacctttcggctggaattttaccagatgatcaaatagaatttgaatctctatactctagttttgatggacatcagaatttgggcaggcgtatctttaatgatttctcaagggcatctgctgatcttgctgctactgctgctgatttgaaagttagacttcagatttacaagggattcatctacagagcttctcttgaaatctcagctggagtatgcccgggggaattataggaaagctgtgaagctattgagcacaccacataatcgggctgaaccagcaatgctagccattttctacaacaacctgggctgtatactccaccgacagagatcgtatcacacctctatatggtgctttagcaaagcgctgaaatacactttatcacttcgttcagagaaaccaatgaagctgtctacattatcacaagacaagtcttgccttatttcatacaactgtggtgtccaacatttgatgtgtgggaagcctttgttagcagcttcttgttttcgtgaagctatgccgctcttctacaagcgacctcttttctggcttcgtttttctgagtgtagtctgctagctctagaaaagggtctcctgtgtgcaaaaggtgcttcttcatgcaacgatgagattgaagtcattgttgtggggtcaggacaatggaggcagttgattgtcaaccatgtgagcttgagaagtaatttaggttgtgcaggtgtgacttcaggtgaacataaaaagttggtttcacttggatttgctagacagtgtctactcaatgcgctgctactattgaatgctactgaacaggaaaattgggtaaccacatctaatgcagaggattacatccaaggaacattacaaggatataaaaactcaggtcagaagaacactacaagtacggattctaaaacaccttctgccccaactctagctaatgtaaatggtgaacaaaagggaacgagcttgaatgctaccttgcagagttctcttgctttctataatgagatctgtcgaaaagagaacctgaaaatgagacaggccatcctggggaacttggcgtttgttgaattgtgtcttgagaaccccttgaaagctttgtcttatgcaaagtcagtaatgcaggttaaagactgttccaggatgtatatattcctcagccatgtatacgcagctgaagctttgtgtactttgaacagaccaacggatgctgctgagaagctatcagtttatataagagatggcaatgatatcgagttgccgtataatatggagaactctgaaaaggccttggttgagaaagacagtgacagtgaagacttggctgctgctacagtgacaaaagtagccacagaagaatctgagtactcagagggcctcaggcctgaggaggcccgtggtgtcttgtatatcaaccttgccatgactgctgcagtgcagggaaaagttgagcaagccaactacatggtcagccgtggcctggcgatgttgcccaacaaccctcgagcagtgctagcatcggtttacatagacctcttgcaagggaagtcccaggaggctgtcgtgaagttgagacactgtaggaatgtgagatttagacccggtagcatagcagccagcagctgagcatagagaagcctcacttttcatggtttctgtagtttacaattaccatcatgatatttttggacgctgaccccaatgtggatgatcaaagatggtaatgttcctcctgtgtaccatacataagaaatgaactgtagcactgcccttttagcttcaggggtcaaatctcaaatgtgttgtaactgtaccggtttaatttgcctctctttggactgaagagaggtcaagtgatcaaaaacgtttcctatgttacgccaatattttggaaaataatgcttaaaagctgaggggtctgatcgatatacatttagg

SEQ ID NO: 207695 - DNA, 2898 bp, Zea Mays
ctcatcatcgcttcctccaaaccctagcctgcctcttaccccgcccgacgacctgtttctgccagtcatatttcccgggcagcgcgcgatctcaacgctcccgtcgcgccctgcccctgcgcttcaaccgctccatccaggcgagatcctgcggatggaacccccggcggcaaaggaggcgccgtcaccgccgctccagcctgcggcggaggaggacgcgatgctctctgcgacggcggtcatggcgaaggaagcctctgtagcgttccagggacgtcgctacgccgactgcgcagaagtgctcacgaggctgctggacatgaaagagggcgatcccaaggtccaccataacatggccatcaccaaagccttcttggatggttgtcctgattcaaacaggctgcttaaaattctttgtgatgctaagagaagaagtgaagagcttgcatgtgcaactagagaacaagctgattctgcaaatggggtaggaaatagtgctccttcaggatcaagagggagtggcgttgcactacctttttctgctacacataatgtgtcgacttatggggatgagtttgacacgaccataattacattcaacatggctgtcatcctgtatcatcttcatgactatgaatctgcactatctgttttggacccattgtaccgaaacattgaaccaatggatgagctttgcaagatgcaacaaaggctgcggacataatacagtacatggaaagggcatttggagtagctaacataacgagcccgaatgaaaatccaagcatagctcagcagcaattagctcaaccgaagcctcctgtgaaaattagcgtgcctccagattctgaattaaatgcttatgctggtggatatgagaacctttcggctggaattttaccagatgatcaaatagaatttgaatctctatactctagttttgatggacatcagaatttgggcaggcgtatctttaatgatttctcaagggcatctgctgatcttgctgctactgctgctgatttgaaagttagacttcagatttacaaggttcgccttctactgctcactaggaaccttaaggttgcgaagcgagaactcaaagtactaatgaacatggcacgtggtagggattcatctacagagcttctcttgaaatctcagctggagtatgcccgggggaattataggaaagctgtgaagctattgagcacaccacataatcgggctgaaccagcaatgctagccattttctacaacaacctgggctgtatactccaccgacagagatcgtatcacacctctatatggtgctttagcaaagcgctgaaatacactttatcacttcgttcagagaaaccaatgaagctgtctacattatcacaagacaagtcttgccttatttcatacaactgtggtgtccaacatttgatgtgtgggaagcctttgttagcagcttcttgttttcgtgaagctatgccgctcttctacaagcgacctcttttctggcttcgtttttctgagtgtagtctgctagctctagaaaagggtctcctgtgtgcaaaaggtgcttcttcatgcaacgatgagattgaagtcattgttgtggggtcaggacaatggaggcagttgattgtcaaccatgtgagcttgagaagtaatttaggttgtgcaggtgtgacttcaggtgaacataaaaagttggtttcacttggatttgctagacagtgtctactcaatgcgctgctactattgaatgctactgaacaggaaaattgggtaaccacatctaatgcagaggattacatccaaggaacattacaaggatataaaaactcaggtcagaagaacactacaagtacggattctaaaacaccttctgccccaactctagctaatgtaaatggtgaacaaaagggaacgagcttgaatgctaccttgcagagttctcttgctttctataatgagatctgtcgaaaagagaacctgaaaatgagacaggccatcctggggaacttggcgtttgttgaattgtgtcttgagaaccccttgaaagctttgtcttatgcaaagtcagtaatgcaggttaaagactgttccaggatgtatatattcctcagccatgtatacgcagctgaagctttgtgtactttgaacagaccaacggatgctgctgagaagctatcagtttatataagagatggcaatgatatcgagttgccgtataatatggagaactctgaaaaggccttggttgagaaagacagtgacagtgaagacttggctgctgctacagtgacaaaagtagccacagaagaatctgagtactcagagggcctcaggcctgaggaggcccgtggtgtcttgtatatcaaccttgccatgactgctgcagtgcagggaaaagttgagcaagccaactacatggtcagccgtggcctggcgatgttgcccaacaaccctcgagcagtgctagcatcggtttacatagacctcttgcaagggaagtcccaggaggctgtcgtgaagttgagacactgtaggaatgtgagatttagacccggtagcatagcagccagcagctgagcatagagaagcctcacttttcatggtttctgtagtttacaattaccatcatgatatttttggacgctgaccccaatgtggatgatcaaagatggtaatgttcctcctgtgtaccatacataagaaatgaactgtagcactgcccttttagcttcaggggtcaaatctcaaatgtgttgtaactgtaccggtttaatttgcctctctttggactgaagagaggtcaagtgatcaaaaacgtttcctatgttacgccaatattttggaaaataatgcttaaaagctgaggggtctgatcgatatacatttagg

SEQ ID NO: 207696 - DNA, 1709 bp, Zea Mays
gtgtgagcttcccccggcccgaacggcagtcccccgcattcccctaacgttcaatcgcgtaccgtcgctcgccgtattcccctgccgcgcacagttcactcgcgcacctctcgccccctcgctctacgacgactagtgggccgccggcgctggcgccgccttacgccaggtgccgaggtcttcgttgatctcttcgccggcgacgagcacccaccagctgggaaaaaatctatagccaaacataataatggctatgattgatgaacctctctacccgattgctgtactgattgatgaactgaaaaatgaagatattcagttgcgccttaactccatcaaaaagctttctacaattgcccgggcattgggtgaagaaagaacaaggaaagagctgattccattccttagtgaaaacaacgatgatgaagatgaggtgcttcttgcaatggcagaagagttgggcgtttttattccttatgttggaggagtagagcatgcacatgttttgcttccaccactggaaacattgtgtactgtggaggagacctgcgtcagagacaaggctgtggaatcactttgtcagataggagcacagatgaaggaaaatgatattgtggactggtttgcccatgtcgtaaagaggttggcggtaggtgagtggtttacagctcgagtttcttcatgtggcctttttcatatcgcctatcctagtgcacctgaacaactgaaggcagaactgaggacaatttatggccagttatgtcaagacgacatgcctatggtacggagagctgctgcatccaatcttgggaagttcgctgcaacagtggaacaaagtcatttgaagacagaaatcatgtcaatgtttgatgatctaactcaagatgaccaagattcagtgcgactattggcagttgagggttgtgctgctcttgggaagttgttggagccccaagattgtgcagcacatattctcccagttattgtaaatttctctcaggataaatcttggcgtgtgcgctatatggtggcaaatcaactgtatgaactatgtgaagctgttggtactgaacccacaaggggtgatctggtgtcagcgtatgttcgccttctctgtgacaatgaggctgaagtgcggattgcagctgctggaaaagttacaaaattctgcaaaatattaaacccacaaattgcaattgaacatattcttccgtgtatcaaggaattatcatcagattcatctcagcatgttcgttcagctttggcatcggttattatgggaatggctcctgtattgggaaaggacgccactcttgaacaactgcttcccatttttctttctttgctgaaggatgagttccctgatgttcgactcaacattataagcaaacttgatcaagttaaccaggttattggaattgacttgttgtcgcaatcacttctgccagccattgtagagctctctgaagataggcactggagagttcggcttgccataattgagtacatacctttgttggccagccagttaggtgttggtttttttgatgacaagttaggggcactttgcatgcagtggttggaagataaggttttctcgatcagagatgctggtgccaataatttaaagcgtttgacagaggaatttggccctgagtgggcgatgcaacatataattcctcaggttatatgcgcaaaacccatgcaca

SEQ ID NO: 207697 - DNA, 1626 bp, Zea Mays
cagttccaggttacgcctccacagtccacactccctagttccaattccaatccaatccccattactccagctatcagtacggcagtaccaccccacctgaccgccccaacgacggtggttcttttcgcctcatctcctaccccgtgtgctcaccggcgttggctatgcaccatcgcatgggtcgcttcctgctcttgccggctctaaccttggtagttgcgtccgcgtgggtcccgatcaccttcgccgacccgcaggccacgctgctcaaccaggggtgcagccagtacaacgccacgcccgcgtccgccttcatcgccgccctcaactccacgttcgccagcctccgcgctaacctctccgctgcaagcagcgtcggtttcgccaccgcggcggaaccgcgcgctgccgccccggcgttcgcgatggcgcagtgccgcccgtacgtcgcgggccgtgactgtgtcgcctgcttcgacgcggccgccgcgggactccgcgccacctgcgtcgcgggccgcgcggccaacggcgggcgcgccatcctcgacggctgcatgctccggtacgagagcgcggccttcttcgaccagtctacgctcccgggcaacacgcagctctgcaacggctccgccgtccaagccggcggcttcgcggacgcagcgcgggcgctggtcgccgacttcgcggcggccgtgcctcgcgtccctgggctagccgccgcggccgcgagcggcggcgtgtacgcggcggcgcagtgcgtggagacggtcggggaagccggttgcgcgcagtgcctcaacgtggcggtggggaacatcgatgggtgcccacccaactccgacggccgtgccgtggacgccggctgcttcatgagatactctgataggtctttcttcccagcgaactcgacgactgtggacctcgcgatatacttgcggtccggggctacactgctccagagtatgcgattcatggccaactatcagaaaaggttgacacatacagctttggtgttgtcgtcttggaaatattaagtggtcggaagagcaatgatacaaggcttgagcctgaaacacagtacctgcttgaatgggcctggaagctatatgaaagtgacaacttaatggccttgctggatgagtcacttgatcctgaagaatatagaccggacgaggtaaaaaggataatggagatagcccttctctgcactcaatcagctgttgctgcaaggccaatgatgtcagaagtggttgtgttgttgttgacaagagatgatccagaggtccagcccacaaggcccacttttatcgatgcaacaagcagagtgcgaggcgaaacatcctcctccagttcgtcttctgcctcgaaggccaccatatcagtttctcagttttcggccaggtaaaaagcatcgttatatgacttctcttcttttttctgtagtaacaatatttgtaatcagtataggtacatatgatatatctatattagcagggagtgactgattccttgtcagcatatatgacagctagcagtgtaaatcatttgaaatttcccttttgttcttgtactatgtaagttgtaattatccatatgcttgtgaggttcacgtgcatgttttat

SEQ ID NO: 207698 - DNA, 1622 bp, Zea Mays
ccagttccaggttacgcctccacagtccacactccctagttccaattccaatccaatccccattactccagctatcagtacggcagtaccaccccacctgaccgccccaacgacggtggttcttttcgcctcatctcctaccccgtgtgctcaccggcgttggctatgcaccatcgcatgggtcgcttcctgctcttgccggctctaaccttggtagttgcgtccgcgtgggtcccgatcaccttcgccgacccgcaggccacgctgctcaaccaggggtgcagccagtacaacgccacgcccgcgtccgccttcatcgccgccctcaactccacgttcgccagcctccgcgctaacctctccgctgcaagcagcgtcggtttcgccaccgcggcggaaccgcgcgctgccgccccggcgttcgcgatggcgcagtgccgcccgtacgtcgcgggccgtgactgtgtcgcctgcttcgacgcggccgccgcgggactccgcgccacctgcgtcgcgggccgcgcggccaacggcgggcgcgccatcctcgacggctgcatgctccggtacgagagcgcggccttcttcgaccagtctacgctcccgggcaacacgcagctctgcaacggctccgccgtccaagccggcggcttcgcggacgcagcgcgggcgctggtcgccgacttcgcggcggccgtgcctcgcgtccctgggctagccgccgcggccgcgagcggcggcgtgtacgcggcggcgcagtgcgtggagacggtcggggaagccggttgcgcgcagtgcctcaacgtggcggtggggaacatcgatgggtgcccacccaactccgacggccgtgccgtggacgccggctgcttcatgagatactctgataggtctttcttcccagcgaactcgacgactgtggacctcgcgatatacttgcggggctacactgctccagagtatgcgattcatggccaactatcagaaaaggttgacacatacagctttggtgttgtcgtcttggaaatattaagtggtcggaagagcaatgatacaaggcttgagcctgaaacacagtacctgcttgaatgggcctggaagctatatgaaagtgacaacttaatggccttgctggatgagtcacttgatcctgaagaatatagaccggacgaggtaaaaaggataatggagatagcccttctctgcactcaatcagctgttgctgcaaggccaatgatgtcagaagtggttgtgttgttgttgacaagagatgatccagaggtccagcccacaaggcccacttttatcgatgcaacaagcagagtgcgaggcgaaacatcctcctccagttcgtcttctgcctcgaaggccaccatatcagtttctcagttttcggccaggtaaaaagcatcgttatatgacttctcttcttttttctgtagtaacaatatttgtaatcagtataggtacatatgatatatctatattagcagggagtgactgattccttgtcagcatatatgacagctagcagtgtaaatcatttgaaatttcccttttgttcttgtactatgtaagttgtaattatccatatgcttgtgaggttcacgtgcatgttttat

SEQ ID NO: 207699 - DNA, 1813 bp, Zea Mays
ttttttattgtcttatagttctctcagtccagtgtttattgctttgtctaggcttgtctcaatttaccctaacatttcagggctggccgttacgaggtggatgggtatgtgtacagtgcagcggaagaacccaaaatcatgattacagggaagtggaacaagtccctgagttgccaaccatgtgaccaagaaggcgatccgcttccaggcacggagctgaaggagatctggagagttgctcctgccccacagggcgacaagtatcagtacacacaatttgcacacaaaataaacagcttcgacacggcacctaagaagctgttggcatctgattcacggttgaggcctgatagatatgccctcgagaagggtgacatgtctaagtctggggcagagaagagcagcctagagaccctccctgaactcaaagaactatgtcgcgcagatgtgctgcacctgagcagaggagtgatgcctcccatgtgctcaacccaaaaccctagaaacctcaggctaagctacttgtgccactcacagtggtgcacccagctcgacaacgacatcaacccgacccggagcagaagtacgaagaatctagagtgggcgagacgggagggaagggctttttctcacctcgtatccgggatcgaggcggcgtcgccggaccacgcagctgccacggcggtggcggctaaggcggaagggggtgacgcgcggcccagcctggccgagcggctgcgactggggagcctcctggaggacgggctctcttacaaggagagtttcatcgtgcgctgctacgaggtgggtatcaacaagacggccaccgtcgagacaatcgccaatctcctccaggaggtaggatgtaaccatgcacaaagtgttgggttctctactgatggcttcgccacaactactacaatgagaaaacttggacttatttgggtgacgaaccgaatgcacattgagatctacaagtacccagcttggggtgatgttgttgagatcgaaacatggtgccaagaagatggaaaaattggtactcgtcgtgattggatcctcaaggacctgtctactggtgaagttactggcagagctaccagcaagtgggtcatgatgaaccaaaatacacggagacttcagcgagtcagtgatgacgtgagggatgaggtgtttatacattgtccaaagactccaagattagcatttccagaggaaaataatggcagtttgaagaagattccaaatctttcagatcctgcacaatattcaagactaggactagtgccaagaagagctgatctggacatgaaccaacatgtcaataatgttacttacattggttgggtccttgaaagtatacctcaagatataattgatacacacgagttacaaacaatcactctcgactatagaagagaatgtcaacatgatgacatagttgattctcttacttacgtagaggaaggagaggagagaagcatgaacggctctgcttcctcagtgccgcacacagaacagcggcggcagttcttgcattgcttgagatttgcagccaatggggatgagatcaaccgtggccgtaccgtgtggaggaagctagctagataaaaagtggtttttggtcatcaatattctgctccattttgcttctcgcggttggcggcccttgtaccacaattttgtgatttggggtgcattctgccatgcatcgatggcgatttctgacatttcttgcagttgtaaccgtctgtccgttttgtaccggtggacagtgtctgtgcgatatgtaataacctgcgtttatccggca

SEQ ID NO: 207700 - DNA, 1329 bp, Zea Mays
agatgttttccaggcaaaccccaattttgttgaagatgagaaggcatatgagaatctaaagagaagcatcctgggagcagagtcttctgaagatgaagaaggatcagatgctgcttctgatgatgatgatgatgatgatgatgaatctgatgaagaggatgaggaacaaatggagataagggatagaacagagacaaatcttgtgaatcttagaagaacaatatatttgactattatgtctagtgttgattttgaagaagctggacacaagcttatgaaaattaagcttgagcctggtcaagagaacatatcttcgttattatgggctgctaggacagcgtttttgcatgatcaataaagtgtaccaagagaacttcgaaaaatgctttgtgcaacaatattcgatgattcatcgtcttgaaacaaacaagttgaggaatgttgccaagttctttgcacatttgttggggactgatgcactcccttggcatgttttggcttacatcaggttgacagaggaagacacaacatcatcttctcgtattttcataaaaatattgttccaagaattatcggagcacctgggcatacgcctactcaatgagaggctgaatgatcctaacatgcaaggttcctttgagtctatcttcccaaaggatcatccgaagaatacaaggttctcgatcaacttcttcacgtccattggtcttggtggtatcacggaaagcctgagggagtacttgaagaacatgccacgtctaataatgcagcagcagaagccagaatcatcagagtcagattcaagtggatccgaatctggttcggaaagctctagttcagggtccagttctgagcctgagtcagaatcaagccctgatgagcgtgacagaaggcgaagtaataagaggaggaagaggacttgagagcacttccaactatgctttttggaattcatgtatttggttttgtttaaatgtgcttcttcagtatacatgtgcagtatgtgatctagctcttgatgtgttagtggtaatcagaaagccgtaacagtaagatactattcgaacttgtacgtggcaggttggtagtccagcaacaaagggccaacagagatcttgtttatttttcataacttccaatgcagaacaagttctgtacgtgggtatttgtaccattgcgacatcacactgctagccatgttctgtatcctgtagtgtggtaactggtaagcatcaaatatggacatcggttttgatttttttctgctcgttttttccccagtatatagacagtcaaagctataggcttctgtggccttcacaatttttg

SEQ ID NO: 207701 - DNA, 1595 bp, Zea Mays
ggcaggctgcacctgcaacacaagaaaagaaaaggcgcgccttttctcctctcgttccaccgacggcgacgcaggcctcacccgcaccaaccttcgttctccttccccttctcctccacgcgcgtcaatttgccatcccaggaaggcagaaccccacacctctgatctgctctgcccatcatccagcgcatccccggccctgacttaacttgctgctcacctcgccatgggaatctcccaccctctctccgacgagtacgacgccctccgcggcgccgtcctctcgccggatacgacgcctccctcatcgccgctcgcccaccgccacctcctggagcacgaggttactaggatggacacgctcgccggcatcgccatcaagtacggcgtcgagtttggtaactgacagccagatgtttgcacacaaatcgctgctcatacctctaccaggaatgcccatgccatccctgaatgcttgtggtcaaagaacgataagaacgtgtgctccaaaccatcggcaaaagagagacgcgcccaagtctcgtcagcagggtgcgtcatctgcaatgaataccttgcagagatactatggcctaacaccacctcagaaaggaggaaataccatggatagcagcactgaactgtctgtgtaccataagggcggcggcttccagagtaacctcagcgaaacattgctcaatccttccgcagctccaggcaccgacagcagctggaattttgaagcgctaggcttttcagcgaccgagggcgatggcggggcaccgaaaccagagcaagatggttctatgcggcggcgacagaaagtggaagcagagtctaacgcccagggtgattttctagtgaaggcgatcaagagtctgttgatttccagcgtccgtctagacacgtatgcaggcagcccaggttccagccagaagagcggcttcagatctgtgactgtgaggaagtccccgagcgcgcccagctttgcggatgctgacaatggagtctctatgtggtcaagttccaagtggacgttcagccatgactccttcacccgaccgttgcttgatggcctgcccaaaccagcgtcagctcggaggaccaaccaaaaccgcgttggactgaaactgaactgaatacacacatgtttgagcgtctcctttgatgaacgacgagctgtggcgtgactaggcgactgacttggcagcagagcatatctgtctgcagctctggtgttagcacaattgattggcttgtacaactcctacaaaagagaagagttacgatggagcctagctacatgtaatgtatacaacatgcatacatgcatgtgttgatggaatgaattgtattgtatcccatcccaggcagtgctacacacagatattctgtctgctgtgtgatggggtgaatttggtttcagttactccctaaatcaaatggaagttcttcttttttttttcccactgtggtttggttttcgttattattattatactaggtcagtacccgtgcgttgcaacgggaacatataataccatgataacttatatacaaaatgtgtcttatattgttataagaaaatatttcat

SEQ ID NO: 207702 - DNA, 2431 bp, Zea Mays
ctagagattcgtctacattatgagatcccaaatacatcggagttatttgttcacagcaagggagaactgcacgagcagggaagaaaggcagtgcaattctaatatacacgtatgaacagactagagctgtaagggtcatcgagcaagatataggatgcaggttcacagagcttccgaagatgccagtttcagacgaggctgcagacatgtttaatgtcatgagagatactcgctctagatcagttggaagcagaagaacaggtggaccttttagccgtgaaggttatggtgactttgaagaccatcgttccagaggcttcggtgattttgagagatttggtggttcctctgaccgcggcggtggattccgtgactcaggttcaaggtaccacggtggatctggaggtttcagacgatcttccagtgactttggcaggcctagcttcagtcgttctgatagatttggcgactttggagacagtgatttcagcagacgtggtaacgctgactttgggcgttcccggagctctgatgattcaggctcctcacgttatccaagaggctatggtggttctggcacgtcagattccggcaacttcggtggcttcaagggttccaagtgatgaatcggatagggttttcttgtacagttctgaaccttttctaacacctgttgttaaatcttaaatcctcccggggagcctgggaggccagatatttttaccaacgaccacaagcgcagatgggctagcccaaaatcgtccagggcccaagaaaacgaacaaaagtgcacgggcttcctctttcctgccaggagaggcacccacgacggcgacgcattggattggcttgggacagaacgagcgacggcgaggagacggcgataagatttgctacacctcggactgtagctgggagactgcacgaacggcggcgtccacgagtcacgaggagcccagaggcttcttcacagcagcagcggcaggtccgctgatgccagactccccccagctccaccaaccgcctccccctcccgcgccgccgccggccagcgcaacaccagccgcgccagcggcagcaaatgcgcaacccaagctgactgccgtgaagctgaggatgatcatcaagggcgtgctcgggcggtaccagcgctggaaccccgtgcacccgacggccggcaccttctggggtgtggggctcggcgtcggctgtggcgtcggctggggccccggcttcgggcctgaggtgattgggtacgtaggcgccgggtgcggcgtggggttcagcgttgggttcacgctcgccggcgtcggcatcggcctgccgcagcacagcctcatcaggaaccacgaccacggtggtaattagtcatgctctgttattgcgtccccttcaataaataatccatgtgcaccacggttggtattggtgtactaattcttggatccagtgtgagtttcagttagtgtagtgcagtagtgcttttattatctctacctgattgttgtgagaaatagaatggaaatatttgggcaagtagcaatcaattaattggtgatttggtggaaacaaatgtctgtagttggatattcagtcaaccatgcttcacctgtccttgccagtgttagttggtgcacatgatttagcaacctgacagtatgctatcattactgatgcacaattagcaggcctcaccgcctcagtgcaggcccgattatttgttgctattcccgacctttgtgtacaagcatctgacacatgaatgacggacagatctgccttctgaatttcacctacaggttttgcgagcagcgtccctgttgattcagcgagattctacgccctaaccatcatcagaggtctggtatgggacgccatcagctacgtgggcaatgcagcggctatgaggaaagaatctcgacagaagcttccgaggttccaggacagccctcaggttccaggaggagttgatctgccgaagctggggaagggcgtgtcgagtagcatccggtccacggtagaatgcatcagggccttcaaagatcagcgttggcctccttaaaagactcgttggaaatcaaagctggtttcaagttgaatggtaccgccatgggaacttaaacatggtgatatacaagtttttgttttttgttttgttttgttttgatatggaaggggaaattagttgttctagctggaaatgttagtctgcattctagatattatttttgttatgtggatgcatctgtaaatatgactgctgctcttttgctccctccttattcaagcactgtgaaacagggattgtagcacgaaatagaatagaattcccctcttaaattaaccatgtagccctacatctgtgctggtctgtggatgccatggaagtttgaaagcgtataattgaggcatgccttcggtgcagccgtct

SEQ ID NO: 207703 - DNA, 2774 bp, Zea Mays
aaaaattcgggtccagtgttcagtgggcggcgacggcggttctctaaggtcgactccggcggaaggatttggacctcgccaccatcgttgattcgtcggatccgcggtccagaggagaaggcctgagccaagtgcatgattgacataaaggacaatgttccatgagtgggaggtgccgagctggtgaagtttcagtgcccttcttacaagataagcgaattattgttggccacctatttatagtttctgtttcttctagttgtagttcttgagaaggctcttagatatatattctttaagtttagtgcatttatccggatattcacaaattcaatttgtaattgaattcaccaatcaatcaccactgtatcttcagagaaagacatccccgcacacatacaatgaagagaaattgtctaagttagtgactctcagctagggctagaaacgagccgagctcggctcggtgcggcttggtgcctgaacgagctgggctcggctcgtccattccacgagctggcgaaagaggctcggctcgaccttgactcgcgagccatattctggtacttatcgttgcattatttggtgaattaacattatataaatttgaaatatagaatcatcattgaacattatgagtaaattaaattataacttgtaatatattcatcatcgaagactaaaaaatgagctattatctataaaattatctaatattcattattatttcataaattgatcatttttgcaaggctcgcgagccggaacaagccggctcggctcggctcgctgcaaaaacgagctcaaagaaggggctcggctcggctcgttcgaggctcgcgagccgctccgagccgagccgctccgagctcgagccggctcgggagcctcgagcttattttctagccctactctcagccaagcaactcgagtgtgtttggttggacgtacaaggagggatcgaagggggtggccacagtttctatagtgtttggataagagtcacgtgggggcgaggtaaacaccgtagtaatttttgatgacggcgtgatccaaaaaaatcgaggggacggtgtcgccctcacctcatcctattttgaccttaaatcaaacacatactaaggaatcatcgaggacatgtgagggtgctcccattgtgcggcagcaaacccctcttccagtttactgcttttttcactattattattgcttctatatgttccaagcacttgtaagcttctgataactgcgaactaatttaaaaccggtaaccgtgaactaacttcaatttcactaccattcattttactcacaagagctcaagttgcaaacccccacaggtgaagctaatgatagctttatatatcgttttcacgttggtcacatttgtgtcttaatgaattaggttttatcctatttgtctctagaactcctctagcagggaggagattttgaagcgaaagtcagcttgtggagcttggttttgacagctgtaacacaagcgctcaagctgttcaaagggaagcataatcgaaacttgtctaatggaaagagagtagaaattgaattgaaccattctatttctgattttgtggctttggcctttttcatgttaacctattgttttcctgtaatcaatgtaacttttcaaacgagctatggtaatagacaaaagagaacatatctggtgtacatggaagtttagtgcacatattaaatcatcagcattcatcttatatctaacgtatgtagttgtttggtatattttactaatcacaccctccaacgtggtggagtgtagtggtggaatgtgttatttataaattgcaataatcaactagagacgttagatataagatgagtggtgatgatttaatatatgcaccatatgtactaagcttccatgtgcactagatatgtcctctagacaaaaatagggaaacattaaacaaaatgtggaggtttgatgtcatttttttaaatgactatctcatttatacgagtctatttagatgatatataaaaaacgtagtaatgcacgaacatctaactagtgatttctaatgcctcatcaatgcctgatatttcaccctgacacaagtttaccttcagtccacaacagttgttagaacaagcataaaagggatatttatagacctctccaaatcagtttgcacccaaaaaaacagtatggtaataaaaagagttgtattggatgtttcaataactggcagcaaaaccatctgcacgggtgcatagtttagtgtaagattcagatcgtgagattggagagcaaagttgtgcagctgttggctaggctaggctggttgatacatgctagattgctagtggaaggaacagttgacttcagcgttcttggtacttcatgacactgacaggctggtctgtttctcctgcctgctgtgcgttaagcatttagaatctgaatcctgcaatttcaagatgatcacatgccttccaaatttcttatgcgttggcaccttaccgaatgctgaacaactattagttgcatgtgcaaatctcatggctagagttggcatgctatcagttaaaggagcaagatccactttattaggatcttatgtctatcgttaaaattaacaggccgataatggaccgaatcatcagcaccttatgatagtttatttttctgaagaaacttcaactgcagcactcccatttcattgattgtttttttttatttagctgtcctccatgttgaacgagatgaaagatggaaagcgaaaattgac

SEQ ID NO: 207704 - DNA, 708 bp, Zea Mays
ccgccgcaccgcatctcccgtccgtcgatcggatttccccactccacccccaacgcggtcgcgtcaactccacctgcgcccctcaggccctcacgagtcacgacctcgtcttcgcgggcgccgccgaccggatcctcccgacgctatcgcggtcaaccctgcctgcaccctcacgacctcgtcttcgcggtcgcacatgatcacgtggtcaaatcccgctccgttagcaagtaccaccagcagcaagccagcaacccaatgctgtgctcctcccacctcctgctgcgcgcacaagtcaactcctgtctgcggccgccgcgccccacgccggtccccatggctcgttccgctcccactttcgtcgctgtttttctcctagtcctcgtgcttctcaccatggacgcggcgcagggtcaacagccgttcccgctgtccaccgatccatccgacgcggatgctctgcacgctgtgttccggcagtggagactggagggcggcgcggcgatggaggacccgtgcaggaagggcgtctggtcagagtcgtccggaataaacgcgtccgtcgaatgcaactgcctcccctcaagggtgtgccgcatcacaagcctaaatgtgagtgggcacgggaacatctcggcgatcccgcgggagctattcaatttgacagaactggtctctctgtgcacttctaatctattgactactttc

SEQ ID NO: 207705 - DNA, 2534 bp, Zea Mays
cgcaccgcatctcccgtccgtcgatcggatttccccactccacccccaacgcggtcgcgtcaactccacctgcgcccctcaggccctcacgagtcacgacctcgtcttcgcgggcgccgccgaccggatcctcccgacgctatcgcggtcaaccctgcctgcaccctcacgacctcgtcttcgcggtcgcacatgatcacgtggtcaaatcccgctccgttagcaagtaccaccagcagcaagccagcaacccaatgctgtgctcctcccacctcctgctgcgcgcacaagtcaactcctgtctgcggccgccgcgccccacgccggtccccatgggtcaacagccgttcccgctgtccaccgatccatccgacgcggatgctctgcacgctgtgttccggcagtggagactggagggcggcgcggcgatggaggacccgtgcaggaagggcgtctggtcagagtcgtccggaataaacgcgtccgtcgaatgcaactgcctcccctcaagggtgtgccgcatcacaagcctaaatgtgagtgggcacgggaacatctcggcgatcccgcgggagctattcaatttgacagaactggtctctctggatttaagtaataacaacttgagtggttcgatacccccggaagttattaatctttccaaactggaaacatggcacttcaataataatcctctcagtggaggttttcctcatgaactgtcgcttttaaggaatctacggtccctgtggatgtttgataattacattgtagggccttttccggcatttattcagaacttaaccaatctcacagacttgcgaatatatgggacgaatcttcaaggacctattccaaaaaatttctctaatctgagcaatcttgaagtcctgatgcttggtgatcttgcgggcaaccattcttatttaaatgtcataggagcgtgggcaaacctttcagtgttatctctgagaaaatgtggtcttacaggtcaggttcctaatactcccccaaacttgcccaagctaaaatatctggatttgacatcaaacaacttatcaggatcaataggaggactcttgctttcatataagacctcaaattacatatatgtaggtggaaacaacttaagtggacctgtgccttctgaaattgttcaatcatcagtttccttggatgtttcgtataactattatgttgacggatccctttctaacaatccttctggtcagaagcagttcataaattatcttggaacatcaattgatgcaagtggaagaatcaacagtggaaatcttacaatcctgaactgccttcgcatgaacgaatgcaacataaataatttaactaatcgtgcaacttccttcgctataaactgtggtggcaagcaagtggagtattcagatctaatgccaattatgttctctgaagactccactgatcttggaggatcaggctttcatgttaatgctactagtcattgggtagttagtcatgtgggttctgatccatttaacgaatccaccggtattgtaaatacaagtgatatttttgaaaccaacatgcaagagctctaccaaacagcaagaacttcaacaagttcgttgtggtactatgtggtaggtttagctaacgggaactacacagtccaactcttctttgcagagatagtcataactcatggacctggaaagcgcttatttgacattgatattcaggaccagaatatcaggaaggactttgacattactaaggaagcagggggttccagaaaagccactaacataacctacgaagtgactgttgataactccatactggcaatacatctgtattggagtggacgcggcacctgttgtattccatatgaaggagcttacgggccactagtttcagcaataaaagttacccattcccaagacccgaaaaccagtcccccacaagcaccacattctgattctgcccgagatgatgtaaagcgaagaggagtggttgcaggcattgcagcactttccatagctgctgcggtgatatcttcatctgttgtctacctttggtggaaatgggtttcacttgtgaagcgcccaatggcatgagttcgtcagatgtttgcatatagttgattctcccacaaatttccatgtcatgcgaaggactctatgtatttgtcttttagcgttggctgctagcaactagccaactagcatagccaagatgactgatgtacagttgacgttgcgatcacggttttaggtctcaagttttgtttcacgattattgtaacctaggaaattatctaagacattctgctgctaatatgttgtttgtttgttgatcaaagtgattcaaatcgcattgtgatatattgtttgtttgtcgatcaaactcattgtaaaactattctcggacgaatgtcacatttcacgtgttgccaacttactgatcgacttccagttgcagtgtgtgtatttgtttcgcatgagtagaaaggtacgatataactatctaacatcatattctttgttcgcgaaaat

SEQ ID NO: 207706 - DNA, 2519 bp, Zea Mays
cgatcggatttccccactccacccccaacgcggtcgcgtcaactccacctgcgcccctcaggccctcacgagtcacgacctcgtcttcgcgggcgccgccgaccggatcctcccgacgctatcgcggtcaaccctgcctgcaccctcacgacctcgtcttcgcggtcgcacatgatcacgtggtcaaatcccgctccgttagcaagtaccaccagcagcaagccagcaacccaatgctgtgctcctcccacctcctgctgcgcgcacaagtcaactcctgtctgcggccgccgcgccccacgccggtccccatggctcgttccgctcccactttcgtcgctgtttttctcctagtcctcgtgcttctcaccatggacgcggcgcagggtcaacagccgttcccgctgtccaccgatccatccgacgcggatgctctgcacgctgtgttccggcagtggagactggagggcggcgcggcgatggaggacccgtgcaggaagggcgtctggtcagagtcgtccggaataaacgcgtccgtcgaatgcaactgcctcccctcaagggtgtgccgcatcacaagcctaaatgtgagtgggcacgggaacatctcggcgatcccgcgggagctattcaatttgacagaactggtctctctggatttaagtaataacaacttgagtggttcgatacccccggaagttattaatctttccaaactggaaacatggcacttcaataataatcctctcagtggaggttttcctcatgaactgtcgcttttaaggaatctacggtccctgtggatgtttgataattacattgtagggccttttccggcatttattcagaacttaaccaatctcacagacttgcgaatatatgggacgaatcttcaaggacctattccaaaaaatttctctaatctgagcaatcttgaagtcctgatgcttggtgatcttgcgggcaaccattcttatttaaatgtcataggagcgtgggcaaacctttcagtgttatctctgagaaaatgtggtcttacaggtcaggttcctaatactcccccaaacttgcccaagctaaaatatctggatttgacatcaaacaacttatcaggatcaataggaggactcttgctttcatataagacctcaaattacatggatgtttcgtataactattatgttgacggatccctttctaacaatccttctggtcagaagcagttcataaattatcttggaacatcaattgatgcaagtggaagaatcaacagtggaaatcttacaatcctgaactgccttcgcatgaacgaatgcaacataaataatttaactaatcgtgcaacttccttcgctataaactgtggtggcaagcaagtggagtattcagatctaatgccaattatgttctctgaagactccactgatcttggaggatcaggctttcatgttaatgctactagtcattgggtagttagtcatgtgggttctgatccatttaacgaatccaccggtattgtaaatacaagtgatatttttgaaaccaacatgcaagagctctaccaaacagcaagaacttcaacaagttcgttgtggtactatgtggtaggtttagctaacgggaactacacagtccaactcttctttgcagagatagtcataactcatggacctggaaagcgcttatttgacattgatattcaggaccagaatatcaggaaggactttgacattactaaggaagcagggggttccagaaaagccactaacataacctacgaagtgactgttgataactccatactggcaatacatctgtattggagtggacgcggcacctgttgtattccatatgaaggagcttacgggccactagtttcagcaataaaagttacccattcccaagacccgaaaaccagtcccccacaagcaccacattctgattctgcccgagatgatgtaaagcgaagaggagtggttgcaggcattgcagcactttccatagctgctgcggtgatatcttcatctgttgtctacctttggtggaaatgggtttcacttgtgaagcgcccaatggcatgagttcgtcagatgtttgcatatagttgattctcccacaaatttccatgtcatgcgaaggactctatgtatttgtcttttagcgttggctgctagcaactagccaactagcatagccaagatgactgatgtacagttgacgttgcgatcacggttttaggtctcaagttttgtttcacgattattgtaacctaggaaattatctaagacattctgctgctaatatgttgtttgtttgttgatcaaagtgattcaaatcgcattgtgatatattgtttgtttgtcgatcaaactcattgtaaaactattctcggacgaatgtcacatttcacgtgttgccaacttactgatcgacttccagttgcagtgtgtgtatttgtttcgcatgagtagaaaggtacgatataactatctaacatcatattctttgttcgcgaaaat

SEQ ID NO: 207707 - DNA, 1522 bp, Zea Mays
ctctgagaaaatgtggtcttacagggatttgacatcaaacaacttatcaggatcaataggaggactcttgctttcatataagacctcaaattacatatatgtaggtggaaacaacttaagtggacctgtgccttctgaaattgttcaatcatcagtttccttggatgtttcgtataactattatgttgacggatccctttctaacaatccttctggtcagaagcagttcataaattatcttggaacatcaattgatgcaagtggaagaatcaacagtggaaatcttacaatcctgaactgccttcgcatgaacgaatgcaacataaataatttaactaatcgtgcaacttccttcgctataaactgtggtggcaagcaagtggagtattcagatctaatgccaattatgttctctgaagactccactgatcttggaggatcaggctttcatgttaatgctactagtcattgggtagttagtcatgtgggttctgatccatttaacgaatccaccggtattgtaaatacaagtgatatttttgaaaccaacatgcaagagctctaccaaacagcaagaacttcaacaagttcgttgtggtactatgtggtaggtttagctaacgggaactacacagtccaactcttctttgcagagatagtcataactcatggacctggaaagcgcttatttgacattgatattcaggaccagaatatcaggaaggactttgacattactaaggaagcagggggttccagaaaagccactaacataacctacgaagtgactgttgataactccatactggcaatacatctgtattggagtggacgcggcacctgttgtattccatatgaaggagcttacgggccactagtttcagcaataaaagttacccattcccaagacccgaaaaccagtcccccacaagcaccacattctgattctgcccgagatgatgtaaagcgaagaggagtggttgcaggcattgcagcactttccatagctgctgcggtgatatcttcatctgttgtctacctttggtggaaatgggtttcacttgtgaagcgcccaatggcatgagttcgtcagatgtttgcatatagttgattctcccacaaatttccatgtcatgcgaaggactctatgtatttgtcttttagcgttggctgctagcaactagccaactagcatagccaagatgactgatgtacagttgacgttgcgatcacggttttaggtctcaagttttgtttcacgattattgtaacctaggaaattatctaagacattctgctgctaatatgttgtttgtttgttgatcaaagtgattcaaatcgcattgtgatatattgtttgtttgtcgatcaaactcattgtaaaactattctcggacgaatgtcacatttcacgtgttgccaacttactgatcgacttccagttgcagtgtgtgtatttgtttcgcatgagtagaaaggtacgatataactatctaacatcatattctttgttcgcgaaaat

SEQ ID NO: 207708 - DNA, 5879 bp, Zea Mays
gtacgccacgctttatcttgcacccgctctccgcgagctacagcatacagctctgtagcgccttctctctctctcttggctcgctcgcgctgtggagctcaagaccctcgccattccgccgcgggaaaccctaaccctagccctcgcaccgctacgggaggcgcgggagagtccgggtcgcgccgcgccgccgatcccgatccagacgccgttgcgcggagccgcgctgatcgagtctctggtggaatagaggacggacactatttcagattgcttggtgctagtttatttttccaactcagggtggacttctgggtctatctttctcatcatagaagcaaacatttgtggaagctgcttatagctatatatgatatgaaagtttgggaaccatcaactgcaaattggccactctttaacgggcattagacccttagggacacttcaggaatgtcacattttcatcccacacagcatgcgggtgacaatgattttcagatgtggcagcagcagatgatgttcaagcagttgcaggagtttcagaggcagcaacaactacagcaatctgatcatggagccaggatgcagccatcttttggccagtttcatgctcctgcaaaacctttacctgctgatcaattgtcgacaatgtcaaatgaaatggccaacaatgaggccatgaattctgcatggccacataattttacaggtggtgatcccagtttgacaagcaactcccaaatgttgaataatggtagcacaaattgggatcagattgttggtgctcctggtgtaggcaatttcatgaacagttcaatgtttgcgaatgctcagaatcaatcgatgagaccaatgggaatagctacccaccaagtggatcaatctttttatccaatgcatcctaccagcagcagagggcatggaaaccagtattcccaatttttagggattcatgctgattctcagagtgcagtggcaagggttggtccagatcagtcagaaaagacatccagaccattcaactcttcaatgaatgaacatggtcttcatatgcaaggtcctgccagttcgatgcataattttcgtggaaaagggggtttcttgaataacagtctgatgcaaagtcaaggtgatagtatcagggcaggcagtccggttacagtgaatcaactacaacatggtattcaaacccaagattttcatggtaggtcaaaccaagttgaccttcaagtgggcatgcaagataaatcagcaatgcaggtagggcaagcaagtcgtggggctagccttgaccccaccgaggagaaaattttatttgggggcgatgaggatggcaactggggagctttgttgaggggcgacaatgataatggcaattctttggacaatgataattatggtggtggctactcatctctacagagtggtagctggagtgcccttatgcaggaagctctccagtctacaaccagtgaaaacagtcccaaagaagagtggagtggcttgagtttccataaaactgagcaggtgatggctaacaatgcaactttatcaggccatgatgataataagcttactaggttaagcggtgcaaacctagaaaatgcacgtccttcaccaacatccagctacgctgatggaacaatgaataacccaaatctcgccagttttcagcatgccataaggcctccattcgagcgaagggaccatatgactcatgaatctcctaatgctcctgttaacaatcatcaatcaacttctgaagtcaacaatgggtacattcaacatggcttaaaacaaattcaatctgatggaaggcaagaacaagtgcacctagcaaatggaatttggccacatcaaaagactgaactgctcagaaataattcacagtcaactggtatgcatgctacaccacctggtgcacatggattttggatttcacaacaaaatacagctgatcacaatatgaatagagagtccagtaataaccaaaatgactggaaagctaacaatgtgcttggacaagacatgcacaatagccaaaatgtcttcaatagcaatgagaactcttggaagtcaactggaggtaatgttaattcagtccagagacttcagcagaggaagtctgatgtaagcactactaatgaaagttcagatggtaaaagtattagcatgatgagctcaagcatgtcaatgatggcacaggatcattatcagatggtcactagtcggagtggcgagcaaattggcatgaaccgtaatatggcgcatagagctccagaaatctctgaatcaccaagaaaaagcacagaacaaagaccaggtgatttcaaccaggaatatctaaatgcaactcctaacgaaaggcaaacacacactttaaaccatggacaacacataagtgattctgcccccagaaggcattctatatttgctgggaaggaatccgaaaatttaggtcagtctagtcagcaagcaatgggatcttacatgttgcaaaatcgtgctatggggagctctggaatgaacattggcccatctccaggcaatccagtgtcaaataatctgtttccacctcagatgcgaaataatctgcagcatcattttggcacaaactcccttgtttccaataatatgccttcagtaagtgagaaaatgatgatggcacaggaacaacttcaatctcgacatggtctccctaatagctctagtgcattaccttttggaggagctgatactggtctgtctcagaacagagcagttcaaaacagtcaacatatgcttcagcttcttcataaggtggataactcaagaaatagcgatgtggctgctgacatacccaacaacccccttggcgttgtttctgcccagcaacaacctaaccattctttgcagggatttgggttgagactggcaccaccatcccaacgccaatcaaattcgggtaatttatggtctagtcagactaatgttgatggcaagcaatctgaccactcagcacaagatgatgaccgcacaccacaaccttccacgcctagccagtcattgactcctcagcatcaaaactctcaaccttcaccatttcacagttcagaaacagaaaataccgggcaaccaattgcacgctttccccagttaagtccaggtcaacattatcctgtcacagatgatagatctggtcctgcacccatgctgcagcagcagtctcagcaaagcaacttcgcaacagtattcaagaatgtatggacaaacatatcagcacagcgcctaggtggtatgcaagctaacaagattacacccaacatccttcagtctatgatgtttccaaataattcttcagcttccaacttatggagctctcagaaggcagatgatcaagggcagagggcatcaactccatcagatattgcaacaacttcagctaactcacagaatcaagatccaaaacgagctgctgataatgatgcagggttagcatcttcccagaaggcaaacctagagtcgaaaggaactaccgtaacaggaggaaatgaatccttgcagaagcctttttcagatgggaattccatgaatgctgtttcatcctttgcacaattgcatcagcaaggcatccttggtgctaaacatggggaaaacccaggagccaattttcaggctatgaattcttcccacaatagtgttaataatagtggtggcattgttttacatggaagcccagcaccttcaaacattcagcagcaaaattactctcttctacatcaaatgcatgccttgaggcatacggatattgatccaggcagtttagctggaaagacgacaagacctgatgttggttctgatgcttcacagattgactggaaatctggccagaggtttgctcatgtagacaataaccaaaccaaatcagctgcagataacgttggaagccctggtgtcccagggtcattcacttcagacatgaaaatactgagttttgcttcaaggagtgaggagagaaatgtcaatataccttctcatcttccatctggagagcgcccgtttcctggtatggttactgcacaaaatgataatcagaatcaagttcagcctatgggcacaagtgcaacatcaaattctgttgaaagcagtgagaggccgaggataaaccctcaaatggcaccttcgtggtttggacactacggaaactatagaaatggtcagagtgttgctgtgcttaatgctcagaagcccacggctttgccatataattttccgaaagttccttgtaacaatgaaaataataactctgctgaaaatagagttgaatctggccaatctgttacgcctgggcatcatctcccatcaacaagaatggaagctttggttccttccaatgtaaaagtatctccaatgatgagaaggcctaagaagcgtaaagctatggactctgcacttgtttcttggcataaaataattgaaagcccacaaaacttgaggagcatcagcacatctgagatggactgggcttgggcagctaatcggttaatcgagaaggatgaagcagaaacttcagacgatacttctttacattatttaccgcggaagaggctaattttgacaacccagttgattcagcaacttctcccttctataccagcaaccattctgagagctcaagctgtgtctgcttttgaaagtgcgacatacactctatcaatgctgacactaagggatgcatgcagcatggcatcatcatcattatataactcttgctcccctgtggaggatgaaaataacccatctgaacaaacaagaagtgctaagaaaatggaagacaaagtgtctaaggtcgtggaagtctttgttggaagaatccggaagatggaaaatgactttataagtttgaacaagagggcctcgatgttggatgtgcaactggagtgccaagatctggagagaatttctatcgtaaatcgtttgggaagatttcatggccggaaccatgcagcagcagtcgagagttcatctgcttcagaaatgactccccggagaatttttcctgaaagacatgtcatgtcttttgcagtccctggaaatcttcctgaaggagtacactgtttatcactctagtggaatgatcttcaattactctctagccactcagatgatctcaggttgcgccccgtgattcccagtgctccttatccatgcaaaacatggccaaacagaagagtcatattatcaagaggtaactagagaaccggaagcgtcacaataccacgatgagggcaggccaggggacgtgttccagccgatcaagtctgtgctggctgtggttgttgtcccttatatcaagtataggtccatgtatattgtggaaagtcaaggaaaaaactgtggatctcccatcatttttctctgatgaagagtaattaacttcagatttttttagagaagtcgatgcatactagcttagtacatctagcgagtttcttcgctatttgtcagtctctaagaaatccctgatgatggagtgttggcaggctagagtggagataataatgtgagcctttctctgggttctttggttcctttaggatgggatgcaaattggctagtgtgtccagtctaactgaccacccttgttaggcagcagttaattactagttttatgtagtgctgaaagcattcatggaacaagtggcgggtaaagtgcttggaaattcttgtaacttgtgtacccgtgatgtttaaagcgctaacgggctattgtaaatttaaagtgccaatattcctgaggttatattttgtttcatgcaaattggctagtgtctccagctgtgtcagtgtgttaaggtaactgaagctgagctggttgctcagcccatacaaaatgtaac

SEQ ID NO: 207709 - DNA, 5824 bp, Zea Mays
ctacagcatacagctctgtagcgccttctctctctctcttggctcgctcgcgctgtggagctcaagaccctcgccattccgccgcgggaaaccctaaccctagccctcgcaccgctacgggaggcgcgggagagtccgggtcgcgccgcgccgccgatcccgatccagacgccgttgcgcggagccgcgctgatcgagtctctggtggaatagaggacggacactatttcagattgcttggtgctagtttatttttccaactcagggtggacttctgggtctatctttctcatcatagaagcaaacatttgtggaagctgcttatagctatatatgatatgaaagtttgggaaccatcaactgcaaattggccactctttaacgggcattagacccttagggacacttcaggaatgtcacattttcatcccacacagcatgcgggtgacaatgattttcagatgtggcagcagcagatgatgttcaagcagttgcaggagtttcagaggcagcaacaactacagcaatctgatcatggagccaggatgcagccatcttttggccagtttcatgctcctgcaaaacctttacctgctgatcaattgtcgacaatgtcaaatgaaatggccaacaatgaggccatgaattctgcatggccacataattttacaggtggtgatcccagtttgacaagcaactcccaaatgttgaataatggtagcacaaattgggatcagattgttggtgctcctggtgtaggcaatttcatgaacagttcaatgtttgcgaatgctcagaatcaatcgatgagaccaatgggaatagctacccaccaagtggatcaatctttttatccaatgcatcctaccagcagcagagggcatggaaaccagtattcccaatttttagggattcatgctgattctcagagtgcagtggcaagggttggtccagatcagtcagaaaagacatccagaccattcaactcttcaatgaatgaacatggtcttcatatgcaaggtcctgccagttcgatgcataattttcgtggaaaagggggtttcttgaataacagtctgatgcaaagtcaaggtgatagtatcagggcaggcagtccggttacagtgaatcaactacaacatggtattcaaacccaagattttcatggtaggtcaaaccaagttgaccttcaagtgggcatgcaagataaatcagcaatgcaggtagggcaagcaagtcgtggggctagccttgaccccaccgaggagaaaattttatttgggggcgatgaggatggcaactggggagctttgttgaggggcgacaatgataatggcaattctttggacaatgataattatggtggtggctactcatctctacagagtggtagctggagtgcccttatgcaggaagctctccagtctacaaccagtgaaaacagtcccaaagaagagtggagtggcttgagtttccataaaactgagcaggtgatggctaacaatgcaactttatcaggccatgatgataataagcttactaggttaagcggtgcaaacctagaaaatgcacgtccttcaccaacatccagctacgctgatggaacaatgaataacccaaatctcgccagttttcagcatgccataaggcctccattcgagcgaagggaccatatgactcatgaatctcctaatgctcctgttaacaatcatcaatcaacttctgaagtcaacaatgggtacattcaacatggcttaaaacaaattcaatctgatggaaggcaagaacaagtgcacctagcaaatggaatttggccacatcaaaagactgaactgctcagaaataattcacagtcaactggtatgcatgctacaccacctggtgcacatggattttggatttcacaacaaaatacagctgatcacaatatgaatagagagtccagtaataaccaaaatgactggaaagctaacaatgtgcttggacaagacatgcacaatagccaaaatgtcttcaatagcaatgagaactcttggaagtcaactggaggtaatgttaattcagtccagagacttcagcagaggaagtctgatgtaagcactactaatgaaagttcagatggtaaaagtattagcatgatgagctcaagcatgtcaatgatggcacaggatcattatcagatggtcactagtcggagtggcgagcaaattggcatgaaccgtaatatggcgcatagagctccagaaatctctgaatcaccaagaaaaagcacagaacaaagaccaggtgatttcaaccaggaatatctaaatgcaactcctaacgaaaggcaaacacacactttaaaccatggacaacacataagtgattctgcccccagaaggcattctatatttgctgggaaggaatccgaaaatttaggtcagtctagtcagcaagcaatgggatcttacatgttgcaaaatcgtgctatggggagctctggaatgaacattggcccatctccaggcaatccagtgtcaaataatctgtttccacctcagatgcgaaataatctgcagcatcattttggcacaaactcccttgtttccaataatatgccttcagtaagtgaggaacaacttcaatctcgacatggtctccctaatagctctagtgcattaccttttggaggagctgatactggtctgtctcagaacagagcagttcaaaacagtcaacatatgcttcagcttcttcataaggtggataactcaagaaatagcgatgtggctgctgacatacccaacaacccccttggcgttgtttctgcccagcaacaacctaaccattctttgcagggatttgggttgagactggcaccaccatcccaacgccaatcaaattcgggtaatttatggtctagtcagactaatgttgatggcaagcaatctgaccactcagcacaagatgatgaccgcacaccacaaccttccacgcctagccagtcattgactcctcagcatcaaaactctcaaccttcaccatttcacagttcagaaacagaaaataccgggcaaccaattgcacgctttccccagttaagtccaggtcaacattatcctgtcacagatgatagatctggtcctgcacccatgctgcagcagcagtctcagcaaagcaacttcgcaacagtattcaagaatgtatggacaaacatatcagcacagcgcctaggtggtatgcaagctaacaagattacacccaacatccttcagtctatgatgtttccaaataattcttcagcttccaacttatggagctctcagaaggcagatgatcaagggcagagggcatcaactccatcagatattgcaacaacttcagctaactcacagaatcaagatccaaaacgagctgctgataatgatgcagggttagcatcttcccagaaggcaaacctagagtcgaaaggaactaccgtaacaggaggaaatgaatccttgcagaagcctttttcagatgggaattccatgaatgctgtttcatcctttgcacaattgcatcagcaaggcatccttggtgctaaacatggggaaaacccaggagccaattttcaggctatgaattcttcccacaatagtgttaataatagtggtggcattgttttacatggaagcccagcaccttcaaacattcagcagcaaaattactctcttctacatcaaatgcatgccttgaggcatacggatattgatccaggcagtttagctggaaagacgacaagacctgatgttggttctgatgcttcacagattgactggaaatctggccagaggtttgctcatgtagacaataaccaaaccaaatcagctgcagataacgttggaagccctggtgtcccagggtcattcacttcagacatgaaaatactgagttttgcttcaaggagtgaggagagaaatgtcaatataccttctcatcttccatctggagagcgcccgtttcctggtatggttactgcacaaaatgataatcagaatcaagttcagcctatgggcacaagtgcaacatcaaattctgttgaaagcagtgagaggccgaggataaaccctcaaatggcaccttcgtggtttggacactacggaaactatagaaatggtcagagtgttgctgtgcttaatgctcagaagcccacggctttgccatataattttccgaaagttccttgtaacaatgaaaataataactctgctgaaaatagagttgaatctggccaatctgttacgcctgggcatcatctcccatcaacaagaatggaagctttggttccttccaatgtaaaagtatctccaatgatgagaaggcctaagaagcgtaaagctatggactctgcacttgtttcttggcataaaataattgaaagcccacaaaacttgaggagcatcagcacatctgagatggactgggcttgggcagctaatcggttaatcgagaaggatgaagcagaaacttcagacgatacttctttacattatttaccgcggaagaggctaattttgacaacccagttgattcagcaacttctcccttctataccagcaaccattctgagagctcaagctgtgtctgcttttgaaagtgcgacatacactctatcaatgctgacactaagggatgcatgcagcatggcatcatcatcattatataactcttgctcccctgtggaggatgaaaataacccatctgaacaaacaagaagtgctaagaaaatggaagacaaagtgtctaaggtcgtggaagtctttgttggaagaatccggaagatggaaaatgactttataagtttgaacaagagggcctcgatgttggatgtgcaactggagtgccaagatctggagagaatttctatcgtaaatcgtttgggaagatttcatggccggaaccatgcagcagcagtcgagagttcatctgcttcagaaatgactccccggagaatttttcctgaaagacatgtcatgtcttttgcagtccctggaaatcttcctgaaggagtacactgtttatcactctagtggaatgatcttcaattactctctagccactcagatgatctcaggttgcgccccgtgattcccagtgctccttatccatgcaaaacatggccaaacagaagagtcatattatcaagaggtaactagagaaccggaagcgtcacaataccacgatgagggcaggccaggggacgtgttccagccgatcaagtctgtgctggctgtggttgttgtcccttatatcaagtataggtccatgtatattgtggaaagtcaaggaaaaaactgtggatctcccatcatttttctctgatgaagagtaattaacttcagatttttttagagaagtcgatgcatactagcttagtacatctagcgagtttcttcgctatttgtcagtctctaagaaatccctgatgatggagtgttggcaggctagagtggagataataatgtgagcctttctctgggttctttggttcctttaggatgggatgcaaattggctagtgtgtccagtctaactgaccacccttgttaggcagcagttaattactagttttatgtagtgctgaaagcattcatggaacaagtggcgggtaaagtgcttggaaattcttgtaacttgtgtacccgtgatgtttaaagcgctaacgggctattgtaaatttaaagtgccaatattcctgaggttatattttgtttcatgcaaattggctagtgtctccagctgtgtcagtgtgttaaggtaactgaagctgagctggttgctcagcccatacaaaatgtaac

SEQ ID NO: 207710 - DNA, 1102 bp, Zea Mays
ttcactagtttgttatcggacttaggctattttcaataggacatcatcacacttgtgacatggcattgtaattaatagaagagaggtagatatagtttcatggaagattatagagtttcatgggatttaaatctgatgtggtagcattggaaacggtacattaaagcattgcatgagaatgaccttataaatcatagacccagtcatagatacggaagtagtagagataaaaaaggcaaaataacgacttttttccgcgcgtttgggccatgcataactttacgtgggccctgcataactttactttgggccatacggctcgttacaagggcccagtctttggtggaatccgcctgtctctatcttctccatccgtgacacgtccggcagctccatcgagttcgaggactagccgccgccgccgcacctgcacgcacgccaagggacgggagagcaagagggagatccgaggaggtcaaagatgatctaccgcaattggtcgctgctctcgtcgacggtcgtcatctggggcggcgtcgccaccgccggcctggccggtatcttcctcttgggcggcaaggagaaattcagtcagtatctgtgccgcgaaggcgagaggcttaggcagcaggacagagccacgatcggcatgcaaaactagagaggaagcatatgtaagcctgttcgatatataaaggtcagaaaagcttgctctgtatgtcagcagtaataaaacttgtgctggctttcaatttccccagcaaaacttgctctgtatgtcagtagtaataagctgactctggtttgtcgtgggttcagtgcttgtttggcatcaacttgtgcgacatggtacacttctgaataaagtattttctaggcacgattttaaaatgacgggtaaagagggaagaagaaaaaagaccacaggtcaatacaaaaggtagccccctacccccaccccatgaccctttcctcttggcatgcagtttttcatgttgacaactgttcagctattaactgtccaaactcaactcccagacaatttagtgtcccacagttgttgtatgtgaatccattgttttgggctctgagtccattgctt

SEQ ID NO: 207711 - DNA, 3864 bp, Zea Mays
ggccacaaacacccgcgctcgtcgctgtctcctcctcgccttttgccccgcatcgcgtctcgctgaaaccctctcggtcaccgccgctgtcgatcagacccggctgtagctcagggaccccgtcgctgcagtatcctccgagggtcgttggcgggggagtcgtcgtcgtcgtatttggctgccggaattcgatgcgccacggagcgggcgagaggacctagttgagttgaatacggcagcgacgggaggacgtgatgccgggggtggcgtccgcagcgggatcggggatctggtcgcgccggcgggacgagatcacgttcgatcgccttcagaagttctggaatgacttgcttcctcaagcacggcaggaactcctcaaattagataagcaaactctcattgaacaagcacgcaagaatttctactgctcaaggtgcaatgggttgcttctggaaagttttgcacaaattgttatctatgggaagtcactgcagcaagaagcttcagatattggtcatctgaggacagctattgaattaagaattacacatggagagcaagatggcgctcaggacccatcaatccatccctggggaggcctttcaaccacaaaagatggcttccttacgcttcttgactgctttataaaagcaaaatcattacgggtgcttcagaatgtctttgacaatgcacgggcaagagaaagggaacgggaaatgctttatcctgatgcctgtggtgcaggtggcagaggatggatcagccaagggatggctaactataggggtcatggaataagagaaatgtgtgctctacacactgcccacctttcatgtactacactggtggatttctggtcagcgcttggtgaaggaactagatcatctcttctgcggatgaaggaggaagatttcattgaaaaacttatgtacaggtttgatagtaagagattttgccgagagtgtcgaaggaatgttatccgtgaattcaaggatctgaaggaactgaagcgcatgcaaagggaacctcgctgcaccagttggttttgtgttgcagatactgcttttaagtgtgaggtgtttgaggatgctgtcgtaattgattggcaccagtgcttatcagagccagatgaatcttatgaccactttgaatgggctattgggacagatgaaggagaatccgatatttttggctttgaaaatgttggaatgaatgcacaagtccacagaaatggaatcgatcttgatcagtttgaggactacttcataacgttgcgagcttggaggcttgatggccagtgcacagagctgtgtgtaaaagcacatgcattgaagggtcaatcatgtgctcaccacaggctagtggaagacgatgccatggacagggatggaaatgattttgatggtgatgatgcccattcacagaagcatgccaagagccctgaactggcaagagaatttcttttggatgctgctgctgtgatattcaaagaacagattgagaaggccttcagggaaggtacagcacagcaaaatgcacgtagtgtttttgtgacccttgctttaaaacttttggaacagcgagttcatgtagcatgcaaagaaataattacgttggaaaaacagttgaatttattgcagaacaaacttcttgaagaagaggagaaagaaaagcgtgaagaacatgagcgcgggatgaagaggagaacaagagagagagaaaagaagaacagaagaaaagaaaggctgaaagaaaaggatcatagtaaaggaaaaagactagttgaatcaaagtcaccagacaatatttcatcttcagctccaagcaactccacagcatctatcaatgattattcgacaaatactctggactcaagagattcaggtacggaagaggaatatagtgctgaaggtgtgaatctgtgcactcctgacagctgtgtgaatcaatcttcatgtaaaaaaattaatggagaaaacagtgtccactgcaatgcagtgacagaattttctccaatggacaacagtgacatttctacatcagatcaacccaagtctttgagacgaagtccaagatcaagagattattttcctcaagatcagtcatgttggtatgatgactgcggagatgagtctggaagaattggtgaattacgatggaagtcaagggaaaagacaagaggtactgatagaagttgcaacacagcatccacctcaaataacaagacaagagagaggcactcatacaatttttgcagctgtggccatccagaagactatggagttatggacagctgtttcttgccaacagttagatctgtcagagagatgaagatagcaagaaaatcaggagttgagaaacctaaggtgcagtacaacagatgctatacattggatagctttatagtgccaaaaggaaaccatgctggttgtacacagaaaaatgctatcccaaagcaagtatgggagcctatggatgctcgaaggaagactaacttacacaacacagttcatgattcaggttcaattaacgatgttgatccactgaaacatgtggtttttgataacagcggatctcataagttcagtgtaagatgtgaatcacagcctcaggcttctgaaagttccagggatgtttgtaattcagatcaaagatgtgcaaatggtgggagaaatcaaactacttcctgtgctagtactcttatggtaaataaacaaaattgttactcagaaaatgatgaaggctccaggcatgatgtagagctgatgacgaactctgctagttctgatagcacctcgtcatgcatgagccagggagatagggaaagcagctccagcagtacaacctcttcgagcgctcaaaatccggaatcatcttctgaatctgaggaatcaccggagagaataaacagcacagtaggtacaccatcatcaagagctgcttcacggtctttgcttgaagcatgtgcaggaaatggtttcagagaataccaacccaagacaacccgcccagctcacaatgacatgtttgggtacaatgtatcccctgtccaagaccagctgctgcattaccaaatcacgcatccacctcaacaaccgccaataacaatgggatttcatgaccgttcttgggctgcaccaacgaatggaaactttcaccatatacctccagagcctattcacaaggccgcaggcagctttagagccgtgcctctgtcactgccttttcaaaacggacatcggcaggttgctgagcatactcagagagacatgaatctagagaggcacccttcgaagttgactatgctgacaggcaaggatcccccagaagacaagaacaagtcgggactaaagtatctcccagaagacaagaacaaatcatgggaggcggatgcatccttctcgttgttccaattcaacttgccaatagcttcgcctgtaacaccatcatcgaaagataagagcggaaagttggctgcaaggacgccactggttgaggttcaacctcagctttgcttgagggaacaggcagatgtgaagcagtataacctcttctcctcgaaagataatggtatattttcgtttatgtagataaattaaaaactgtgacaaatctgttatccttcgtttctgctgtctcttgctgcacttcgtgaatgatttgtgttctccggagaaaaataaaggctgttggcattttcctcttgctgtctgtatcttcgtttacctttatgtttgttcccgtgtgcgctaaaagctagcaaactgtaatgctgctgactcttgattttttttatagaacacatagatttgtgttggttcatgattcgctcctgagaacacgttaaccgggaaatgaaaatac

SEQ ID NO: 207712 - DNA, 1877 bp, Zea Mays
gagctgagctcatggtgatggggaggccaagcaacagccacgggggcgggggcgacgaggagcggctgcccctccgcggcgtgctggagacgtccccgtcccatcacgccgcggtgcaggccaaggacaaggaggccgactcctcgccgcagtgggtcttcgacttcgagccacccgaggaagacgacgaccaagatatacaagacgacatgtcagacgatctatctccgtcgccgcaaatagagtacgatcgtcttctgggcggccttctcgtcgagggttttgacgacaaatcatgcagaagcagaagaagtgcggcccaggcaccagagcatacagggaagcttcgaagcagctgaaatccggtcagagcatgagcatcaacgccacagacgactgcaactacctgttccttatcatccacgccggcttagggaaccggatgctcgagatcacttcggcgttcctctacgcgctgctcacgaaccggatcttgctcctggaccgttacaaggagatcgcggatcttttctgcgagccctttcctggaacgtcgtggctggttccttcggacttccctctgaacgacgacgagttcggccagagcagcgctgagagctacggcaacatgctgcagaacaaggctttcggtggtggtacggaccgatctttggttggcaacagactccctccctatgtgtacctccacctggacggcaactatggtttccacgacaaactcttcttctgcgaggacgaccagcagttcctgcgaggtgttccgtggctggtcatgaggacggacatgtacttcgtgccgtccctgttcctcgttccagctttccaggacgagctcggcaggctgtttcctgagaaagacaccgtcttccatcacttggcgcgctatcttttccatccgacaaatggcgtctggtattcggttacaagatgcttcaggtcctacctggccaaagcggaaaaaagggtgggaattcagatcaggatatatgaaaccaaaggtatcttgcagagaaacggcccgttcccacacattctgaaccagatcctctcgtgtgctcaaaacgagaagctgcttccagaaatcagtatggcagagggagcagccgatgggactcggaataaccgaacagcagccgggagtgggactcggaacaaccggacgatcgctgttctaacgacttctctgagcgcttggtacagcgagcagatccaggagaagtacgacgagcagtcggctgttgatggcgtgtctgtcagagtgttccagccgagccacgaggagtaccagaggtcgaggaacaaggggcacaacatgaaggcgcttgctgagatctacctattgagcatgaccgacgtgctgatcaccagtggcttttccacgttcgggtacgctgctcaggggctcgccggcctgaagccgtggatcatgcttaagtcggagaaccacgtgacgccagacccaccgtgcgtccgcgccatgtccatcgagccgtgcttccatcaagctcccttctacgactgcaaggcgaggaaggacaccgatttgggcaaggtagtgccttacgtgaggcactgcgaggacgtgagctgggggctcaagattgtagatcaaactcatttgtagtgtagctgtaatctggtcaggactcacggcagacttgcttgctaactagggcagaactattgttattcttattcttaatctgcgaaacacaaaggaaccatacaaaatgtattctttccctcctgtatttgatccaagtgtagatagttgatagacagatccattaatctgttcatcctctgatgtcaaaaggaagagaaacatgtttactatatatcatcgctcatttggc

SEQ ID NO: 207713 - DNA, 1829 bp, Zea Mays
tccggcagggcaattggcccccgcataccggtgctacgccgcagtgctcagcccactagccgatatacaagacgacatgtcagacgatctatctccgtcgccgcaaatagagtacgatcgtcttctgggcggccttctcgtcgagggttttgacgacaaatcatgcagaagcaggtaccgtttcgcacgctaccacagttcaccgagcataccttctccgtacctcatagagaggctaaggaaacaagaagctctgcagaagaagtgcggcccaggcaccagagcatacagggaagcttcgaagcagctgaaatccggtcagagcatgagcatcaacgccacagacgactgcaactacctgttccttatcatccacgccggcttagggaaccggatgctcgagatcacttcggcgttcctctacgcgctgctcacgaaccggatcttgctcctggaccgttacaaggagatcgcggatcttttctgcgagccctttcctggaacgtcgtggctggttccttcggacttccctctgaacgacgacgagttcggccagagcagcgctgagagctacggcaacatgctgcagaacaaggctttcggtggtggtacggaccgatctttggttggcaacagactccctccctatgtgtacctccacctggacggcaactatggtttccacgacaaactcttcttctgcgaggacgaccagcagttcctgcgaggtgttccgtggctggtcatgaggacggacatgtacttcgtgccgtccctgttcctcgttccagctttccaggacgagctcggcaggctgtttcctgagaaagacaccgtcttccatcacttggcgcgctatcttttccatccgacaaatggcgtctggtattcggttacaagatgcttcaggtcctacctggccaaagcggaaaaaagggtgggaattcagatcaggatatatgaaaccaaaggtatcttgcagagaaacggcccgttcccacacattctgaaccagatcctctcgtgtgctcaaaacgagaagctgcttccagaaatcagtatggcagagggagcagccgatgggactcggaataaccgaacagcagccgggagtgggactcggaacaaccggacgatcgctgttctaacgacttctctgagcgcttggtacagcgagcagatccaggagaagtacgacgagcagtcggctgttgatggcgtgtctgtcagagtgttccagccgagccacgaggagtaccagaggtcgaggaacaaggggcacaacatgaaggcgcttgctgagatctacctattgagcatgaccgacgtgctgatcaccagtggcttttccacgttcgggtacgctgctcaggggctcgccggcctgaagccgtggatcatgcttaagtcggagaaccacgtgacgccagacccaccgtgcgtccgcgccatgtccatcgagccgtgcttccatcaagctcccttctacgactgcaaggcgaggaaggacaccgatttgggcaaggtagtgccttacgtgaggcactgcgaggacgtgagctgggggctcaagattgtagatcaaactcatttgtagtgtagctgtaatctggtcaggactcacggcagacttgcttgctaactagggcagaactattgttattcttattcttaatctgcgaaacacaaaggaaccatacaaaatgtattctttccctcctgtatttgatccaagtgtagatagttgatagacagatccattaatctgttcatcctctgatgtcaaaaggaagagaaacatgtttactatatatcatcgctcatttggc

SEQ ID NO: 207714 - DNA, 2207 bp, Zea Mays
cggcccgcgagaggggatggcgtccacggctcgcccgctccgctcttataacagccgcttcctacgtctctcgcgcatcccttccgagcggaagcggcagcccgtcaggttatagctcactcttgatcgcttcctggtttgctaagcgatttgcctctcgtggttcggtgacggatcggaggcgctgcgaattcgaagctggtttctctgggctaagtcgattcggacttacttgttcagtaggtgtagtgtaggcgtgtagctcgatagacgagaagaatatttggcgtcgaagtttcagctaagcaacgagatcaggaagtttcagcaaagctcctggattaaatatttggcatcatagaggattcaaatctgccggaaacctgtatcttcatccagtatcaaggggaagttctgttgttgtgtgttcggtgatggatacatccaaaagcaagcaaggaccagaacatctccttgttcttgtccatggtatcatggctagccccaaagactggacatatggggaagcagtgctgaagaggcggttgggtgatgattttttcatatatgtgccggtttatgaactaaatggatgttaaaaaaagtgtatgcaaacatctttgtctacagctagttcaacgaacagctacaccaaaacctttgatgggattgatgttgctggaagaaggtcttggaagtggttaacaagatgcccagcttgagaaagatttccttcctagcgcattctctgggtggtttgtttgctagatatgttattgcaatactccactcagtctcagtggaaacaaagaatgcaggacagagtagtgcacttattgttcctacaacaagagggccagcaaaatcgagatgtgcttcaggattaggttctattgctggattgcggccaattaattttattaccttagcaaccccacaccttggggttagagggagaaatcaggtgcatcaccaaaatgtttcggattacgtttacaaaatatactgcacattatccagcaaaggctcgattcctgggaaaacgaactctctatttgttattttgttcattcatgtagattttgaagttgcatggtatgatttttacaagcttggattatatcattgctgaagtggtcaataccaactagcatctataacttttgaggaaaaaacgacgaacttattgggacctgttcctgttagtgctgatcaatttctttgacacatgcttatatgtttttcccccgaattaccagcttccgtttcttcaaggcctatcaatcctagaaaagcttgctgcgcctttggctcctttaattgttgggcgcaccggtgctcaactcttcctcactgatggtgatcctagcaaggcacctctcctgttacagatggcatccgactgtgatgacaaaaactacatatcagccttggcagcttttaagaaccgtgtcctgtatgccaacgtctcgtacgaccacatggtcggctggcgaacgtcttcactaaggagagagaagaatcttataaagccctcacatcgttcactggatggctataagcacattgtgaatgtggaatactgttcgcccgtgtcatcggagggcccacatttcccttccaaggctgccagagctaaagaagctgcacagcgatcgccaaaccgagaaaataccgaggagtaccaccaaatgatggaggaggagatgctccatggcttgcagaaggttggctggaagaaggtggacgtcaacttccattcgtcattctggccttactctgctcacaacaacatacacgtcaagaacgagtggcttcacaatgctggcgctggtgttatcgcgcacgttgcggacagcatcaagcagcaggagtcacggccatgtcttcctgccaatctatagcagtagcattcagcaatccatttgttcaaattatctgtcgctagcaaataaacccatgaccaaactctgttcgtcagcatccactgagcggcgaaatatttgggactgggacacacaataagctgtgtatcattatcggccgcctaggttttacattgtttgatgtcaattgtcaaatggcatgtgtttcctcatggaacagacgaagcattcgaagttgatataaagacaacctaaattgtcatatatgctaccgatggttcgtacccaatccagcgacgacgtcgatgagatttgggttag

SEQ ID NO: 207715 - DNA, 1912 bp, Zea Mays
cggcccgcgagaggggatggcgtccacggctcgcccgctccgctcttataacagccgcttcctacgtctctcgcgcatcccttccgagcggaagcggcagcccgtcaggttatagctcactcttgatcgcttcctggtttgctaagcgatttgcctctcgtggttcggtgacggatcggaggcgctgcgaattcgaagctggtttctctgggctaagtcgattcggacttacttgttcagtaggtgtagtgtaggcgtgtagctcgatagacgagaagaatatttggcgtcgaagtttcagctaagcaacgagatcaggaagtttcagcaaagctcctggattaaatatttggcatcatagaggattcaaatctgccggaaacctgtatcttcatccagtatcaaggggaagttctgttgttgtgtgttcggtgatggatacatccaaaagcaagcaaggaccagaacatctccttgttcttgtccatggtatcatggctagccccaaagactggacatatggggaagcagtgctgaagaggcggttgggtgatgattttttcatatatgtgccggtttatgaactaaatggatgttaaaaaaagtgtatgcaaacatctttgtctacagctagttcaacgaacagctacaccaaaacctttgatgggattgatgttgctggaagaaggtcttggaagtggttaacaagatgcccagcttgagaaagatttccttcctagcgcattctctgggtggtttgtttgctagatatgttattgcaatactccactcagtctcagtggaaacaaagaatgcaggacagagtagtgcacttattgttcctacaacaagagggccagcaaaatcgagatgtgcttcaggattaggttctattgctggattgcggccaattaattttattaccttagcaaccccacaccttggggttagagggagaaatcagcttccgtttcttcaaggcctatcaatcctagaaaagcttgctgcgcctttggctcctttaattgttgggcgcaccggtgctcaactcttcctcactgatggtgatcctagcaaggcacctctcctgttacagatggcatccgactgtgatgacaaaaactacatatcagccttggcagcttttaagaaccgtgtcctgtatgccaacgtctcgtacgaccacatggtcggctggcgaacgtcttcactaaggagagagaagaatcttataaagccctcacatcgttcactggatggctataagcacattgtgaatgtggaatactgttcgcccgtgtcatcggagggcccacatttcccttccaaggctgccagagctaaagaagctgcacagcgatcgccaaaccgagaaaataccgaggagtaccaccaaatgatggaggaggagatgctccatggcttgcagaaggttggctggaagaaggtggacgtcaacttccattcgtcattctggccttactctgctcacaacaacatacacgtcaagaacgagtggcttcacaatgctggcgctggtgttatcgcgcacgttgcggacagcatcaagcagcaggagtcacggccatgtcttcctgccaatctatagcagtagcattcagcaatccatttgttcaaattatctgtcgctagcaaataaacccatgaccaaactctgttcgtcagcatccactgagcggcgaaatatttgggactgggacacacaataagctgtgtatcattatcggccgcctaggttttacattgtttgatgtcaattgtcaaatggcatgtgtttcctcatggaacagacgaagcattcgaagttgatataaagacaacctaaattgtcatatatgctaccgatggttcgtacccaatccagcgacgacgtcgatgagatttgggttag

SEQ ID NO: 207716 - DNA, 1939 bp, Zea Mays
cggcccgcgagaggggatggcgtccacggctcgcccgctccgctcttataacagccgcttcctacgtctctcgcgcatcccttccgagcggaagcggcagcccgtcaggttatagctcactcttgatcgcttcctggtttgctaagcgatttgcctctcgtggttcggtgacggatcggaggcgctgcgaattcgaagctggtttctctgggctaagtcgattcggacttacttgttcagtaggtgtagtgtaggcgtgtagctcgatagacgagaagaatatttggcgtcgaagtttcagctaagcaacgagatcaggaagtttcagcaaagctcctggattaaatatttggcatcatagaggattcaaatctgccggaaacctgtatcttcatccagtatcaaggggaagttctgttgttgtgtgttcggtgatggatacatccaaaagcaagcaaggaccagaacatctccttgttcttgtccatggtatcatggctagccccaaagactggacatatggggaagcagtgctgaagaggcggttgggtgatgattttttcatatatgctagttcaacgaacagctacaccaaaacctttgatgggattgatgttgctggaagaaggttagcaaatgaagtcttggaagtggttaacaagatgcccagcttgagaaagatttccttcctagcgcattctctgggtggtttgtttgctagatatgttattgcaatactccactcagtctcagtggaaacaaagaatgcaggacagagtagtgcacttattgttcctacaacaagagggccagcaaaatcgagatgtgcttcaggattaggttctattgctggattgcggccaattaattttattaccttagcaaccccacaccttggggttagagggagaaatcagcttccgtttcttcaaggcctatcaatcctagaaaagcttgctgcgcctttggctcctttaattgttgggcgcaccggtgctcaactcttcctcactgatggtgatcctagcaaggcacctctcctgttacagatggcatccgactgtgatgacaaaaactacatccttggcagcttttaagaaccgtgtcctgtatgccaacgtctcgtacgaccacatggtcggctggcgaacgtcttcactaaggagagagaagaatcttataaagccctcacatcgttcactggatggctataagcacattgtgaatgtggaatactgttcgcccgtgtcatcggagggcccacatttcccttccaaggctgccagagctaaagaagctgcacagcgatcgccaaaccgagaaaataccgaggagtaccaccaaatgatggagggtaagtaccagttttgcagtccacaccggatttgcttcttttttttgaacgaattgtgtgtcactgattcttgaaacagaggagatgctccatggcttgcagaaggttggctggaagaaggtggacgtcaacttccattcgtcattctggccttactctgctcacaacaacatacacgtcaagaacgagtggcttcacaatgctggcgctggtgttatcgcgcacgttgcggacagcatcaagcagcaggagtcacggccatgtcttcctgccaatctatagcagtagcattcagcaatccatttgttcaaattatctgtcgctagcaaataaacccatgaccaaactctgttcgtcagcatccactgagcggcgaaatatttgggactgggacacacaataagctgtgtatcattatcggccgcctaggttttacattgtttgatgtcaattgtcaaatggcatgtgtttcctcatggaacagacgaagcattcgaagttgatataaagacaacctaaattgtcatatatgctaccgatggttcgtacccaatccagcgacgacgtcgatgagatttgggttag

SEQ ID NO: 207717 - DNA, 2247 bp, Zea Mays
cggcccgcgagaggggatggcgtccacggctcgcccgctccgctcttataacagccgcttcctacgtctctcgcgcatcccttccgagcggaagcggcagcccgtcaggttatagctcactcttgatcgcttcctggtttgctaagcgatttgcctctcgtggttcggtgacggatcggaggcgctgcgaattcgaagctggtttctctgggctaagtcgattcggacttacttgttcagtaggtgtagtgtaggcgtgtagctcgatagacgagaagaatatttggcgtcgaagtttcagctaagcaacgagatcaggaagtttcagcaaagctcctggattaaatatttggcatcatagaggattcaaatctgccggaaacctgtatcttcatccagtatcaaggggaagttctgttgttgtgtgttcggtgatggatacatccaaaagcaagcaaggaccagaacatctccttgttcttgtccatggtatcatggctagccccaaagactggacatatggggaagcagtgctgaagaggcggttgggtgatgattttttcatatatgtgccggtttatgaactaaatggatgttaaaaaaagtgtatgcaaacatctttgtctacagctagttcaacgaacagctacaccaaaacctttgatgggattgatgttgctggaagaaggttagcaaatgaagtacgtcctttgaagtttgtcctagaaaaaaggtcttggaagtggttaacaagatgcccagcttgagaaagatttccttcctagcgcattctctgggtggtttgtttgctagatatgttattgcaatactccactcagtctcagtggaaacaaagaatgcaggacagagtagtgcacttattgttcctacaacaagagggccagcaaaatcgagatgtgcttcaggattaggttctattgctggattgcggccaattaattttattaccttagcaaccccacaccttggggttagagggagaaatcaggtgcatcaccaaaatgtttcggattacgtttacaaaatatactgcacattatccagcaaaggctcgattcctgggaaaacgaactctctatttgttattttgttcattcatgtagattttgaagttgcatggtatgatttttacaagcttggattatatcattgctgaagtggtcaataccaactagcatctataacttttgaggaaaaaacgacgaacttattgggacctgttcctgttagtgctgatcaatttctttgacacatgcttatatgtttttcccccgaattaccagcttccgtttcttcaaggcctatcaatcctagaaaagcttgctgcgcctttggctcctttaattgttgggcgcaccggtgctcaactcttcctcactgatggtgatcctagcaaggcacctctcctgttacagatggcatccgactgtgatgacaaaaactacatccttggcagcttttaagaaccgtgtcctgtatgccaacgtctcgtacgaccacatggtcggctggcgaacgtcttcactaaggagagagaagaatcttataaagccctcacatcgttcactggatggctataagcacattgtgaatgtggaatactgttcgcccgtgtcatcggagggcccacatttcccttccaaggctgccagagctaaagaagctgcacagcgatcgccaaaccgagaaaataccgaggagtaccaccaaatgatggaggaggagatgctccatggcttgcagaaggttggctggaagaaggtggacgtcaacttccattcgtcattctggccttactctgctcacaacaacatacacgtcaagaacgagtggcttcacaatgctggcgctggtgttatcgcgcacgttgcggacagcatcaagcagcaggagtcacggccatgtcttcctgccaatctatagcagtagcattcagcaatccatttgttcaaattatctgtcgctagcaaataaacccatgaccaaactctgttcgtcagcatccactgagcggcgaaatatttgggactgggacacacaataagctgtgtatcattatcggccgcctaggttttacattgtttgatgtcaattgtcaaatggcatgtgtttcctcatggaacagacgaagcattcgaagttgatataaagacaacctaaattgtcatatatgctaccgatggttcgtacccaatccagcgacgacgtcgatgagatttgggttag

SEQ ID NO: 207718 - DNA, 1932 bp, Zea Mays
cggcccgcgagaggggatggcgtccacggctcgcccgctccgctcttataacagccgcttcctacgtctctcgcgcatcccttccgagcggaagcggcagcccgtcaggattcaaatctgccggaaacctgtatcttcatccagtatcaaggggaagttctgttgttgtgtgttcggtgatggatacatccaaaagcaagcaaggaccagaacatctccttgttcttgtccatggtatcatggctagccccaaagactggacatatggggaagcagtgctgaagaggcggttgggtgatgattttttcatatatgctagttcaacgaacagctacaccaaaacctttgatgggattgatgttgctggaagaaggttagcaaatgaagtacgtcctttgaagtttgtcctagaaaaaaggtcttggaagtggttaacaagatgcccagcttgagaaagatttccttcctagcgcattctctgggtggtttgtttgctagatatgttattgcaatactccactcagtctcagtggaaacaaagaatgcaggacagagtagtgcacttattgttcctacaacaagagggccagcaaaatcgagatgtgcttcaggattaggttctattgctggattgcggccaattaattttattaccttagcaaccccacaccttggggttagagggagaaatcaggtgcatcaccaaaatgtttcggattacgtttacaaaatatactgcacattatccagcaaaggctcgattcctgggaaaacgaactctctatttgttattttgttcattcatgtagattttgaagttgcatggtatgatttttacaagcttggattatatcattgctgaagtggtcaataccaactagcatctataacttttgaggaaaaaacgacgaacttattgggacctgttcctgttagtgctgatcaatttctttgacacatgcttatatgtttttcccccgaattaccagcttccgtttcttcaaggcctatcaatcctagaaaagcttgctgcgcctttggctcctttaattgttgggcgcaccggtgctcaactcttcctcactgatggtgatcctagcaaggcacctctcctgttacagatggcatccgactgtgatgacaaaaactacatccttggcagcttttaagaaccgtgtcctgtatgccaacgtctcgtacgaccacatggtcggctggcgaacgtcttcactaaggagagagaagaatcttataaagccctcacatcgttcactggatggctataagcacattgtgaatgtggaatactgttcgcccgtgtcatcggagggcccacatttcccttccaaggctgccagagctaaagaagctgcacagcgatcgccaaaccgagaaaataccgaggagtaccaccaaatgatggaggaggagatgctccatggcttgcagaaggttggctggaagaaggtggacgtcaacttccattcgtcattctggccttactctgctcacaacaacatacacgtcaagaacgagtggcttcacaatgctggcgctggtgttatcgcgcacgttgcggacagcatcaagcagcaggagtcacggccatgtcttcctgccaatctatagcagtagcattcagcaatccatttgttcaaattatctgtcgctagcaaataaacccatgaccaaactctgttcgtcagcatccactgagcggcgaaatatttgggactgggacacacaataagctgtgtatcattatcggccgcctaggttttacattgtttgatgtcaattgtcaaatggcatgtgtttcctcatggaacagacgaagcattcgaagttgatataaagacaacctaaattgtcatatatgctaccgatggttcgtacccaatccagcgacgacgtcgatgagatttgggttag

SEQ ID NO: 207719 - DNA, 2059 bp, Zea Mays
tgtcccgtcccgtcccgtgccgtgccgccgcactattcgacgccgccgcggcccgcgagaggggatggcgtccacggctcgcccgctccgctcttataacagccgcttcctacgtctctcgcgcatcccttccgagcggaagcggcagcccgtcaggattcaaatctgccggaaacctgtatcttcatccagtatcaaggggaagttctgttgttgtgtgttcggtgatggatacatccaaaagcaagcaaggaccagaacatctccttgttcttgtccatggtatcatggctagccccaaagactggacatatggggaagcagtgctgaagaggcggttgggtgatgattttttcatatatggtaaagcatgctagcatttgaattcttcattcactaggttcaatactagtcattatctaaccatttgttctagcttctacagtgccggtttatgaactaaatggatgttaaaaaaagtgtatgcaaacatctttgtctacagctagttcaacgaacagctacaccaaaacctttgatgggattgatgttgctggaagaaggtcttggaagtggttaacaagatgcccagcttgagaaagatttccttcctagcgcattctctgggtggtttgtttgctagatatgttattgcaatactccactcagtctcagtggaaacaaagaatgcaggacagagtagtgcacttattgttcctacaacaagagggccagcaaaatcgagatgtgcttcaggattaggttctattgctggattgcggccaattaattttattaccttagcaaccccacaccttggggttagagggagaaatcaggtgcatcaccaaaatgtttcggattacgtttacaaaatatactgcacattatccagcaaaggctcgattcctgggaaaacgaactctctatttgttattttgttcattcatgtagattttgaagttgcatggtatgatttttacaagcttggattatatcattgctgaagtggtcaataccaactagcatctataacttttgaggaaaaaacgacgaacttattgggacctgttcctgttagtgctgatcaatttctttgacacatgcttatatgtttttcccccgaattaccagcttccgtttcttcaaggcctatcaatcctagaaaagcttgctgcgcctttggctcctttaattgttgggcgcaccggtgctcaactcttcctcactgatggtgatcctagcaaggcacctctcctgttacagatggcatccgactgtgatgacaaaaactacatatcagccttggcagcttttaagaaccgtgtcctgtatgccaacgtctcgtacgaccacatggtcggctggcgaacgtcttcactaaggagagagaagaatcttataaagccctcacatcgttcactggatggctataagcacattgtgaatgtggaatactgttcgcccgtgtcatcggagggcccacatttcccttccaaggctgccagagctaaagaagctgcacagcgatcgccaaaccgagaaaataccgaggagtaccaccaaatgatggaggaaggttggctggaagaaggtggacgtcaacttccattcgtcattctggccttactctgctcacaacaacatacacgtcaagaacgagtggcttcacaatgctggcgctggtgttatcgcgcacgttgcggacagcatcaagcagcaggagtcacggccatgtcttcctgccaatctatagcagtagcattcagcaatccatttgttcaaattatctgtcgctagcaaataaacccatgaccaaactctgttcgtcagcatccactgagcggcgaaatatttgggactgggacacacaataagctgtgtatcattatcggccgcctaggttttacattgtttgatgtcaattgtcaaatggcatgtgtttcctcatggaacagacgaagcattcgaagttgatataaagacaacctaaattgtcatatatgctaccgatggttcgtacccaatccagcgacgacgtcgatgagatttgggttag

SEQ ID NO: 207720 - DNA, 2073 bp, Zea Mays
ctcatccggcattccggccaaacctatccgccactcggtcggcccatgccgcgcccctggacccgtcaataatcagcaccgcgccggcgctgatcccggcgcggggtttttttttttttttgtcccgtcccgtcccgtgccgtgccgccgcactattcgacgccgccgcggcccgcgagaggggatggcgtccacggctcgcccgctccgctcttataacagccgcttcctacgtctctcgcgcatcccttccgagcggaagcggcagcccgtcaggattcaaatctgccggaaacctgtatcttcatccagtatcaaggggaagttctgttgttgtgtgttcggtgatggatacatccaaaagcaagcaaggaccagaacatctccttgttcttgtccatggtatcatggctagccccaaagactggacatatggggaagcagtgctgaagaggcggttgggtgatgattttttcatatatgctagttcaacgaacagctacaccaaaacctttgatgggattgatgttgctggaagaaggttagcaaatgaagtcttggaagtggttaacaagatgcccagcttgagaaagatttccttcctagcgcattctctgggtggtttgtttgctagatatgttattgcaatactccactcagtctcagtggaaacaaagaatgcaggacagagtagtgcacttattgttcctacaacaagagggccagcaaaatcgagatgtgcttcaggattaggttctattgctggattgcggccaattaattttattaccttagcaaccccacaccttggggttagagggagaaatcaggtgcatcaccaaaatgtttcggattacgtttacaaaatatactgcacattatccagcaaaggctcgattcctgggaaaacgaactctctatttgttattttgttcattcatgtagattttgaagttgcatggtatgatttttacaagcttggattatatcattgctgaagtggtcaataccaactagcatctataacttttgaggaaaaaacgacgaacttattgggacctgttcctgttagtgctgatcaatttctttgacacatgcttatatgtttttcccccgaattaccagcttccgtttcttcaaggcctatcaatcctagaaaagcttgctgcgcctttggctcctttaattgttgggcgcaccggtgctcaactcttcctcactgatggtgatcctagcaaggcacctctcctgttacagatggcatccgactgtgatgacaaaaactacatatcagccttggcagcttttaagaaccgtgtcctgtatgccaacgtctcgtacgaccacatggtcggctggcgaacgtcttcactaaggagagagaagaatcttataaagccctcacatcgttcactggatggctataagcacattgtgaatgtggaatactgttcgcccgtgtcatcggagggcccacatttcccttccaaggctgccagagctaaagaagctgcacagcgatcgccaaaccgagaaaataccgaggagtaccaccaaatgatggaggaggagatgctccatggcttgcagaaggttggctggaagaaggtggacgtcaacttccattcgtcattctggccttactctgctcacaacaacatacacgtcaagaacgagtggcttcacaatgctggcgctggtgttatcgcgcacgttgcggacagcatcaagcagcaggagtcacggccatgtcttcctgccaatctatagcagtagcattcagcaatccatttgttcaaattatctgtcgctagcaaataaacccatgaccaaactctgttcgtcagcatccactgagcggcgaaatatttgggactgggacacacaataagctgtgtatcattatcggccgcctaggttttacattgtttgatgtcaattgtcaaatggcatgtgtttcctcatggaacagacgaagcattcgaagttgatataaagacaacctaaattgtcatatatgctaccgatggttcgtacccaatccagcgacgacgtcgatgagatttgggttag

SEQ ID NO: 207721 - DNA, 1948 bp, Zea Mays
tcggccttgccattggcacagctttgggggagctgctggcgccttcgcgtgcgtgcgtgcatgcagtgcgcctttgcttttgccaagggttgccaaagctataggggggccaacccaacgtacgagaggagcgcgcgcacggccgagtcggcggaataacggcggattcaaatctgccggaaacctgtatcttcatccagtatcaaggggaagttctgttgttgtgtgttcggtgatggatacatccaaaagcaagcaaggaccagaacatctccttgttcttgtccatggtatcatggctagccccaaagactggacatatggggaagcagtgctgaagaggcggttgggtgatgattttttcatatatgctagttcaacgaacagctacaccaaaacctttgatgggattgatgttgctggaagaaggtcttggaagtggttaacaagatgcccagcttgagaaagatttccttcctagcgcattctctgggtggtttgtttgctagatatgttattgcaatactccactcagtctcagtggaaacaaagaatgcaggacagagtagtgcacttattgttcctacaacaagagggccagcaaaatcgagatgtgcttcaggattaggttctattgctggattgcggccaattaattttattaccttagcaaccccacaccttggggttagagggagaaatcaggtgcatcaccaaaatgtttcggattacgtttacaaaatatactgcacattatccagcaaaggctcgattcctgggaaaacgaactctctatttgttattttgttcattcatgtagattttgaagttgcatggtatgatttttacaagcttggattatatcattgctgaagtggtcaataccaactagcatctataacttttgaggaaaaaacgacgaacttattgggacctgttcctgttagtgctgatcaatttctttgacacatgcttatatgtttttcccccgaattaccagcttccgtttcttcaaggcctatcaatcctagaaaagcttgctgcgcctttggctcctttaattgttgggcgcaccggtgctcaactcttcctcactgatggtgatcctagcaaggcacctctcctgttacagatggcatccgactgtgatgacaaaaactacatatcagccttggcagcttttaagaaccgtgtcctgtatgccaacgtctcgtacgaccacatggtcggctggcgaacgtcttcactaaggagagagaagaatcttataaagccctcacatcgttcactggatggctataagcacattgtgaatgtggaatactgttcgcccgtgtcatcggagggcccacatttcccttccaaggctgccagagctaaagaagctgcacagcgatcgccaaaccgagaaaataccgaggagtaccaccaaatgatggaggaggagatgctccatggcttgcagaaggttggctggaagaaggtggacgtcaacttccattcgtcattctggccttactctgctcacaacaacatacacgtcaagaacgagtggcttcacaatgctggcgctggtgttatcgcgcacgttgcggacagcatcaagcagcaggagtcacggccatgtcttcctgccaatctatagcagtagcattcagcaatccatttgttcaaattatctgtcgctagcaaataaacccatgaccaaactctgttcgtcagcatccactgagcggcgaaatatttgggactgggacacacaataagctgtgtatcattatcggccgcctaggttttacattgtttgatgtcaattgtcaaatggcatgtgtttcctcatggaacagacgaagcattcgaagttgatataaagacaacctaaattgtcatatatgctaccgatggttcgtacccaatccagcgacgacgtcgatgagatttgggttag

SEQ ID NO: 207722 - DNA, 2131 bp, Zea Mays
cccatgttcgcatggtcacgcccacggccgcaccaaccaccagccccgatttcctcctcaatcacacccccaaaccaaaacccaaacagcacttctcctgcaatcgccgacgtcgacggaggcttcgccggccggagcagcgccgacgggtgcaattcttcaaagggtgcagtgtatccaaggagacaaagggaccggtccgcagtttcttcactgcaaattcaaagagcaccacggtgaaatcagcggacttgaaagtagcatcatccttcaaaaatgatggtggttatccagctggcggtgtctcttggaaggacgacactctattgccaaaaagcacaaccattcgtggccaggaccatccggttgctgaccctgtactcccaatggattccatgattacgccagaaatcctctctgctaatgtggaacgtgttatagacatgtttgcagacgatgacactgatactgaacttgatttggatagcccgacagaggacttcacatcaattgcagaagccattgaggacatacagcaaggaaaacttgtgattgttgttgatgatgaatcaagggaaaatgaaggagatctgataatggctgcctccttggttaccccagaggctatggcttttatagtaaggcatgagacaggaattgtttgtgtcagcatgaaagaagatgatctggaaagactgagccttcctttgatggttaccacaaaagaaaatgagaagctatgcactgctttcactgttacagtggatgcaaaagagggcacaactactggggtatctgccaaggacagggcaaaaacagtcatgactcttgcatctcctgactctaagcctgaggacctcaaccgccctggtcatattttccctttgaaatacagagaagggggtgttcttaaacgggctggacacaccgaggcatctgttgaccttgccatgttggctggattacctcctgttgctgtcctttgtgaaattgtggatgatgcagatggttctatggctcgcctaccaaagttgcatgtctttgctgaaaaggagaacttaaagattatatctattgctgacttgattagatgagttgaattaccaaaacttcagcttctggtataggaggaaaagagacaggctaattgaacgcgcttctgttgcacgcttgcctttgaaatggggcaatgtccatgcctattgctacaaatctgttattgatggcattgagcatattggcatgatgaaaggtgatattggtgacagccaagacattttggtgagggtgcactctgagtgcctcacaggcgacatttttggatccgcaagatgtgattgtggcgaccaacttgcgatggcaatggagatgattgagaaggctggaaggggcgtattagtctatctccgtggacatgaaggaaggggtattggtctgggccacaagcttcgtgcttataacttacaggatgatgggcgtgatactgtggaagctaatgaggaacttggtcttcctgtggactcacaggaatacgggattggcgcacagatattgcgggatctaggagtccgttcaatgaagctgatgactaataaccctgcgaaatatagtggtattaagggctacggattgagcattgcgggcagggtgcccttgattacgccaattaccagtgagaaccgtaagtacctagagactaaaagaacaaagatgggacatgtatatggattggccaatgcgcaggccaaccaagcaaataaatggcagccagagcacagaagagaatcattaggcccccaagcatgtttccattattattccagcaatccagcttcgtggcacaaaagagtgatatgattcttcgtttggggagttcctgaaatcttctccccctatatttccgtagattctttcgcaaaaaagccgatatttcggtagatcgatttcttcaattgtaacggtaggttttaaggtggctaatctctactacttattaagttagcaatagtagcctgcctttttgtgttctgccgtgtagtctctgacaggtagggcccgcttgctcctgcgtgtatgctcccggtttattccgtaacacattttttttacaaaaaatagaactactgcacat

SEQ ID NO: 207723 - DNA, 2134 bp, Zea Mays
cccatgttcgcatggtcacgcccacggccgcaccaaccaccagccccgatttcctcctcaatcacacccccaaaccaaaacccaaacagcacttctcctgcaatcgccgacgtcgacggaggcttcgccggccggagcagcgccgacggttgttttgcccctccctcgtccggcccagcagcccaggcgagcatgccttcgattgcgccaccgtcttcctccgtcgctgccctcacccgccaaccggtgcaattcttcaaagggtgcagtgtatccaaggagacaaagggaccggtccgcagtttcttcactgcaaattcaaagagcaccacggtgaaatcagcggacttgaaagtagcatcatccttcaaaaatgatggtggttatccagctggcggtgtctcttggaaggacgacactctattgccaaaaagcacaaccattcgtggccaggaccatccggttgctgaccctgtactcccaatggattccatgattacgccagaaatcctctctgctaatgtggaacgtgttatagacatgtttgcagacgatgacactgatactgaacttgatttggatagcccgacagaggacttcacatcaattgcagaagccattgaggacatacagcaaggaaaacttgtgattgttgttgatgatgaatcaagggaaaatgaaggagatctgataatggctgcctccttggttaccccagaggctatggcttttatagtaaggcatgagacaggaattgtttgtgtcagcatgaaagaagatgatctggaaagactgagccttcctttgatggttaccacaaaagaaaatgagaagctatgcactgctttcactgttacagtggatgcaaaagagggcacaactactggggtatctgccaaggacagggcaaaaacagtcatgactcttgcatctcctgactctaagcctgaggacctcaaccgccctggtataggaggaaaagagacaggctaattgaacgcgcttctgttgcacgcttgcctttgaaatggggcaatgtccatgcctattgctacaaatctgttattgatggcattgagcatattggcatgatgaaaggtgatattggtgacagccaagacattttggtgagggtgcactctgagtgcctcacaggcgacatttttggatccgcaagatgtgattgtggcgaccaacttgcgatggcaatggagatgattgagaaggctggaaggggcgtattagtctatctccgtggacatgaaggaaggggtattggtctgggccacaagcttcgtgcttataacttacaggatgatgggcgtgatactgtggaagctaatgaggaacttggtcttcctgtggactcacaggaatacgggattggcgcacaggaaagttgtatcatatatctttctagagcttcaacatgaatttacttggaggcactgaagaatttcatgcctgttgcagcctgaaactgtgatgtacatagaatgaagtaaccctatcatgcagtgagtaggccactgacatttcagtactctgcagatattgcgggatctaggagtccgttcaatgaagctgatgactaataaccctgcgaaatatagtggtattaagggctacggattgagcattgcgggcagggtgcccttgattacgccaattaccagtgagaaccgtaagtacctagagactaaaagaacaaagatgggacatgtatatggattggccaatgcgcaggccaaccaagcaaataaatggcagccagagcacagaagagaatcattaggcccccaagcatgtttccattattattccagcaatccagcttcgtggcacaaaagagtgatatgattcttcgtttggggagttcctgaaatcttctccccctatatttccgtagattctttcgcaaaaaagccgatatttcggtagatcgatttcttcaattgtaacggtaggttttaaggtggctaatctctactacttattaagttagcaatagtagcctgcctttttgtgttctgccgtgtagtctctgacaggtagggcccgcttgctcctgcgtgtatgctcccggtttattccgtaacacattttttttacaaaaaatagaactactgcacat

SEQ ID NO: 207724 - DNA, 2100 bp, Zea Mays
cccatgttcgcatggtcacgcccacggccgcaccaaccaccagccccgatttcctcctcaatcacacccccaaaccaaaacccaaacagcacttctcctgcaatcgccgacgtcgacggaggcttcgccggccggagcagcgccgacgggtgcaattcttcaaagggtgcagtgtatccaaggagacaaagggaccggtccgcagtttcttcactgcaaattcaaagagcaccacggtgaaatcagcggacttgaaagtagcatcatccttcaaaaatgatggtggttatccagctggcggtgtctcttggaaggacgacactctattgccaaaaagcacaaccattcgtggccaggaccatccggttgctgaccctgtactcccaatggattccatgattacgccagaaatcctctctgctaatgtggaacgtgttatagacatgtttgcagacgatgacactgatactgaacttgatttggatagcccgacagaggacttcacatcaattgcagaagccattgaggacatacagcaaggaaaacttgtgattgttgttgatgatgaatcaagggaaaatgaaggagatctgataatggctgcctccttggttaccccagaggctatggcttttatagtaaggcatgagacaggaattgtttgtgtcagcatgaaagaagatgatctggaaagactgagccttcctttgatggttaccacaaaagaaaatgagaagctatgcactgctttcactgttacagtggatgcaaaagagggcacaactactggggtatctgccaaggacagggcaaaaacagtcatgactcttgcatctcctgactctaagcctgaggacctcaaccgccctggtcatattttccctttgaaatacagagaagggggtgttcttaaacgggctggacacaccgaggcatctgttgaccttgccatgttggctggattacctcctgttgctgtcctttgtgaaattgtggatgatgcagatggttctatggctcgcctaccaaagttgcatgtctttgctgaaaaggagaacttaaagattatatctattgctgacttgattaggtataggaggaaaagagacaggctaattgaacgcgcttctgttgcacgcttgcctttgaaatggggcaatgtccatgcctattgctacaaatctgttattgatggcattgagcatattggcatgatgaaaggtgatattggtgacagccaagacattttggtgagggtgcactctgagtgcctcacaggcgacatttttggatccgcaagatgtgattgtggcgaccaacttgcgatggcaatggagatgattgagaaggctggaaggggcgtattagtctatctccgtggacatgaaggaaggggtattggtctgggccacaagcttcgtgcttataacttacaggatgatgggcgtgatactgtggaagctaatgaggaacttggtcttcctgtggactcacaggaatacgggattggcgcacagatattgcgggatctaggagtccgttcaatgaagctgatgactaataaccctgcgaaatatagtggtattaagggctacggattgagcattgcgggcagggtgcccttgattacgccaattaccagtgagaaccgtaagtacctagagactaaaagaacaaagatgggacatgtatatggattggccaatgcgcaggccaaccaagcaaataaatggcagccagagcacagaagagaatcattaggcccccaagcatgtttccattattattccagcaatccagcttcgtggcacaaaagagtgatatgattcttcgtttggggagttcctgaaatcttctccccctatatttccgtagattctttcgcaaaaaagccgatatttcggtagatcgatttcttcaattgtaacggtaggttttaaggtggctaatctctactacttattaagttagcaatagtagcctgcctttttgtgttctgccgtgtagtctctgacaggtagggcccgcttgctcctgcgtgtatgctcccggtttattccgtaacacattttttttacaaaaaatagaactactgcacat

SEQ ID NO: 207725 - DNA, 2433 bp, Zea Mays
cccatgttcgcatggtcacgcccacggccgcaccaaccaccagccccgatttcctcctcaatcacacccccaaaccaaaacccaaacagcacttctcctgcaatcgccgacgtcgacggaggcttcgccggccggagcagcgccgacggttgttttgcccctccctcgtccggcccagcagcccaggcgagcatgccttcgattgcgccaccgtcttcctccgtcgctgccctcacccgccaaccggtgcaattcttcaaagggtgcagtgtatccaaggagacaaagggaccggtccgcagtttcttcactgcaaattcaaagagcaccacggtgaaatcagcggacttgaaagtagcatcatccttcaaaaatgatggtggttatccagctggcggtgtctcttggaaggacgacactctattgccaaaaagcacaaccattcgtggccaggaccatccggttgctgaccctgtactcccaatggattccatgattacgccagaaatcctctctgctaatgtggaacgtgttatagacatgtttgcagacgatgacactgatactgaacttgatttggatagcccgacagaggacttcacatcaattgcagaagccattgaggacatacagcaaggaaaacttgtgattgttgttgatgatgaatcaagggaaaatgaaggagatctgataatggctgcctccttggttaccccagaggctatggcttttatagtaaggcatgagacaggaattgtttgtgtcagcatgaaagaagatgatctggaaagactgagccttcctttgatggttaccacaaaagaaaatgagaagctatgcactgctttcactgttacagtggatgcaaaagagggcacaactactggggtatctgccaaggacagggcaaaaacagtcatgactcttgcatctcctgactctaagcctgaggacctcaaccgccctggtcatattttccctttgaaatacagagaagggggtgttcttaaacgggctggacacaccgaggcatctgttgaccttgccatgttggctggattacctcctgttgctgtcctttgtgaaattgtggatgatgcagatggttctatggctcgcctaccaaagttgcatgtctttgctgaaaaggagaacttaaagattatatctattgctgacttgattaggtataggaggaaaagagacaggctaattgaacgcgcttctgttgcacgcttgcctttgaaatggggcaatgtccatgcctattgctacaaatctgttattgatggcattgagcatattggcatgatgaaaggtgatattggtgacagccaagacattttggtgagggtgcactctgagtgcctcacaggcgacatttttggatccgcaagatgtgattgtggcgaccaacttgcgatggcaatggagatgattgagaaggctggaaggggcgtattagtctatctccgtggacatgaaggaaggggtattggtctgggccacaagcttcgtgcttataacttacaggatgatgggcgtgatactgtggaagctaatgaggaacttggtcttcctgtggactcacaggaatacgggattggcgcacaggtaagactggattatctctcaagttaccgtggaacctttctccacaacacttcctttctgctgaagtctgcttgtataggaaagttgtatcatatatctttctagagcttcaacatgaatttacttggaggcactgaagaatttcatgcctgttgcagcctgaaactgtgatgtacatagaatgaagtaaccctatcatgcagtgagtaggccactgacatttcagtactctgcagatattgcgggatctaggagtccgttcaatgaagctgatgactaataaccctgcgaaatatagtggtattaagggctacggattgagcattgcgggcagggtgcccttgattacgccaattaccagtgagaaccgtaagtacctagagactaaaagaacaaagatgggacatgtatatggattggccaatgcgcaggccaaccaagcaaataaatggcagccagagcacagaagagaatcattaggcccccaagcatgtttccattattattccagcaatccagcttcgtggcacaaaagagtgatatgattcttcgtttggggagttcctgaaatcttctccccctatatttccgtagattctttcgcaaaaaagccgatatttcggtagatcgatttcttcaattgtaacggtaggttttaaggtggctaatctctactacttattaagttagcaatagtagcctgcctttttgtgttctgccgtgtagtctctgacaggtagggcccgcttgctcctgcgtgtatgctcccggtttattccgtaacacattttttttacaaaaaatagaactactgcacat

SEQ ID NO: 207726 - DNA, 1318 bp, Zea Mays
aaaaaaaaacagaggaaagaaaaaaccgtcagagcgacgttagtcggctcagctgtagtgtagttgcaggtgttcgccggcacacgcgcgtggccgcgaaccctagatgacaccggcgaacggcgccccagcgcgggcagcggaggcgggcccccacgaggtggagtcggaggccgacgcgttccggcgccaggtcgacgacctcgtctcgaagaccgacgtgctggagcggcgggtgaaagaggtggcggacttctacgatggcaaaaagcacggaagcggcgggaggaagggtggtggtggtggcaggtatggggcatcctcgaggggaatgccggaccttatgcgccagttcggcgtgcttttgaaagagatcacctctcataaagatgcatggccatttctggagccggtggatgttgtaactctacagcttcctgactatcacaacgaaaaaagacaaaaggaggaggaatcaaagggtgttgcagccacaaatacttctcgagaagttgcaatcgtaaaattagcaaaagacactgatgatgagctaaatcagatcaacaagaagctggaggagctccggaaaatggtggttcacagatgcaggaaaatgacgacagacgagaagaggaagctgggtgcaggtatctgtcacttgtctccagatgatcttagcaaggcgctagagattgtcgcacaagacaatcctagcttccagactaaagcagaagaagtggatcttgatatggatgcccagagcgagacaactctatggaggctgaaattctttgtgagggaagcgctggaacgacaggccaacgttgcctctgggaagatggacgaaaacgccaagagaaagagggagatatgcaatgctctggccaaaaccacctcgagacggatcaagaagcagccctagccatcttccatatctttcactcgcgtcctctgattgtttagaagttctttttttgatactagccaccagctttgtgaaacgttttcctgcattttttttgtgatgtgtatatagtagtatagtgaactgtccagtccagtaacaagtgatttcgtgtgtaaccatgagctggtcgcattcgcgtcccctctgatccaacaacaaacattgtctcacaatgtgattgattgtagaagcaagcttttgtcacagggcgatgttgctcacttgtggaatcagatgatgcatacatttcgtaactgttcattcattctccaccttggcttgaaaattaaggtgagaaggcctgcggatttacatgttaccgttattcttgtttcttgtggtatgttgtaa

SEQ ID NO: 207727 - DNA, 1712 bp, Zea Mays
ctttcccatctcccgcccaagatgaccaaaattcccctcctaccttatcctctcggctgcccaccaccgcagacaagtccagtcctctccctccccttaatctagcgccgccactcacgcccaccacgccgctggtgaacggatccgtccatcccgtacaccgcccaaccgctgttccagtacccgcctcgtcgagttgagctgagtttagggcctgcgggagctgagccggtggcccatgcttcgcgaagggtagggttgtctgtctagctagctgctgcttggtctgatgagctcagttccggcgtcccgcctcggcttccccgcacgcttgctccgtcggctgcccagaacccagcttgcccgctccggcgcttctcttcgcttcttcgggaaagggtggagctttgaggtggtgcgggtgctcagccgaggactccgggcgatgacgcccgcagtggcgcgcgtttgtcgcgacagtcctgggttcggatagcgagttcctcgagcggatttggctgctgctgcatcctgcgtgggaaggggaggcggcggcagcaacagaggaaggggaggggttgctctgaagcggagggggagcgggctgacattgctgctgggagcatggcgagcttctaaggacgctcagctcccgtagcccagccattctcatcgcagaggagcaaagatatatggtcttttgtgctttctcttcgagtccgtgtgctatttgacaatgcaaaatgggcatatccttgtggattctcggaagaaaagcagaaagttcgaaggcagaaaactacttcatggctaagagagcaagtattacagcttggcccaacgtttattaagctcgggcagtgatcctccactagatctgatttatttcctagagaatttgtggacgagcttgctactgaaatgtaaagttaccatgtgctcctgaaatgtaaagttaccatgtgctccaattacttctgtgctaaatgagaggactaagtacaacaacatggagccggatgctgttgatttctttggggaatgtatgaatagtccccgaaatggtcgtactccgcttgcaaatgagatatatgagcaaatggttgcagagaaggaaagagagctagaagaaggagaagcacaaaagtcaccctccaagctcaacaggccacacttgaagaaaaccaaagtttgctgcgccagacccaagaggaagtgaaggggttgcataccaagtttgaagagaccaatgcactgctacgagctgtcctgaaacttcagaaagattgaggtagggatgcataccaagtctgaggatgatgcctttgcttaaggtttttctaccttgctagaacatattttgtggttagaactttgtcagaactacgtgcaatctgtttgaatgcttcgaacctttgtggtggaacctttgtatgtttgaacctctgttgtggaagaactagtgtgctggaattgtgtatgacttgtgatgagaatgttgtgtatgatggcttttctgtgtattatgattctgtgagctatcatgagagcttagtgtgtcgtcactgtatggtcattgtatgtgggtgccatattaaactaaacaaaacaaagctgtcacattatctcaacattaggtgacgcgttgactggaaaacatgtgacagataacaccgtcatatatagcaacaatatgtgacggacgaacgcag

SEQ ID NO: 207728 - DNA, 1995 bp, Zea Mays
cccatctcccgcccaagatgaccaaaattcccctcctaccttatcctctcggctgcccaccaccgcagacaagtccagtcctctccctccccttaatctagcgccgccactcacgcccaccacgccgctggtgaacggatccgtccatcccgtacaccgcccaaccgctgttccagtacccgcctcgtcgagttgagctgagtttagggcctgcgggagctgagccggtggcccatgcttcgcgaagggtagggttgtctgtctagctagctgctgcttggtctgatgagctcagttccggcgtcccgcctcggcttccccgcacgcttgctccgtcggctgcccagaacccagcttgcccgctccggcgcttctcttcgcttcttcgggaaagggtggagctttgaggtggtgcgggtgctcagccgaggactccgggcgatgacgcccgcagtggcgcgcgtttgtcgcgacagtcctgggttcggatagcgagttcctcgagcggatttggctgctgctgcatcctgcgtgggaaggggaggcggcggcagcaacagaggaaggggaggggttgctctgaagcggagggggagcgggctgacattgctgctgggagcatggcgagcttctaaggacgctcagctcccgtagcccagccattctcatcgcagaggagcaaagatatatggtcttttgtgctttctcttcgagtccgtgtgctatttgacaatgcaaaatgggcatatccttgtggattctcggaagaaaagcaggtatgtgtttaagatatagataaaacctgagtcatgttctttcaagaaaaaaatattgagtctccaacattgtgattccaaagaagtcattataggaaattttctgtgctaagtagccacctccagttccaaatgagtgttctatctttaggtggagttaagtctgttaatctgtttgttgttatgaatggaagcatgatgatttatatcacttggggctgcaaagagaaaggattcactttctactatacatgtgagtgggctaaaaggtggcttacatgttgcagaaagttcgaaggcagaaaactacttcatggctaagagagcaagtattacagcttggcccaacgtttattaagctcgggcagtgatcctccactagatctgatttatttcctagagaatttgtggacgagcttgctactgaaatgtaaagttaccatgtgctcctgaaatgtaaagttaccatgtgctccaattacttctgtgctaaatgagaggactaagtacaacaacatggagccggatgctgttgatttctttggggaatgtatgaatagtccccgaaatggtcgtactccgcttgcaaatgagatatatgagcaaatggttgcagagaaggaaagagagctagaagaaggagaagcacaaaagtcaccctccaagctcaacaggccacacttgaagaaaaccaaagtttgctgcgccagacccaagaggaagtgaaggggttgcataccaagtttgaagagaccaatgcactgctacgagctgtcctgaaacttcagaaagattgaggtagggatgcataccaagtctgaggatgatgcctttgcttaaggtttttctaccttgctagaacatattttgtggttagaactttgtcagaactacgtgcaatctgtttgaatgcttcgaacctttgtggtggaacctttgtatgtttgaacctctgttgtggaagaactagtgtgctggaattgtgtatgacttgtgatgagaatgttgtgtatgatggcttttctgtgtattatgattctgtgagctatcatgagagcttagtgtgtcgtcactgtatggtcattgtatgtgggtgccatattaaactaaacaaaacaaagctgtcacattatctcaacattaggtgacgcgttgactggaaaacatgtgacagataacaccgtcatatatagcaacaatatgtgacggacgaacgcag

SEQ ID NO: 207729 - DNA, 1941 bp, Zea Mays
cctctcggctgcccaccaccgcagacaagtccagtcctctccctccccttaatctagcgccgccactcacgcccaccacgccgctggtgaacggatccgtccatcccgtacaccgcccaaccgctgttccagtacccgcctcgtcgagttgagctgagtttagggcctgcgggagctgagccggtggcccatgcttcgcgaagggtagggttgtctgtctagctagctgctgcttggtctgatgagctcagttccggcgtcccgcctcggcttccccgcacgcttgctccgtcggctgcccagaacccagcttgcccgctccggcgcttctcttcgcttcttcgggaaagggtggagctttgaggtggtgcgggtgctcagccgaggactccgggcgatgacgcccgcagtggcgcgcgtttgtcgcgacagtcctgggttcggatagcgagttcctcgagcggatttggctgctgctgcatcctgcgtgggaaggggaggcggcggcagcaacagaggaaggggaggggttgctctgaagcggagggggagcgggctgacattgctgctgggagcatggcgagcttctaaggacgctcagctcccgtagcccagccattctcatcgcagaggagcaaagatatatggtcttttgtgctttctcttcgagtccgtgtgctatttgacaatgcaaaatgggcatatccttgtggattctcggaagaaaagcagaaagttcgaaggcagaaaactacttcatggctaagagagcaagtattacagcttggcccaacgtttattaagctcgggcagtgatcctccactagatctgatttatttcctagagaatttgtggacgagcttgctactgaaatgtaaagttaccatgtgctcctgaaatgtaaagttaccatgtgctccaattacttctgtgctaaatgaggtataatcaataggtgcttatgctccaattcttttatggtgaccatctaaaatagaaaacagcatgacaattgctatgtcatcaaacatgatcatcatcaatactagggtttctttaggccatgttattagtcttgacctgtctaggcagcattgatgcatgttcatgtgttctttttcttaaactataagtcattatttgactatgttgtattgttgttggcatgtaccaatatttcatggcaaatcttatatcccaagttttgtatatgccgcagaggactaagtacaacaacatggagccggatgctgttgatttctttggggaatgtatgaatagtccccgaaatggtcgtactccgcttgcaaatgagatatatgagcaaatggttgcagagaaggaaagagagctagaagaaggagaagcacaaaagtcaccctccaagctcaacaggccacacttgaagaaaaccaaagtttgctgcgccagacccaagaggaagtgaaggggttgcataccaagtttgaagagaccaatgcactgctacgagctgtcctgaaacttcagaaagattgaggtagggatgcataccaagtctgaggatgatgcctttgcttaaggtttttctaccttgctagaacatattttgtggttagaactttgtcagaactacgtgcaatctgtttgaatgcttcgaacctttgtggtggaacctttgtatgtttgaacctctgttgtggaagaactagtgtgctggaattgtgtatgacttgtgatgagaatgttgtgtatgatggcttttctgtgtattatgattctgtgagctatcatgagagcttagtgtgtcgtcactgtatggtcattgtatgtgggtgccatattaaactaaacaaaacaaagctgtcacattatctcaacattaggtgacgcgttgactggaaaacatgtgacagataacaccgtcatatatagcaacaatatgtgacggacgaacgcag

SEQ ID NO: 207730 - DNA, 2228 bp, Zea Mays
cctctcggctgcccaccaccgcagacaagtccagtcctctccctccccttaatctagcgccgccactcacgcccaccacgccgctggtgaacggatccgtccatcccgtacaccgcccaaccgctgttccagtacccgcctcgtcgagttgagctgagtttagggcctgcgggagctgagccggtggcccatgcttcgcgaagggtagggttgtctgtctagctagctgctgcttggtctgatgagctcagttccggcgtcccgcctcggcttccccgcacgcttgctccgtcggctgcccagaacccagcttgcccgctccggcgcttctcttcgcttcttcgggaaagggtggagctttgaggtggtgcgggtgctcagccgaggactccgggcgatgacgcccgcagtggcgcgcgtttgtcgcgacagtcctgggttcggatagcgagttcctcgagcggatttggctgctgctgcatcctgcgtgggaaggggaggcggcggcagcaacagaggaaggggaggggttgctctgaagcggagggggagcgggctgacattgctgctgggagcatggcgagcttctaaggacgctcagctcccgtagcccagccattctcatcgcagaggagcaaagatatatggtcttttgtgctttctcttcgagtccgtgtgctatttgacaatgcaaaatgggcatatccttgtggattctcggaagaaaagcaggtatgtgtttaagatatagataaaacctgagtcatgttctttcaagaaaaaaatattgagtctccaacattgtgattccaaagaagtcattataggaaattttctgtgctaagtagccacctccagttccaaatgagtgttctatctttaggtggagttaagtctgttaatctgtttgttgttatgaatggaagcatgatgatttatatcacttggggctgcaaagagaaaggattcactttctactatacatgtgagtgggctaaaaggtggcttacatgttgcagaaagttcgaaggcagaaaactacttcatggctaagagagcaagtattacagcttggcccaacgtttattaagctcgggcagtgatcctccactagatctgatttatttcctagagaatttgtggacgagcttgctactgaaatgtaaagttaccatgtgctcctgaaatgtaaagttaccatgtgctccaattacttctgtgctaaatgaggtataatcaataggtgcttatgctccaattcttttatggtgaccatctaaaatagaaaacagcatgacaattgctatgtcatcaaacatgatcatcatcaatactagggtttctttaggccatgttattagtcttgacctgtctaggcagcattgatgcatgttcatgtgttctttttcttaaactataagtcattatttgactatgttgtattgttgttggcatgtaccaatatttcatggcaaatcttatatcccaagttttgtatatgccgcagaggactaagtacaacaacatggagccggatgctgttgatttctttggggaatgtatgaatagtccccgaaatggtcgtactccgcttgcaaatgagatatatgagcaaatggttgcagagaaggaaagagagctagaagaaggagaagcacaaaagtcaccctccaagctcaacaggccacacttgaagaaaaccaaagtttgctgcgccagacccaagaggaagtgaaggggttgcataccaagtttgaagagaccaatgcactgctacgagctgtcctgaaacttcagaaagattgaggtagggatgcataccaagtctgaggatgatgcctttgcttaaggtttttctaccttgctagaacatattttgtggttagaactttgtcagaactacgtgcaatctgtttgaatgcttcgaacctttgtggtggaacctttgtatgtttgaacctctgttgtggaagaactagtgtgctggaattgtgtatgacttgtgatgagaatgttgtgtatgatggcttttctgtgtattatgattctgtgagctatcatgagagcttagtgtgtcgtcactgtatggtcattgtatgtgggtgccatattaaactaaacaaaacaaagctgtcacattatctcaacattaggtgacgcgttgactggaaaacatgtgacagataacaccgtcatatatagcaacaatatgtgacggacgaacgcag

SEQ ID NO: 207731 - DNA, 1167 bp, Zea Mays
aaagccacagatgataaggaatggcagctcagctacttgtcctgagaggaaaaggagatggctacttggactaactcactttaccctcgctagtttgtgacatggtgtaagattcacagtttgttccaagtaagaagacgccaaatcatatactagccatcatcagacgagagggagaaccagcgaggactgccaagaagatgctgaagagactgctgacgaagactaagagcaagaagaagaaggaggctgcctcctctgccataccgacgttggatcggctccatgagactctagagatgctggagaagaaggagcgtttcctccagaagaaatgttccgcggaaatagagaaggcgaaggattacacaaaagcgaagaacaagaacgccgcaatccagtgcctaaagaagaagaaactgtacgagacacagatcgagcagctatcgaatttccagctgcgagtccatgaccagatcataatgctcgaaagcgccaaggcgaccacggacactgtcgacgctctgcgctcggggtcatctgctgtcaaggcgatgcagcaatcagtcaacgtggacgacatcgagaaggcgatcgaggaggcgaacgagcagacggagagcatgcgggagatgcagcaggcacttgcgacgccgattggcgcttccgctgacttcgacgaggacgagctagaagcggagctggaagagctggaggaggaggaggaggaggagggggagatcgaggacgagctgcctgagccgccggcgaggcggtccgtggaaccatcggcgaaagcggcggcggcgtcttctagacagggcagtgatgtgagcgagctgaccaggcttcaggcagagatggccctctagctgtctagcagtgatgtgatgtgagcgagctcgtcgttgcgcctgtattgtacacacgtgttttgctgtaaattcatcttgttctagaagacaagacacggcatagatgagagaatctagtcggtgtccggcggacgatgccagccggcagaagcagtttgactttgacggtctcggattgcggtccattgttccaacagatacgatgcgatatcattattcttatactctatcatgtaaaatgcaagaattgccaagatgttctaagatcactcgagttctggtcatttctaag

SEQ ID NO: 207732 - DNA, 1020 bp, Zea Mays
cgtccggggccatcatcagacgagagggagaaccagcgaggactgccaagaagatgctgaagagactgctgacgaagactaagagcaagaagaagaaggaggctgcctcctctgccataccgacgttggatcggctccatgagactctagagatgctggagaagaaggagcgtttcctccagaagaaatgttccgcggaaatagagaaggcgaaggattacacaaaagcgaagaacaagaacgccgcaatccagtgcctaaagaagaagaaactgtacgagacacagatcgagcagctatcgaatttccagctgcgagtccatgaccagatcataatgctcgaaagcgccaaggcgaccacggacactgtcgacgctctgcgctcggggtcatctgctgtcaaggcgatgcagcaatcagtcaacgtggacgacatcgagaaggcgatcgaggaggcgaacgagcagacggagagcatgcgggagatgcagcaggcacttgcgacgccgattggcgcttccgctgacttcgacgaggacgagctagaagcggagctggaagagctggaggaggaggaggaggaggagggggagatcgaggacgagctgcctgagccgccggcgaggcggtccgtggaaccatcggcgaaagcggcggcggcgtcttctagacagggcagtgatgtgagcgagctgaccaggcttcaggcagagatggccctctagctgtctagcagtgatgtgatgtgagcgagctcgtcgttgcgcctgtattgtacacacgtgttttgctgtaaattcatcttgttctagaagacaagacacggcatagatgagagaatctagtcggtgtccggcggacgatgccagccggcagaagcagtttgactttgacggtctcggattgcggtccattgttccaacagatacgatgcgatatcattattcttatactctatcatgtaaaatgcaagaattgccaagatgttctaagatcactcgagttctggtcatttctaag

SEQ ID NO: 207733 - DNA, 1282 bp, Zea Mays
ccttgcgctccaccgctccgcgcctgcagccgcattctattcactcacggcgtcggcagcgccacctgatccgcggccgcagccccatcatcggcgatccgctgcgcgctcccagtcccagtcccaggcacgcgggtgcggtttcgggcacggcggagaggtgaggctgttcgtccggggcggccatgcttgatcccttccgggaccggagttcactggtgcctgtcgatttctcaagcttgtttctttcggggtaagcgagaggcataggccatcatcagacgagagggagaaccagcgaggactgccaagaagatgctgaagagactgctgacgaagactaagagcaagaagaagaaggaggctgcctcctctgccataccgacgttggatcggctccatgagactctagagatgctggagaagaaggagcgtttcctccagaagaaatgttccgcggaaatagagaaggcgaaggattacacaaaagcgaagaacaagaacgccgcaatccagtgcctaaagaagaagaaactgtacgagacacagatcgagcagctatcgaatttccagctgcgagtccatgaccagatcataatgctcgaaagcgccaaggcgaccacggacactgtcgacgctctgcgctcggggtcatctgctgtcaaggcgatgcagcaatcagtcaacgtggacgacatcgagaaggcgatcgaggaggcgaacgagcagacggagagcatgcgggagatgcagcaggcacttgcgacgccgattggcgcttccgctgacttcgacgaggacgagctagaagcggagctggaagagctggaggaggaggaggaggaggagggggagatcgaggacgagctgcctgagccgccggcgaggcggtccgtggaaccatcggcgaaagcggcggcggcgtcttctagacagggcagtgatgtgagcgagctgaccaggcttcaggcagagatggccctctagctgtctagcagtgatgtgatgtgagcgagctcgtcgttgcgcctgtattgtacacacgtgttttgctgtaaattcatcttgttctagaagacaagacacggcatagatgagagaatctagtcggtgtccggcggacgatgccagccggcagaagcagtttgactttgacggtctcggattgcggtccattgttccaacagatacgatgcgatatcattattcttatactctatcatgtaaaatgcaagaattgccaagatgttctaagatcactcgagttctggtcatttctaag

SEQ ID NO: 207734 - DNA, 4232 bp, Zea Mays
attcctcccacattccaccgcacccacacgtttctttaccctaaccccgacagccgccgccgtttcttcatcttcctcgcagcgccggcgctccatcttccgctccctccccgactcgcgatcggcacgcaggcgacgtcggggcagtctcggactcggcggcggcgtcagcggctccccctcccgccctcgccagtcgcttccggtcctccgcacaccaaccggcgactctgcgtgcgcgcctcctgcttccggtggaccgtcgacggcgcccgggccccggtggccggcgggcagcgagagccagcagcctgttttcctcattggaaaggaaggacaatcagagccaagagtttcttcataaacctgaataaaaggacatgcgattacggaatacagacagggcaccgcgtagctcaggtcgtcgcaataatgttctttcatggatctctgaagttaaagacacatctaatgtgggcgtaagaaagaaaagggggagaagagcacctccatctgctaaaagattgcgtgataaaagggtggataaggcgattgaaagtgatggtgctgttgacagtgacagcgatgatacagatggacaggttgacaagaatcagcctagtgcacacattgaggaacatgttgatgggagaactggtgatgacttagcaacagcaggccactcaggcaattcttccaatggtccatcctcagcttcagaagaacaggaccattcaacaaactctaaagacaagctccaaaaagctagctctcaaaacacaaagaaggtttttggaaactcaacaaacggcaagcaaggtgcatctaatttggaacaggaatgtgcaaatgaagatgggtctcatgtgctagttgctgctgtgtacaaggatattgataatgaaagaagctctcaaaagattagggatgatcaggtatcagatgcacaactggatacagcttcatctgatgacaaaagttcagaagaagtcgaagacgtgaaggtttgtgacatttgtggagatgttggtgaggaggagaagctcgctgtctgtagcagatgcaatgacggcgcagagcacacgtattgcatgcgggtaatgatggaagaggttccagatagtgagtggttgtgtgaagactgccaaactgctgtagaatctgaaaatgagaatagactacaaaagtctcaggtgaaggctggcacttcaaaagagctttccttagaaggggagattaacaaacctgccattgctgcaaagggaagaagttcatctgactgtgaattgaaggctgggaatatagaaaacaaagagtcaaataccacaaatgagaggaatggcacagtcaaaaccaggacggaagaagatgctgtgacgacatcctcaactagagatattttttctgaaactggtggcttgtacatgggggctgactctagaaagagaatggaaccatcacacgagacattcgtgtctgatgctgacaaaggaaagcaacctagccatcaagtatcaacttcattggtggttaatgctctgaagaatcaggcaccacagtctcgtggtcaactttccaaatccacttctttcaataactcaaaggtccccaaagtgaaacagctattgaatgaagttcctcagaagccaaaatttttgaaggaatcttggtcctctattatcaataaaaaggaaggaccaatcagcatgactactaagtcagcgaccttcaaaaagcctaagccttgtgagccaacaaacaaggcaaagtcttccgtcttgtcacctgtcgaggagccaagggtgccgaatcagttggcgagccacaatgtaacaaatggtcagtgttctatattggggcctccctctgccacatcatcaatggttgctcctgttctaagaactgatagcacaactcagctgctctctacaagaaataacacagttgactcaaataatttaggttctgttcatctacaaggaaacagtgagctaaagaagcctcgtttagcaaaagtgccgggaagtatgatgctatctaatgctgaaagatccgcaggtgggattcttggttccggtgctcatcgagaagtgattcaaaattcagacccttcacatagggatgctaaaataaaggaccaaactggcttcagacagggtgcttctagcagcaatcggacaatccgttgccaaagatgtaatgaatatggccattctacacatttttgcgaagttgaaaaacttcgtttgtcttcaggaaaacctttgagtgagcgaaacttgaaggatgcatctgccaaaagaaataagacatccgaagttagtacattggcttctagtgaaaaaactccttccagagaaccagagcatgtcgtaaagtgtgctattaatcagaatctgataaatgggcctaatgatggtatacctgccccattcagccatgtaaagaagcactcattatcacctcgagctaatgtgtccatccctgggagcggagtagattgtagcaagcctaagttcaaaaataatgatccatctctatctggcacagcaggaatctttgttcataatggtcgcattatgccaaatgatcatagggatgaacctgctcaagggttttcagctggtgatgaaccaacgtcttcaactgtccctgagctgggctggatatggcaaggtggttttgagctgcagaggactggaagttcaccggagctgtgtgatggtttccaagcccatttatcatgttctgcttcacagttagtgctggacgcagttaagaaattcccttctaaagtccagcttgaggaagttcctcggaagaattcatggccaacacagtttcagaaaaacggtccaacttatgacaacataggtctttttttctttgctagagatgttcaaagctatgaaaatcactacagtaaattagttgagaatatgctgaagaatgatttagttctcagaggaagtgttggtactgttgagttgcttatattcccttccaatatcctatcaaagaacttccaaaggtggaatatgttgtactttctatggggtctattcagagttagcaaaaaagattcctctaacctcccatcttatctatccacaagtagagtagaacgaaattttaatgatgatctccaggccatggattggatgccatctacccattcattctcacagaacaggagtgatttagctgaaccggaccctgatttgttaaagtcaactaattttgaaccgagtttggaagccagtcgtgaggtgtgtttggatggagagaactctttgaatcaacttgtacgcagaagagctctagatgatcacctagattcagatgcaaaagcatgttcaacgattagcaatggtgccatgggttcctctgccatgtctatgcaaagaaaacatcagaaacctgattatccagaacatcaagataaaaagagggacacttttggtggtaatgttagtgaaagagatttcgatgtgaacacggtgccagttacttgttctgtctccttaactcaccttcaggaagaacctggtaagctgagcacagccatcgacctcatggatatagaccatggggttagcgcaggtgcactggatcgttcacatgcatcaggtggtgcaggtaaaagaagttttgagacggccgaagtagctgctgaagtacccgagcataagaaaactaagctggataataatgttgtgcctataagctctggtccacgcgagaatgcctgtacgaatgatggcaatagcgataaactgatgcctggaagctcaagcagtgatggcaagcgcgtgtttccacttgatctaaatgcagtgggggatgaggacatcgtaaatattccagccttcaggtgatgaagagttcgctgttccatgacaaaccaaccgtggtggtttggttcagaatgagagatgtgcattgtaaatcgcatgtgcagtttttgacctaatgttttcagacaacacttacagatgtgatgttcccctctttggcagtgaataattctgctccagaatatgcttacagatgtgatctcatctgccagattccttgtgatgtcatgctaatatcgtacaccacctggcttcgcttggcaggatacacgtccatcaagttactaattaggatgcgtgtatgcacgtggagacaccgttcaaacggacgtgtaaaacactgttttctactctgtaggtgacaatttatagata

SEQ ID NO: 207735 - DNA, 4095 bp, Zea Mays
attcctcccacattccaccgcacccacacgtttctttaccctaaccccgacagccgccgccgtttcttcatcttcctcgcagcgccggcgctccatcttccgctccctccccgactcgcgatcggcacgcaggcgacgtcggggcagtctcggactcggcggcggcgtcagcggctccccctcccgccctcgccagtcgcttccggtcctccgcacaccaaccggcgactctgcgtgcgcgcctcctgcttccggtggaccgtcgacggcgcccgggccccggtggccggcgggcagcgagagccagcagcctggcagttttcctcattggaaaggaaggacaatcagagccaagagtttcttcataaacctgaataaaaggacatgcgattacggaatacagacagggcaccgcgtagctcaggtcgtcgcaataatgttctttcatggatctctgaagttaaagacacatctaatgtgggcgtaagaaagaaaagggggagaagagcacctccatctgctaaaagattgcgtgataaaagggtggataaggcgattgaaagtgatggtgctgttgacagtgacagcgatgatacagatggacaggttgacaagaatcagcctagtgcacacattgaggaacatgttgatgggagaactggtgatgacttagcaacagcaggccactcaggcaattcttccaatggtccatcctcagcttcagaagaacaggaccattcaacaaactctaaagacaagctccaaaaagctagctctcaaaacacaaagaaggtttttggaaactcaacaaacggcaagcaaggtgcatctaatttggaacaggaatgtgcaaatgaagatgggtctcatgtgctagttgctgctgtgtacaaggatattgataatgaaagaagctctcaaaagattagggatgatcaggtatcagatgcacaactggatacagcttcatctgatgacaaaagttcagaagaagtcgaagacgtgaaggtttgtgacatttgtggagatgttggtgaggaggagaagctcgctgtctgtagcagatgcaatgacggcgcagagcacacgtattgcatgcgggtaatgatggaagaggttccagatagtgagtggttgtgtgaagactgccaaactgctgtagaatctgaaaatgagaatagactacaaaagtctcaggtgaaggctggcacttcaaaagagctttccttagaaggggagattaacaaacctgccattgctgcaaagggaagaagttcatctgactgtgaattgaaggctgggaatatagaaaacaaagagtcaaataccacaaatgagaggaatggcacagtcaaaaccaggacggaagaagatgctgtgacgacatcctcaactagagatattttttctgaaactggtggcttgtacatgggggctgactctagaaagagaatggaaccatcacacgagacattcgtgtctgatgctgacaaaggaaagcaacctagccatcaagtatcaacttcattggtggttaatgctctgaagaatcaggcaccacagtctcgtggtcaactttccaaatccacttctttcaataactcaaaggtccccaaagtgaaacagctattgaatgaagttcctcagaagccaaaatttttgaaggaatcttggtcctctattatcaataaaaaggaaggaccaatcagcatgactactaagtcagcgaccttcaaaaagcctaagccttgtgagccaacaaacaaggcaaagtcttccgtcttgtcacctgtcgaggagccaagggtgccgaatcagttggcgagccacaatgtaacaaatggaaacagtgagctaaagaagcctcgtttagcaaaagtgccgggaagtatgatgctatctaatgctgaaagatccgcaggtgggattcttggttccggtgctcatcgagaagtgattcaaaattcagacccttcacatagggatgctaaaataaaggaccaaactggcttcagacagggtgcttctagcagcaatcggacaatccgttgccaaagatgtaatgaatatggccattctacacatttttgcgaagttgaaaaacttcgtttgtcttcaggaaaacctttgagtgagcgaaacttgaaggatgcatctgccaaaagaaataagacatccgaagttagtacattggcttctagtgaaaaaactccttccagagaaccagagcatgtcgtaaagtgtgctattaatcagaatctgataaatgggcctaatgatggtatacctgccccattcagccatgtaaagaagcactcattatcacctcgagctaatgtgtccatccctgggagcggagtagattgtagcaagcctaagttcaaaaataatgatccatctctatctggcacagcaggaatctttgttcataatggtcgcattatgccaaatgatcatagggatgaacctgctcaagggttttcagctggtgatgaaccaacgtcttcaactgtccctgagctgggctggatatggcaaggtggttttgagctgcagaggactggaagttcaccggagctgtgtgatggtttccaagcccatttatcatgttctgcttcacagttagtgctggacgcagttaagaaattcccttctaaagtccagcttgaggaagttcctcggaagaattcatggccaacacagtttcagaaaaacggtccaacttatgacaacataggtctttttttctttgctagagatgttcaaagctatgaaaatcactacagtaaattagttgagaatatgctgaagaatgatttagttctcagaggaagtgttggtactgttgagttgcttatattcccttccaatatcctatcaaagaacttccaaaggtggaatatgttgtactttctatggggtctattcagagttagcaaaaaagattcctctaacctcccatcttatctatccacaagtagagtagaacgaaattttaatgatgatctccaggccatggattggatgccatctacccattcattctcacagaacaggagtgatttagctgaaccggaccctgatttgttaaagtcaactaattttgaaccgagtttggaagccagtcgtgaggtgtgtttggatggagagaactctttgaatcaacttgtacgcagaagagctctagatgatcacctagattcagatgcaaaagcatgttcaacgattagcaatggtgccatgggttcctctgccatgtctatgcaaagaaaacatcagaaacctgattatccagaacatcaagataaaaagagggacacttttggtggtaatgttagtgaaagagatttcgatgtgaacacggtgccagttacttgttctgtctccttaactcaccttcaggaagaacctggtaagctgagcacagccatcgacctcatggatatagaccatggggttagcgcaggtgcactggatcgttcacatgcatcaggtggtgcaggtaaaagaagttttgagacggccgaagtagctgctgaagtacccgagcataagaaaactaagctggataataatgttgtgcctataagctctggtccacgcgagaatgcctgtacgaatgatggcaatagcgataaactgatgcctggaagctcaagcagtgatggcaagcgcgtgtttccacttgatctaaatgcagtgggggatgaggacatcgtaaatattccagccttcaggtgatgaagagttcgctgttccatgacaaaccaaccgtggtggtttggttcagaatgagagatgtgcattgtaaatcgcatgtgcagtttttgacctaatgttttcagacaacacttacagatgtgatgttcccctctttggcagtgaataattctgctccagaatatgcttacagatgtgatctcatctgccagattccttgtgatgtcatgctaatatcgtacaccacctggcttcgcttggcaggatacacgtccatcaagttactaattaggatgcgtgtatgcacgtggagacaccgttcaaacggacgtgtaaaacactgttttctactctgtaggtgacaatttatagata

SEQ ID NO: 207736 - DNA, 4221 bp, Zea Mays
attcctcccacattccaccgcacccacacgtttctttaccctaaccccgacagccgccgccgtttcttcatcttcctcgcagcgccggcgctccatcttccgctccctccccgactcgcgatcggcacgcaggcgacgtcggggcagtctcggactcggcggcggcgtcagcggctccccctcccgccctcgccagtcgcttccggtcctccgcacaccaaccggcgactctgcgtgcgcgcctcctgcttccggtggaccgtcgacggcgcccgggccccggtggccggcgggcagcgagagccagcagcctggcagttttcctcattggaaaggaaggacaatcagagccaagagtttcttcataaacctgaataaaaggacatgcgatacagggcaccgcgtagctcaggtcgtcgcaataatgttctttcatggatctctgaagttaaagacacatctaatgtgggcgtaagaaagaaaagggggagaagagcacctccatctgctaaaagattgcgtgataaaagggtggataaggcgattgaaagtgatggtgctgttgacagtgacagcgatgatacagatggacaggttgacaagaatcagcctagtgcacacattgaggaacatgttgatgggagaactggtgatgacttagcaacagcaggccactcaggcaattcttccaatggtccatcctcagcttcagaagaacaggaccattcaacaaactctaaagacaagctccaaaaagctagctctcaaaacacaaagaaggtttttggaaactcaacaaacggcaagcaaggtgcatctaatttggaacaggaatgtgcaaatgaagatgggtctcatgtgctagttgctgctgtgtacaaggatattgataatgaaagaagctctcaaaagattagggatgatgtatcagatgcacaactggatacagcttcatctgatgacaaaagttcagaagaagtcgaagacgtgaaggtttgtgacatttgtggagatgttggtgaggaggagaagctcgctgtctgtagcagatgcaatgacggcgcagagcacacgtattgcatgcgggtaatgatggaagaggttccagatagtgagtggttgtgtgaagactgccaaactgctgtagaatctgaaaatgagaatagactacaaaagtctcaggtgaaggctggcacttcaaaagagctttccttagaaggggagattaacaaacctgccattgctgcaaagggaagaagttcatctgactgtgaattgaaggctgggaatatagaaaacaaagagtcaaataccacaaatgagaggaatggcacagtcaaaaccaggacggaagaagatgctgtgacgacatcctcaactagagatattttttctgaaactggtggcttgtacatgggggctgactctagaaagagaatggaaccatcacacgagacattcgtgtctgatgctgacaaaggaaagcaacctagccatcaagtatcaacttcattggtggttaatgctctgaagaatcaggcaccacagtctcgtggtcaactttccaaatccacttctttcaataactcaaaggtccccaaagtgaaacagctattgaatgaagttcctcagaagccaaaatttttgaaggaatcttggtcctctattatcaataaaaaggaaggaccaatcagcatgactactaagtcagcgaccttcaaaaagcctaagccttgtgagccaacaaacaaggcaaagtcttccgtcttgtcacctgtcgaggagccaagggtgccgaatcagttggcgagccacaatgtaacaaatggtcagtgttctatattggggcctccctctgccacatcatcaatggttgctcctgttctaagaactgatagcacaactcagctgctctctacaagaaataacacagttgactcaaataatttaggttctgttcatctacaaggaaacagtgagctaaagaagcctcgtttagcaaaagtgccgggaagtatgatgctatctaatgctgaaagatccgcaggtgggattcttggttccggtgctcatcgagaagtgattcaaaattcagacccttcacatagggatgctaaaataaaggaccaaactggcttcagacagggtgcttctagcagcaatcggacaatccgttgccaaagatgtaatgaatatggccattctacacatttttgcgaagttgaaaaacttcgtttgtcttcaggaaaacctttgagtgagcgaaacttgaaggatgcatctgccaaaagaaataagacatccgaagttagtacattggcttctagtgaaaaaactccttccagagaaccagagcatgtcgtaaagtgtgctattaatcagaatctgataaatgggcctaatgatggtatacctgccccattcagccatgtaaagaagcactcattatcacctcgagctaatgtgtccatccctgggagcggagtagattgtagcaagcctaagttcaaaaataatgatccatctctatctggcacagcaggaatctttgttcataatggtcgcattatgccaaatgatcatagggatgaacctgctcaagggttttcagctggtgatgaaccaacgtcttcaactgtccctgagctgggctggatatggcaaggtggttttgagctgcagaggactggaagttcaccggagctgtgtgatggtttccaagcccatttatcatgttctgcttcacagttagtgctggacgcagttaagaaattcccttctaaagtccagcttgaggaagttcctcggaagaattcatggccaacacagtttcagaaaaacggtccaacttatgacaacataggtctttttttctttgctagagatgttcaaagctatgaaaatcactacagtaaattagttgagaatatgctgaagaatgatttagttctcagaggaagtgttggtactgttgagttgcttatattcccttccaatatcctatcaaagaacttccaaaggtggaatatgttgtactttctatggggtctattcagagttagcaaaaaagattcctctaacctcccatcttatctatccacaagtagagtagaacgaaattttaatgatgatctccaggccatggattggatgccatctacccattcattctcacagaacaggagtgatttagctgaaccggaccctgatttgttaaagtcaactaattttgaaccgagtttggaagccagtcgtgaggtgtgtttggatggagagaactctttgaatcaacttgtacgcagaagagctctagatgatcacctagattcagatgcaaaagcatgttcaacgattagcaatggtgccatgggttcctctgccatgtctatgcaaagaaaacatcagaaacctgattatccagaacatcaagataaaaagagggacacttttggtggtaatgttagtgaaagagatttcgatgtgaacacggtgccagttacttgttctgtctccttaactcaccttcaggaagaacctggtaagctgagcacagccatcgacctcatggatatagaccatggggttagcgcaggtgcactggatcgttcacatgcatcaggtggtgcaggtaaaagaagttttgagacggccgaagtagctgctgaagtacccgagcataagaaaactaagctggataataatgttgtgcctataagctctggtccacgcgagaatgcctgtacgaatgatggcaatagcgataaactgatgcctggaagctcaagcagtgatggcaagcgcgtgtttccacttgatctaaatgcagtgggggatgaggacatcgtaaatattccagccttcaggtgatgaagagttcgctgttccatgacaaaccaaccgtggtggtttggttcagaatgagagatgtgcattgtaaatcgcatgtgcagtttttgacctaatgttttcagacaacacttacagatgtgatgttcccctctttggcagtgaataattctgctccagaatatgcttacagatgtgatctcatctgccagattccttgtgatgtcatgctaatatcgtacaccacctggcttcgcttggcaggatacacgtccatcaagttactaattaggatgcgtgtatgcacgtggagacaccgttcaaacggacgtgtaaaacactgttttctactctgtaggtgacaatttatagata

SEQ ID NO: 207737 - DNA, 4249 bp, Zea Mays
ttccatccgctgcattcctcccacattccaccgcacccacacgtttctttaccctaaccccgacagccgccgccgtttcttcatcttcctcgcagcgccggcgctccatcttccgctccctccccgactcgcgatcggcacgcaggcgacgtcggggcagtctcggactcggcggcggcgtcagcggctccccctcccgccctcgccagtcgcttccggtcctccgcacaccaaccggcgactctgcgtgcgcgcctcctgcttccggtggaccgtcgacggcgcccgggccccggtggccggcgggcagcgagagccagcagcctggcagttttcctcattggaaaggaaggacaatcagagccaagagtttcttcataaacctgaataaaaggacatgcgattacggaatacagacagggcaccgcgtagctcaggtcgtcgcaataatgttctttcatggatctctgaagttaaagacacatctaatgtgggcgtaagaaagaaaagggggagaagagcacctccatctgctaaaagattgcgtgataaaagggtggataaggcgattgaaagtgatggtgctgttgacagtgacagcgatgatacagatggacaggttgacaagaatcagcctagtgcacacattgaggaacatgttgatgggagaactggtgatgacttagcaacagcaggccactcaggcaattcttccaatggtccatcctcagcttcagaagaacaggaccattcaacaaactctaaagacaagctccaaaaagctagctctcaaaacacaaagaaggtttttggaaactcaacaaacggcaagcaaggtgcatctaatttggaacaggaatgtgcaaatgaagatgggtctcatgtgctagttgctgctgtgtacaaggatattgataatgaaagaagctctcaaaagattagggatgatcaggtatcagatgcacaactggatacagcttcatctgatgacaaaagttcagaagaagtcgaagacgtgaaggtttgtgacatttgtggagatgttggtgaggaggagaagctcgctgtctgtagcagatgcaatgacggcgcagagcacacgtattgcatgcgggtaatgatggaagaggttccagatagtgagtggttgtgtgaagactgccaaactgctgtagaatctgaaaatgagaatagactacaaaagtctcaggtgaaggctggcacttcaaaagagctttccttagaaggggagattaacaaacctgccattgctgcaaagggaagaagttcatctgactgtgaattgaaggctgggaatatagaaaacaaagagtcaaataccacaaatgagaggaatggcacagtcaaaaccaggacggaagaagatgctgtgacgacatcctcaactagagatattttttctgaaactggtggcttgtacatgggggctgactctagaaagagaatggaaccatcacacgagacattcgtgtctgatgctgacaaaggaaagcaacctagccatcaagtatcaacttcattggtggttaatgctctgaagaatcaggcaccacagtctcgtggtcaactttccaaatccacttctttcaataactcaaaggtccccaaagtgaaacagctattgaatgaagttcctcagaagccaaaatttttgaaggaatcttggtcctctattatcaataaaaaggaaggaccaatcagcatgactactaagtcagcgaccttcaaaaagcctaagccttgtgagccaacaaacaaggcaaagtcttccgtcttgtcacctgtcgaggagccaagggtgccgaatcagttggcgagccacaatgtaacaaatggtcagtgttctatattggggcctccctctgccacatcatcaatggttgctcctgttctaagaactgatagcacaactcagctgctctctacaagaaataacacagttgactcaaataatttaggttctgttcatctacaaggaaacagtgagctaaagaagcctcgtttagcaaaagtgccgggaagtatgatgctatctaatgctgaaagatccgcaggtgggattcttggttccggtgctcatcgagaagtgattcaaaattcagacccttcacatagggatgctaaaataaaggaccaaactggcttcagacagggtgcttctagcagcaatcggacaatccgttgccaaagatgtaatgaatatggccattctacacatttttgcgaagttgaaaaacttcgtttgtcttcaggaaaacctttgagtgagcgaaacttgaaggatgcatctgccaaaagaaataagacatccgaagttagtacattggcttctagtgaaaaaactccttccagagaaccagagcatgtcgtaaagtgtgctattaatcagaatctgataaatgggcctaatgatggtatacctgccccattcagccatgtaaagaagcactcattatcacctcgagctaatgtgtccatccctgggagcggagtagattgtagcaagcctaagttcaaaaataatgatccatctctatctggcacagcaggaatctttgttcataatggtcgcattatgccaaatgatcatagggatgaacctgctcaagggttttcagctggtgatgaaccaacgtcttcaactgtccctgagctgggctggatatggcaaggtggttttgagctgcagaggactggaagttcaccggagctgtgtgatggtttccaagcccatttatcatgttctgcttcacagttagtgctggacgcagttaagaaattcccttctaaagtccagcttgaggaagttcctcggaagaattcatggccaacacagtttcagaaaaacggtccaacttatgacaacataggtctttttttctttgctagagatgttcaaagctatgaaaatcactacagtaaattagttgagaatatgctgaagaatgatttagttctcagaggaagtgttggtactgttgagttgcttatattcccttccaatatcctatcaaagaacttccaaaggtggaatatgttgtactttctatggggtctattcagagttagcaaaaaagattcctctaacctcccatcttatctatccacaagtagagtagaacgaaattttaatgatgatctccaggccatggattggatgccatctacccattcattctcacagaacaggagtgatttagctgaaccggaccctgatttgttaaagtcaactaattttgaaccgagtttggaagccagtcgtgaggtgtgtttggatggagagaactctttgaatcaacttgtacgcagaagagctctagatgatcacctagattcagatgcaaaagcatgttcaacgattagcaatggtgccatgggttcctctgccatgtctatgcaaagaaaacatcagaaacctgattatccagaacatcaagataaaaagagggacacttttggtggtaatgttagtgaaagagatttcgatgtgaacacggtgccagttacttgttctgtctccttaactcaccttcaggaagaacctggtaagctgagcacagccatcgacctcatggatatagaccatggggttagcgcaggtgcactggatcgttcacatgcatcaggtggtgcaggtaaaagaagttttgagacggccgaagtagctgctgaagtacccgagcataagaaaactaagctggataataatgttgtgcctataagctctggtccacgcgagaatgcctgtacgaatgatggcaatagcgataaactgatgcctggaagctcaagcagtgatggcaagcgcgtgtttccacttgatctaaatgcagtgggggatgaggacatcgtaaatattccagccttcaggtgatgaagagttcgctgttccatgacaaaccaaccgtggtggtttggttcagaatgagagatgtgcattgtaaatcgcatgtgcagtttttgacctaatgttttcagacaacacttacagatgtgatgttcccctctttggcagtgaataattctgctccagaatatgcttacagatgtgatctcatctgccagattccttgtgatgtcatgctaatatcgtacaccacctggcttcgcttggcaggatacacgtccatcaagttactaattaggatgcgtgtatgcacgtggagacaccgttcaaacggacgtgtaaaacactgttttctactctgtaggtgacaatttatagata

SEQ ID NO: 207738 - DNA, 4262 bp, Zea Mays
tccgctgattctccccttccatccgctgcattcctcccacattccaccgcacccacacgtttctttaccctaaccccgacagccgccgccgtttcttcatcttcctcgcagcgccggcgctccatcttccgctccctccccgactcgcgatcggcacgcaggcgacgtcggggcagtctcggactcggcggcggcgtcagcggctccccctcccgccctcgccagtcgcttccggtcctccgcacaccaaccggcgactctgcgtgcgcgcctcctgcttccggtggaccgtcgacggcgcccgggccccggtggccggcgggcagcgagagccagcagcctggcagttttcctcattggaaaggaaggacaatcagagccaagagtttcttcataaacctgaataaaaggacatgcgattacggaatacagacagggcaccgcgtagctcaggtcgtcgcaataatgttctttcatggatctctgaagttaaagacacatctaatgtgggcgtaagaaagaaaagggggagaagagcacctccatctgctaaaagattgcgtgataaaagggtggataaggcgattgaaagtgatggtgctgttgacagtgacagcgatgatacagatggacaggttgacaagaatcagcctagtgcacacattgaggaacatgttgatgggagaactggtgatgacttagcaacagcaggccactcaggcaattcttccaatggtccatcctcagcttcagaagaacaggaccattcaacaaactctaaagacaagctccaaaaagctagctctcaaaacacaaagaaggtttttggaaactcaacaaacggcaagcaaggtgcatctaatttggaacaggaatgtgcaaatgaagatgggtctcatgtgctagttgctgctgtgtacaaggatattgataatgaaagaagctctcaaaagattagggatgatgtatcagatgcacaactggatacagcttcatctgatgacaaaagttcagaagaagtcgaagacgtgaaggtttgtgacatttgtggagatgttggtgaggaggagaagctcgctgtctgtagcagatgcaatgacggcgcagagcacacgtattgcatgcgggtaatgatggaagaggttccagatagtgagtggttgtgtgaagactgccaaactgctgtagaatctgaaaatgagaatagactacaaaagtctcaggtgaaggctggcacttcaaaagagctttccttagaaggggagattaacaaacctgccattgctgcaaagggaagaagttcatctgactgtgaattgaaggctgggaatatagaaaacaaagagtcaaataccacaaatgagaggaatggcacagtcaaaaccaggacggaagaagatgctgtgacgacatcctcaactagagatattttttctgaaactggtggcttgtacatgggggctgactctagaaagagaatggaaccatcacacgagacattcgtgtctgatgctgacaaaggaaagcaacctagccatcaagtatcaacttcattggtggttaatgctctgaagaatcaggcaccacagtctcgtggtcaactttccaaatccacttctttcaataactcaaaggtccccaaagtgaaacagctattgaatgaagttcctcagaagccaaaatttttgaaggaatcttggtcctctattatcaataaaaaggaaggaccaatcagcatgactactaagtcagcgaccttcaaaaagcctaagccttgtgagccaacaaacaaggcaaagtcttccgtcttgtcacctgtcgaggagccaagggtgccgaatcagttggcgagccacaatgtaacaaatggtcagtgttctatattggggcctccctctgccacatcatcaatggttgctcctgttctaagaactgatagcacaactcagctgctctctacaagaaataacacagttgactcaaataatttaggttctgttcatctacaaggaaacagtgagctaaagaagcctcgtttagcaaaagtgccgggaagtatgatgctatctaatgctgaaagatccgcaggtgggattcttggttccggtgctcatcgagaagtgattcaaaattcagacccttcacatagggatgctaaaataaaggaccaaactggcttcagacagggtgcttctagcagcaatcggacaatccgttgccaaagatgtaatgaatatggccattctacacatttttgcgaagttgaaaaacttcgtttgtcttcaggaaaacctttgagtgagcgaaacttgaaggatgcatctgccaaaagaaataagacatccgaagttagtacattggcttctagtgaaaaaactccttccagagaaccagagcatgtcgtaaagtgtgctattaatcagaatctgataaatgggcctaatgatggtatacctgccccattcagccatgtaaagaagcactcattatcacctcgagctaatgtgtccatccctgggagcggagtagattgtagcaagcctaagttcaaaaataatgatccatctctatctggcacagcaggaatctttgttcataatggtcgcattatgccaaatgatcatagggatgaacctgctcaagggttttcagctggtgatgaaccaacgtcttcaactgtccctgagctgggctggatatggcaaggtggttttgagctgcagaggactggaagttcaccggagctgtgtgatggtttccaagcccatttatcatgttctgcttcacagttagtgctggacgcagttaagaaattcccttctaaagtccagcttgaggaagttcctcggaagaattcatggccaacacagtttcagaaaaacggtccaacttatgacaacataggtctttttttctttgctagagatgttcaaagctatgaaaatcactacagtaaattagttgagaatatgctgaagaatgatttagttctcagaggaagtgttggtactgttgagttgcttatattcccttccaatatcctatcaaagaacttccaaaggtggaatatgttgtactttctatggggtctattcagagttagcaaaaaagattcctctaacctcccatcttatctatccacaagtagagtagaacgaaattttaatgatgatctccaggccatggattggatgccatctacccattcattctcacagaacaggagtgatttagctgaaccggaccctgatttgttaaagtcaactaattttgaaccgagtttggaagccagtcgtgaggtgtgtttggatggagagaactctttgaatcaacttgtacgcagaagagctctagatgatcacctagattcagatgcaaaagcatgttcaacgattagcaatggtgccatgggttcctctgccatgtctatgcaaagaaaacatcagaaacctgattatccagaacatcaagataaaaagagggacacttttggtggtaatgttagtgaaagagatttcgatgtgaacacggtgccagttacttgttctgtctccttaactcaccttcaggaagaacctggtaagctgagcacagccatcgacctcatggatatagaccatggggttagcgcaggtgcactggatcgttcacatgcatcaggtggtgcaggtaaaagaagttttgagacggccgaagtagctgctgaagtacccgagcataagaaaactaagctggataataatgttgtgcctataagctctggtccacgcgagaatgcctgtacgaatgatggcaatagcgataaactgatgcctggaagctcaagcagtgatggcaagcgcgtgtttccacttgatctaaatgcagtgggggatgaggacatcgtaaatattccagccttcaggtgatgaagagttcgctgttccatgacaaaccaaccgtggtggtttggttcagaatgagagatgtgcattgtaaatcgcatgtgcagtttttgacctaatgttttcagacaacacttacagatgtgatgttcccctctttggcagtgaataattctgctccagaatatgcttacagatgtgatctcatctgccagattccttgtgatgtcatgctaatatcgtacaccacctggcttcgcttggcaggatacacgtccatcaagttactaattaggatgcgtgtatgcacgtggagacaccgttcaaacggacgtgtaaaacactgttttctactctgtaggtgacaatttatagata

SEQ ID NO: 207739 - DNA, 1767 bp, Zea Mays
tttaaacagctcccctccccctgctctcccagccccaggaggacagtcccgttccagtcagagcgcagccagttcccccggcccctcccccctcccgctcgccggcggcgatggggcacggcgcgagctgcagccgcccaagcgaggaggtggacttcttcggcgcggcgcagtgcggggacacggcccgcctcgccgccgctcttcgctcccgccccaccttgctcgcccgcaccacgctcttcgaccgcctctccgcgctccacatcgccgccgcacacggccacctccaggtggtctccctagcattagatctttgcgtgcaccccgacgtcgttaaccgccacaagcagacggcattgatgctcgcggcgatgcacgggaagaccgactgcgtccggcggcttctcgacgccggcgccaatatcgtgatgttcgattcctcgcatcggcggacgtcgccgtgaagcgagggcacgtcgcgtgcgcggcgctgctgaacccgtcatccgcggagcccctggtctggccgtccgctctcaagttcatcagcgagctggaacccgacgccaaatctctcctcgaagcagccctgatggaggccaacagagagagggagaggaggatcctgaaagggactaagaatgcgttgccgtcgccaccgcaccacgatgacggcgctcatgacaccgccattgccgaggcgagcgacgcggaggtgtgcagcatctgcttcgagcaggcgtgcagcatcgaggtccgggagtgcgggcaccagatgtgctcggcgtgcacgctggcgctgtgctgccacgccaagcccaacccggcgacgcagtcccagccgctgccgacctgcccgttctgccgcggcggcatcgcgcggctggtggtggcgacgcggacgagggctggccacgacgacgagcgggacaagctggagtcgcccaggcaccgccggtcccgccggtccatgaacctcagcggcgacgcgggcagcaccagcagcacactcatgggcagcatcgcctcgtccatcggcaagatgggccgccgacgaacagatagcagcgagcaggtcgacgacaagccgtagcagaaatgcagaatcctttcatgcacccgtccattcataatccacgtgaaatctgtcgccgtcgtggccgccgccatcccatccctccaggaacgaacaagcctgtttttgtagattatttttggcaaatgagttattcacctgtgtagattcattcaagaagagccagtcctgtagctaagctttgatccgatcagcgatcatccgaataagcagcccgtccttccctggcagtggcaggccccatgcggccatgtgataatccgtggatgcgagtctcgaaaggctgctgtacatgtctgattcgcagaggtatggcccggtctgctaatgagaagccggtacaaaaatccatgtgattgattgcccggggctgcggcgctcagggtttggcctatagcagccctcagcatttgtcaaaatccagtgaagatcttggttactgttctggataggaggaaaaggtctattttaccttctctagctatcgcaaaagttatatttttcttaactattaaaccgaccgaacgcgtgatctcgctgtttctgtttattagtatttttctccttttttttatatttattttgcagtaaattatagaaaatataaagagctgctagttgcattggaacagacagcttattcatttggctttaattcgtaccgtctg

SEQ ID NO: 207740 - DNA, 2220 bp, Zea Mays
gaacctttcaagatcaatgcatgcaatggtttctactgtgatgcattttctcctaacaaaccttacaagcccacaatgtggactgaagcttggagtggctagttcacggaatttgttgggaccatccgccaacggccggttgaagatcttgcatttgctcgatttgtacaaaagggtggttcttttatcaattactacatgtaccatggaggaacaaattttgggcgcactgctgggggtcccttcatcacaacaagctatgattatgatgctccaattgatgaatatggactttttagagaaccaaagcacagtcatcttaaagaactccacagagctgttaagttatgcgagcaggctttggtttctgttgacccagcaattactacccttgtaccatgcaagagctttccttgcaaactacaattctaactcctatgcgaatgttgtattcaacaatgagcaatacagcctaccacattggtcgattagcatccttcctgattgcaaaaatgttgtttttaacagtgtcacagttggtgttcagacatctcagatgcaaatgtgtggagatgatgcctcatcaatgacgtggaagaggtatgatgaggaggtttattctctggcagctgctccattgctcaccacgactagtttgcttgagcagcttaatgtcacgagagacaacagtgattatttgtggtacatcaccagtgttgacataagctcatctgaaaactttctacaaggtggcggcaagcctctgtctctcagtgtgcagtctgctggtcatgccttgcatgtctttgtcaatggacagcttcaaggttctgcatatggtactagggaagattgaagaatcaaatacaatggcaatgctaaccttcgagccggcactaacaaaatttccatgctaagtgttgcctgtggattgccgaatgttggagtgcattatgagacgtggaacactggtgttggtggtcctgttgtgcttcataggctggatgaaggttcacgagaccttacttggcagacttggtcctatcaggtcgcccgagtgctacttgtgctaccgagtgctgctgtgcagcctatgctacctggtgtgtgactgcgtggtgactgcttggtgcttggctgcttgctgccgagtgtaagacgccaggaccaggaggcaggaccgccggagcagcgagtaggagccaggagcccaacctaggtccatgtggcgagcacagatgtgcagagaagataggcagacaacaaaatctaccttgtagttcaagtatacccttacccaaacccaatactttgggtacttgaaatttcaggtacctaaaatattcagctcaagttcggtttgacctgttagatacctgaaatatataaaacccgaactacctgacctgaatttttgggtatacccgaatgcccagtcctaactgggatagatgcgaggcgtgctcctctgccttggggcgacagtagatgggctcccagcggctcccaggtctacgccggcggctccagctgatccttgcagtgtgcgtgtgcttgtgctggagtgggactggacaccgtagggctgtgcgactgtggctctgtgttgtttagtgtcaaccctagaaagcccacaaaggcacaaagcaattgcccagttaaacccaactgaaaaaggccatctagaactacagacctaaacaagtcatcctctccctaattggactagtcatgactagtcgtcgactcgtcggatgacccgatttgtagtcggactaatcgcctcagtgaccctagtcgtagccagggcatagattagtctgatggaattagtcttgagcatctgtggagaagatcagtcttttgactgcacaaggacgacatctagacaacagtcttttgattgtacaaggctgtcgaggacaacagtcttttgactacacaaggacaacatctggacaacagtcttttgactgcacaaggacaacatctgtagttttgactgcacctttaacatccagaggacaacatctatagtgctgcagactagatgacaacacctttttgtagtgtgtagtgcaacccctatggttataaatatgtatccccaactcttagatgagtatgatatttgaatattgtgtgagaaataaacgaaaaatagtccaaactcgtagtgttttcctcttgatgagagtgagagttcttgttattcgagca

SEQ ID NO: 207741 - DNA, 1946 bp, Zea Mays
ggcagccagagaccgaacggtgtagaattccgctacgcatattcgccccctcttctctcgttttcttcttttgccccggaggcgcggacaggtaccagcaccaccagagcattccgtcccgcccccgcctccacctcgccgcgaccacacctcctctcctccccgccggctcctcctcctcgcatggcgacagcctctcgtccctagcccccccagatccagcggcacgcacctacacacgcgcaaggaaccgtagacgcgcccccgcgcctcccctctctcccgtcctccgccacccatggacgcggggaatggctgcagcgcgcgggcgctggcggcgtgcgtcgtcggcggcatcgtgctgggcgcgtcggtgctcgcgctccacctcgcgggcgggcccgccgccatcccgcccctgcccctgccgccgcccatcggcgcgcttctccgtcgccgccgccgccccgtgcgcgtctacatggacggctgcttcgacatgatgcactacggccactgcaacgcgctgcgccaggcgcgcgcgctcggggacgagctcgtcgtcggcgtcatcagcgacgacgagatcaaggccaacaagggaccccccgtcacgccgctccacgagagaatggtaatggtccgtgctgtgaaatgggtggatgatatcattccagatgcaccttatgccataactgaagaattcatgaacaagctattcaatgagtacaacatagactacattatccatggagacgatccttgtttgctacctgatggtactgatgcctatgctcttgccaaaaaggctggtcgatacaagcagattaagagaaccgagggagtgtcgacaacagacattgacggatgcttctttgtgttagagagagatcatctgatgcacataaccactcgtcactacaaaggcagttcagtagtggacatggtcagaaagttgatgatactggatctggaactggaacaagagtatctcattttcttcccacatctaggcgaatagttcaattctcaaatagcaagggtccaggtccagattctcggatagtttacatagatggtgcttttgatctgttccatgctggacatgtcgagatcttacgacttgctcgagaacttggagattttttgcttgtggggattcacacagatcagaccataagtgcaacacgaggacggcatcgcccaatcatgaatctccatgagcgaagtttgagtgttttggcttgtcgttatgttgatgaggtgatcattggtgctccatgggatgtttcaaaagacatgattaccacgttcaatatctctttagtcgttcatggaacaattgctgagaacatggacttcacagaggacgatttacacccatatgctgttccaatggctatgggcatctaccgccgactggagagccccctggatatcacaacaagtacaatcatcaggaggattgttgcgaaccatgaagcttaccagaagcggaatgagaagaaggaagccagcgagaagaagtactacgagggtaaaagctttgtgaacggggagtgaaggtcggagtagcagcagggactggcatggggattgctgcctcgttcaatttaggtctcccaggcttttagcagaggcaacagttggtcgatctacagttgtaccctttcttttttcttttttcatcttcttcagtaatctttgatgatcttgctgacatagcttaggaagcataggagcatttctcccccgtgtctgcagccaattttcctcactgtgttgtatatgcgccttccagctgttgtttccagctgctgagctgcatttgagatctataggcttttccacacacacacacagagacattttgaaattgtgcgctgcagtatgaagaagatcatgaatgttagcgtgattaactatttgctgctggtgtttgtctc

SEQ ID NO: 207742 - DNA, 3639 bp, Zea Mays
caccttcaccaaggctcctctttccctcgattttctctcccttctgccttggcatcgcaaccgcagcccgggatgcgctccaccccgaccgccaagcgcctgtcgccgcccgcgatgcgctcgaccccaacaaattctctcacaagatctggcgaaacccatcacctccgctctcctcctctaccctcgggatcctggtggccaacgtcgtcctcgttggcgagatgacctccaagctccaccagacctcgcgctccaccgacgactggaggcctctgccccttcgggatctccttattcacaaggcgtcgaggccgccgtcgaccacgtcatgccgctacgctaggaggaggcgtcgaccaacatcggcttcgcagtggcctaggcgtgccgtgctgatgtgctccgccgtttcgcccgcctccctccccaaagctgcttctaggccgtcgcgatggaggcaatcagcaacaccaggttaaccctcgagatcctggtggccgacagcgtggtcctcgtcggcgagatggtgacctccaagctcttccaaatctggcactccgctgacgtccagaggcctccgccctttgggatctccttaatcacaaggtgggacaagcaccacggcttctagctctacttgagcgacccagctggcaactacggcgggtggaaggtcgtccctattggggccaacagccagtgtgcacaagggggaacagagccgtgtggcttctggtgcccgttgaggaaaggtgaggcgaggtgctcaccatgcacctcaaggtggatgacctcacgtggccatatacgccctttgtttaagttcttgcagatcaactttatgcagagcttgtggaacctgagaagcacatgcagatattctctcgtaggaaaaatgaggtagtgagatgttacttggagaaatggtatctaaatttgtgttgctttctgttttgagttctgacctttcaacttgcagatgctaaacatactaaacaagtgtgagagaaatactacagacatttacgaatgtcacacattttttctaatactgattcatatcatattacaagtatactctacttatatttcctttatttttagcggtggagttcaattgtatctttttaacaaaatataaggagtttcagttcagattatgcacttttcatgttctatctatttgctttgtaaacagatttaccaaaaaaactcagaagataggcatgagagctataaatattcttggaataaaagtgaggagaggccatgaaggttctaggagtgaagggattaggatcgggaactgctgctgcatcaggcgcaacaaggcaatgaggaggatgtgtttcagggcaatgggtgttgtaggagcattgatataagtgacgccctcactgaagttggtctgacctgccttgaggtcctcctcaccaagtgaagcctcgcctcggtgaatcaggtcactcgcttaattctgctctgccgtactcatatcatcgaatcccttaattatagtctaccagttagctactttactgaaaatctgactctgcagtgaactaattagtacttgttttagtagtttattttgggttagttgataacagtatgaattgaaatagcacttgttccaacagttgattcagggccagttgaggacggtatgaaatgaattaggcacacagtgtggtttctgtgtgtaactcttgctcttcttttccttttcctcctcaagatggtagcaatgctaaaatagttgacttctggggctatgctttcaccttgagagtcttcagatgaatttagtggtgcaattattagatgcttcagggtcttggttttgcagttacaaccatgcttggatcatttttgttctttcaaaccaggaacagtgttacctatgatcccaaccagtacaggcttggatgttagaagtgtagtcagctcaaatcactctacacaaccacctgttttcttagctaaatgcgtgtgtggtacgagcataaggttcttatttggtttctcatttgtggtaacggtcaggaacaacaactggtctacgtgttgtacagttgtggtgtgtgcctataggcagagctaatgtagatcaagtgtcctactatagaaagttttttaggaaatattccccgcactccaaattataagacattttgacttttttagatgcattgtcttttctatgccacccctcttccataaggtaggcatatccatccatcctacatattgaattctattcattgcttggttgatcatctcactgtcaatgaaatttgaagtatctcactgttttgccccctaagttcatcctgatctttagaccctactctgaatctcgcattgcttctgcaccacctacgtcaaaattgctctaactctgttcattcacttcagtgtctttttaactgaagtaatttgtttgttaatttgatgaattaccctgccaacgaaatttgaatcacctcagtgtttaaccatcgaatttatcctaaacttcagactctcggaatctcacattgcttctatatttgccttaaaattgctctgacactgttgattcacttcggtgctattttaatataagtaatttgtttattaatttgatgaattttgatttaactgtaaactacatgatagtgattttatccacatctaacttattctctttagtgtgtttcaggaagaatgctttacaaatccgaatataagttcagtacgatagtgcaaacagagagcatcagcactaaagaagatagggagagttcaatgcatgatgtttgatttgttgacactggaagaggcgactaattgaggccgttgtcattgccaccggtgtgcacacattctttgtcaaggctgcatatcttgtcgattcaacaaaccaagttggtcattttcagaatgcaagctaagtgtgacgccgccacagaagaccatgcccactctgttcgtgctatcggtttggaaagaacatgtggaaagccaatctcggatcttgcttccttcaggtttccacattgtagacacacaagagtccagcctgcgacaaacgctcctgcaggagattggagcctagatccagtttgctttgttggaaaacttcaagcacctctagacggaaggagattggagcctagatccagtttgctttgttggaaaacttcaagcaccactagacggaagttgtctgcactgaagatcaggacacgaagatcgcgagctttaacaaggctcgccttgtgcggaaggtgtatttcagtgagatctccaagatgaagcattagggggtcaatcgccccagattttacgcgtagctaacttagtagggcacccataatccataatttattctctgtagttgtagcagcgacatagaggtgtcattctgtagcacattgtgtaacatgtaggagagagagaaacacatatccccattctttctactgaaacaccagaaatagttgctcttgctccataattcgttaatctgaacttctgaagccatgccaaggccttatattgatcctctgttgtcatattgataaaaatagggcatgtgaaacctttttgcataacagtataacacatattttatatataagttatcgtagt

SEQ ID NO: 207743 - DNA, 1298 bp, Zea Mays
ttgtacagttttggagtattttctagcatggagatcttccgacctcagaaggaacatggtttagcgcagtctggtttgaaaggaaaatttaagattacaacaagatgtctatggcttgataatggaagattgttggacgcactctacaaagcagctcatgctgcattgtcaagctgtcctgtgaattgtccacttagtcacatggagaggatggtagctgaaatcttgaggaaaatggtacggaagtatagtgggaagaggcctgacgtcattgcggttgctatggagaacaccacagcaagtttctcagaacacctcgatgctaaatcatctggaaattttggaccttcctcagctactagccatctgagcatgagtccagctatgagtcttgaaggcagttataaaacacacccagacaacccagaggtggaagctgaagaaacccttcctgaggccgcgagaacagcaccggatgatgcaaccacaagttccaatggtgaagcattcttctcttcagatttacatcagcctaaaacattggagcacttctgggagtcattcaaatctcctacagctgttaaaattgcacggattgtcaatggggggaagaagcaaaatcttggcaagattggcataatgggtaaggactcatcaatccagtcagctcccgctccagctaaatcttcaaaaaagaacaagtggaaacctgaggaaatcaagagcttaatacagatgcgtggcgagatgaatgagagatttcagagcgtgaaaggaagaatgatcctgtgggaggagatttccgacaacatgttgaagcaaggaataagtcgtactccggcacagtgcaaatcgctttggacatcgttagttcagaaatacgaggaaagcaaggacgcggagagcatgaagacgtggccgtatttcttggccatggataggatcctatcgcagcaaggggaaatggcaaccaaaggatagagaaggctgtagcttagtggtagacgtttattagaacatttgatatgttgtagcagagcccagtcagtgtagtgaggatataagatgaaatgtactgtgtacaggtactgaggtacagcacctggcaatttattgggaccggattcccttgttctgagtaaggtcgacggtcggtagctcgagatcgagatggcgatttactgtgcgtgtgcatcaatatacatgcttgcggaccacgcttagatcatcagtgtatctgacgtgtcatcgtcaagagtactacattcctagtctaacgtatcaatagttcaatactc

SEQ ID NO: 207744 - DNA, 2733 bp, Zea Mays
cgtaacttcactgcacaccctatcctccctcgccttcgcctagattcctatctccaccgcgttcgggttcctcccaacacctgcaccgcagaaccaaaccctagctgcgcttcctcctccagatcccggcgccccggccccatggccgccctcgtttctagctccagcttctccgcccgccgtccctccgctctctagctccggatcgcacgcgcacgtaaagacatggagcccgcagccgaggacgccgcagccgctgcgccggactcgtgggagacggccgacatagacgggcccatgagtcggctcatcctctccgcgcgacgcgtgtcctcttcgccggacttcgctgacgaccaggacccgccccagccgccgcccacactgcagccgcagggcgcgccttcggctccctcagatgcgcgcgaggatgtggtagcccaggtcgatcagttcctacgagaggccctcgagaagccaagggagaggctttctgtgctaagaatggagcaagaaattttgaagttcattcatgaccctagtcgtacagagtatgaattcaatggccttccaacttcgtatctgcgtcttgctgcacatcgcctggcgcagcattacttcctgcagtccattgccataccagacaacagtttgcctgatggaactggttcacgtatcatcctccgtaagacaacattcgactgccgactgcctgctgtccgccttgcagatattccagttaacctgccacaagaagacatctctgtggcgaaagtagctattaaacagaggcctcaaaagaatttacatggcatgaacagctcaagtgctcactcttctagagacaacctccaaaaaagcgtcgaagaaagaaaagaggaatacaacaaggcacgagcgcggatatttaacaacagcaatagcagtactgctactgatgagagatcagctgaggaagtgactttacccagtactcttcacaggtccacttccttggagttgaactcaagcaatagaataggtcaaggggctgaaattactcttgagaggagcttgactaccacttcagctagcagcaggtcaaatagaagcaagattgataaggagcctgcagtcaatagaaacaagcagaacaatagggttgcaattttcagagatcgtgagtcagagcgcaaggatcctgattatgacagaagctatgacaggtatatgcaaagatttgatcctggatttggatttagtggaggcccatacacaattcaacccctctatgcccctgctgttaactacaacaccgaattcccccagcttgggtcagcacaccgatcacctgttgctgtcgaacagcaacctcgtccaatagctcagcacatgcctgcatcatggtcagtggctcaagcatctaatgcaattggctatgggccagatggtgtcatgggaccttacagccctggtgcacctgtgagatcgtctgttttcatgcatgcttcacagcaatatgctataccttctcgccctggagtcccatttgcacatccacaggaatcaatgggaccatttgcacagactcaccaacaacaacctgatgctagtctacgctttgcccggccccggtgaggggcccgggcatgcctgcacctgccagtgtgcaacaaacacattatcctttgttactggcagatggtagcaggcataaaaaaaccgagaggcgtaaggcagagtcagccatctgtttgatgttgtcagcctgtatgcactctcggtgtagttgctccctgcatactgagatgcaggaggggcactgttctcctttaaacagaagcagctctaggtttattggacaaccccactaatccacaagaagatccacaagaagctgagagattgagatgctggaggagcacatcttgccctcgttgaatgggctctgttgttgaaggactgatagtgttggtaaaaaaaatgggattgcgcagtgagcgggtgattggcaaggggaaagattgggatggtccagtatgtgaacaggcgacagggatgtggccttaagccccgttgcccatgggatgcttgccgggttgagctgaggtggcatgatgacgatgctggttcttgctttgcctagtgcaatcgtggcaccattcttggtcaggtttagaagcagaggcatctctgtgcagctgctgttcacggagctggtgtttttaagttctttgtagtcagtgttgtgttgtaaatcaatcagtgttagtttgagtgaacaaacctatttcttgtaccatgtgcatgacaagcaacgactatagttgctaaagatgatgacgaatcgtgtatgcctcacaggcctatttactacagaagtgtttggtgttggaacaatctgatggagtgatgatcttggatttgtgcgtttatgcgatggatgtgttttacctcaaccgtaaggttaacttcaatggagcaaggtgaggataagcactgcagtgacatctatacggctatggccctgtttggcacagctgctgcttgttgaaaaagcaacttatctggctatgaccctgtttggcacagctgctgcttgttgaaaaaataacttatctgataagctggaaacagcttctgcttgttggctgcttttagtgtattatgagaagcagctgaactgataagctgctgcagaagctagctgtttgacagaatttctgcttaaatttgtgaagaagctgaaaataa

SEQ ID NO: 207745 - DNA, 2441 bp, Zea Mays
catcaacatgctggcgctgaggaagatggcgcgggaggagctcgttcgtggactgccatccatcgagcagggtgctcctcctggccaaatgggagcaagctatcctcgcatgtttctggtcctcctgctgcttcatggagccagtgctgctttgaatcctccaacagcagggccaaaatggcagactctgagcggtcgtccccctcaagtcgtagctcgaggaggattctctgcgaccgcataggcttctgtaagacagggctgacccttgataactcgacgactgtcgctgagatcttccccaagatggacaggacgtacaagctgcagggagaggatgtccatggctggttctccctagatttcaccgcggagcagctggttcagaacgtcactttgatccagaacatcttttctcgcccgagcacattcgatgcctcctttgggatgtacacgctcgatgatgtcgttgaactccacccccctcaaatatggctgaatgtagagtacaattcattctttatggagcacaagttaagcagcgaggactacatactagagctaccaaaagattttagcctcacgtacatctcctcgccggagattgggttcctgaaaagcttgagtgggaagctcaggaacgccaagacaaagctcatcttccggttcctcaacgaagacgtcgaggagccttcgaccaagaaaacgtacggggagctcctgaaagatctgaagtccatcaaggagtttgcagctggcgtccttgtgcccaagacgtacatctggccactgaaaaaggaccagtacttggcgccatccaccagcttggtcaaggatgctcatgccctcggcctggaagtgtacgcctccgggtttgccaacgatatcatcttgagctacaactacagctacgatcccactgccgagtacttgcagttcatcgacaatccagacttctctgtcgacggtgtgatcacggacttcccgcccaccgcatcaggagctgttgcttgcttggctcattccaagggcaatcctctaccacctcctggaaaggacaccaggccgttgatcatcacccacaacggcgcgagcggcatgttcgccggcagcaccgaccttgcctaccagcaggcgatcaaagatgccgccgacgtcatagactgcacggttcagatgtcaaaagacgggacggccttctgcatgcagtccgctgacatgtccagctccacgaccgcgtccaccgctttcgcgtccaaggcctccactgtccatgagatccagaacaagtccggcatcttctcgttcgacctgtcatggagtgagatcgcgaccttgaagcccgacctcatctccccgtttgctcaggcaggcatgaaaagaaatcctcaagcgaagaatgccggcaagctgatgactgtgccccaattcttggacttggccaaggccagcaacatcaccggtatactgatcgaaatagagcatgcttcgtacctggccaagagagggatcggcgtggtggaggcggtgtccagcgcgctgaccaaggcgggctacgacaaggagaccaagcagcaggtgttcatccagtccgacgactcgtcggtgctcgcggcgttcaagaagttcacgacgttcaggagggtgctcaacatcgaggccaagatcagcggcgcctccaagccgtcggtggatgacatcaagaagttcgcggacacggtgaggatcaaccggaactcggtggcgcaggtcaccgggtacttcatgacgcacttcaccgacacggtcagtagcctgcaggacgccaacctcaccgtcttcctcggcgtgctcaagaacgagttcatgaacctcggcttcgacttcttcgctgacccgacgatcgagatcgttacctactcgtgggcggtgctggccgacgggctcgtcacggactaccctgccaccgcggcttcgtacttcagaagtccatgcagtgacatgaacctgaacctgagctactcgatcctgcctgcacaacctggcgctctggtgaacctggcagcccccgggacgctggctccggcgggagcaccggcaccattgctccaaccctccgacgttgtggacccgccgctgcctccagttaaagctgtgatcaccgccgacgcgccagcgccagaggcggctgacaatacctcctcggcgtccagctccaacgcggggaatggcctcttgtgggctgccatcgttgccctcttgtccctgagctttctgcgctgatcccttcctcgatggcttccattgtactcccgcatgtccccctcccccctacatcctcgaatgtgctgtaacataatgttccttaaatagatataacctgtcattaacctgcacataaatacaggtcagaaaaagtttaccctgcaccaattcatgattggatagtggatactacagac

SEQ ID NO: 207746 - DNA, 2509 bp, Zea Mays
catcaacatgctggcgctgaggaagatggcgcgggaggagctcgttcgtggactgccatccatcgagcagggtgctcctcctggccaaatgggagcaagctatcctcgcatgtttctggtcctcctgctgcttcatggagccagtgctgctttgaatcctccaacagcagggccaaaatggcagactctgagcggtcgtccccctcaagtcgtagctcgaggaggattctctggtttgtttcctgactcgagccagatggcctaccagcttgccttgtctaccagcttgcctgacgtcgttctgttatgtgatctacaattctcaagcgaccgcataggcttctgtaagacagggctgacccttgataactcgacgactgtcgctgagatcttccccaagatggacaggacgtacaagctgcagggagaggatgtccatggctggttctccctagatttcaccgcggagcagctggttcagaacgtcactttgatccagaacatcttttctcgcccgagcacattcgatgcctcctttgggatgtacacgctcgatgatgtcgttgaactccacccccctcaaatatggctgaatgtagagtacaattcattctttatggagcacaagttaagcagcgaggactacatactagagctaccaaaagattttagcctcacgtacatctcctcgccggagattgggttcctgaaaagcttgagtgggaagctcaggaacgccaagacaaagctcatcttccggttcctcaacgaagacgtcgaggagccttcgaccaagaaaacgtacggggagctcctgaaagatctgaagtccatcaaggagtttgcagctggcgtccttgtgcccaagacgtacatctggccactgaaaaaggaccagtacttggcgccatccaccagcttggtcaaggatgctcatgccctcggcctggaagtgtacgcctccgggtttgccaacgatatcatcttgagctacaactacagctacgatcccactgccgagtacttgcagttcatcgacaatccagacttctctgtcgacggtgtgatcacggacttcccgcccaccgcatcaggagctgttgcttgcttggctcattccaagggcaatcctctaccacctcctggaaaggacaccaggccgttgatcatcacccacaacggcgcgagcggcatgttcgccggcagcaccgaccttgcctaccagcaggcgatcaaagatgccgccgacgtcatagactgcacggttcagatgtcaaaagacgggacggccttctgcatgcagtccgctgacatgtccagctccacgaccgcgtccaccgctttcgcgtccaaggcctccactgtccatgagatccagaacaagtccggcatcttctcgttcgacctgtcatggagtgagatcgcgaccttgaagcgcaggcatgaaaagaaatcctcaagcgaagaatgccggcaagctgatgactgtgccccaattcttggacttggccaaggccagcaacatcaccggtatactgatcgaaatagagcatgcttcgtacctggccaagagagggatcggcgtggtggaggcggtgtccagcgcgctgaccaaggcgggctacgacaaggagaccaagcagcaggtgttcatccagtccgacgactcgtcggtgctcgcggcgttcaagaagttcacgacgttcaggagggtgctcaacatcgaggccaagatcagcggcgcctccaagccgtcggtggatgacatcaagaagttcgcggacacggtgaggatcaaccggaactcggtggcgcaggtcaccgggtacttcatgacgcacttcaccgacacggtcagtagcctgcaggacgccaacctcaccgtcttcctcggcgtgctcaagaacgagttcatgaacctcggcttcgacttcttcgctgacccgacgatcgagatcgttacctactcgtgggcggtgctggccgacgggctcgtcacggactaccctgccaccgcggcttcgtacttcagaagtccatgcagtgacatgaacctgaacctgagctactcgatcctgcctgcacaacctggcgctctggtgaacctggcagcccccgggacgctggctccggcgggagcaccggcaccattgctccaaccctccgacgttgtggacccgccgctgcctccagttaaagctgtgatcaccgccgacgcgccagcgccagaggcggctgacaatacctcctcggcgtccagctccaacgcggggaatggcctcttgtgggctgccatcgttgccctcttgtccctgagctttctgcgctgatcccttcctcgatggcttccattgtactcccgcatgtccccctcccccctacatcctcgaatgtgctgtaacataatgttccttaaatagatataacctgtcattaacctgcacataaatacaggtcagaaaaagtttaccctgcaccaattcatgattggatagtggatactacagac

SEQ ID NO: 207747 - DNA, 2411 bp, Zea Mays
catcaacatgctggcgctgaggaagatggcgcgggaggagctcgttcgtggactgccatccatcgagcagggtgctcctcctggccaaatgggagcaagctatcctcgcatgtttctggtcctcctgctgcttcatggagccagtgctgctttgaatcctccaacagcagggccaaaatggcagactctgagcggtcgtccccctcaagtcgtagctcgaggaggattctctgcgaccgcataggcttctgtaagacagggctgacccttgataactcgacgactgtcgctgagatcttccccaagatggacaggacgtacaagctgcagggagaggatgtccatggctggttctccctagatttcaccgcggagcagctggttcagaacgtcactttgatccagaacatcttttctcgcccgagcacattcgatgcctcctttgggatgtacacgctcgatgatgtcgttgaactccacccccctcaaatatggctgaatgtagagtacaattcattctttatggagcacaagttaagcagcgaggactacatactagagctaccaaaagattttagcctcacgtacatctcctcgccggagattgggttcctgaaaagcttgagtgggaagctcaggaacgccaagacaaagctcatcttccggttcctcaacgaagacgtcgaggagccttcgaccaagaaaacgtacggggagctcctgaaagatctgaagtccatcaaggagtttgcagctggcgtccttgtgcccaagacgtacatctggccactgaaaaaggaccagtacttggcgccatccaccagcttggtcaaggatgctcatgccctcggcctggaagtgtacgcctccgggtttgccaacgatatcatcttgagctacaactacagctacgatcccactgccgagtacttgcagttcatcgacaatccagacttctctgtcgacggtgtgatcacggacttcccgcccaccgcatcaggagctgttgcttgcttggctcattccaagggcaatcctctaccacctcctggaaaggacaccaggccgttgatcatcacccacaacggcgcgagcggcatgttcgccggcagcaccgaccttgcctaccagcaggcgatcaaagatgccgccgacgtcatagactgcacggttcagatgtcaaaagacgggacggccttctgcatgcagtccgctgacatgtccagctccacgaccgcgtccaccgctttcgcgtccaaggcctccactgtccatgagatccagaacaagtccggcatcttctcgttcgacctgtcatggagtgagatcgcgaccttgaagcgcatgaaaagaaatcctcaagcgaagaatgccggcaagctgatgactgtgccccaattcttggacttggccaaggccagcaacatcaccggtatactgatcgaaatagagcatgcttcgtacctggccaagagagggatcggcgtggtggaggcggtgtccagcgcgctgaccaaggcgggctacgacaaggagaccaagcagcaggtgttcatccagtccgacgactcgtcggtgctcgcggcgttcaagaagttcacgacgttcaggagggtgctcaacatcgaggccaagatcagcggcgcctccaagccgtcggtggatgacatcaagaagttcgcggacacggtgaggatcaaccggaactcggtggcgcaggtcaccgggtacttcatgacgcacttcaccgacacggtcagtagcctgcaggacgccaacctcaccgtcttcctcggcgtgctcaagaacgagttcatgaacctcggcttcgacttcttcgctgacccgacgatcgagatcgttacctactcgtgggcggtgctggccgacgggctcgtcacggactaccctgccaccgcggcttcgtacttcagaagtccatgcagtgacatgaacctgaacctgagctactcgatcctgcctgcacaacctggcgctctggtgaacctggcagcccccgggacgctggctccggcgggagcaccggcaccattgctccaaccctccgacgttgtggacccgccgctgcctccagttaaagctgtgatcaccgccgacgcgccagcgccagaggcggctgacaatacctcctcggcgtccagctccaacgcggggaatggcctcttgtgggctgccatcgttgccctcttgtccctgagctttctgcgctgatcccttcctcgatggcttccattgtactcccgcatgtccccctcccccctacatcctcgaatgtgctgtaacataatgttccttaaatagatataacctgtcattaacctgcacataaatacaggtcagaaaaagtttaccctgcaccaattcatgattggatagtggatactacagac

SEQ ID NO: 207748 - DNA, 3882 bp, Zea Mays
catgctgggcaagacccatgctggcgacgagcgatggaggaggaactacgcgccatagaggacaaccacacctggacactcactgagttgccatctgggcagcgagccattgggctcaagtgggtattcaaagtcaagaaggatgaacacggtgctgtggtacggcacaaagcacggctcgtcgcaaaaggctacgctcagcgccaaggaatcgactacgacgaggtgtttgcaccggtcgctcgcttggaagcggtacggctgctgctggcgttggcggcgcaggagggatggcaagtccatcacatggacgtcaagacagcgttcttgaacggtgacctccaggaggaggtgtatgtgcagcaagcgcctgggtttgctcaacctggacaggaacacaaggtatatcgactgcacaaagctctttatggtttgcatcaagctccccgtgcatggaataaaaaactggatgaacaactgggtgttctgggatttgtgagatgtccatctgaggctgctatctactgccgtggaagagatgcggagagactggttgtaggtgtctatgttgacgatctggtgatcacaggcactagcagcagcagcatcaggaagttcaagacagaaatgactaagatttttaagatgagtgaccttgggttgctatcttattacctgggtattgaagtgaggcaggaagaagctgggatcaggttgtctcaaggaagctatgcaagaaaaattctggagaagtgtggtctagaggactgcaatccctgcaccgtgccgatgcagcctaagctgaagttgagtagggaaagtgatagttcaaaaatcaatgtgactgaatacagaagcttggtagggagcctgagataccttgtgaatactcgacctgacttggcatattcagttggatatgtgagtagatttatggaggagccccatatggatcatcttgcagctgtgaagcagatcctgaggtacatagcagggacaagagattggggcctgttctattcaaggagaaatggagggagtgatgagctcttgggctatagtgacagtgatatggctggcgacttggatggcagaaagagcacatctgggatccttttctttcttgggaggagtccaatcagctggcaatcaactaagcagaaggtggtggcgctatcaagttgtgaggcggagtacatcgctgctgctactgctgcatgtcaagctgtttggctggcacgactgcttgctgaaatcaggaactcagagacaagcagacctttgctaagggtggacaacaagtccactatctcgctgattaagaatccagtgcatcacgaccggtcaaagcatattgataccagatttcatttgattcgggagtatgaaaattcagggcaaatcaaggtgaagttcatcagtactgaagaacagctgggggatattctgaccaagccactcggcaaagtcaagttccaggaactctgcaccaagattggcctaagcctagtggtgctcctcctggccaaatgggagcaagctatcctcgcatgtttctggtcctcctgctgcttcatggagccagtgctgctttgaatcctccaacagcagggccaaaatggcagactctgagcggtcgtccccctcaagtcgtagctcgaggaggattctctgcgaccgcataggcttctgtaagacagggctgacccttgataactcgacgactgtcgctgagatcttccccaagatggacaggacgtacaagctgcagggagaggatgtccatggctggttctccctagatttcaccgcggagcagctggttcagaacgtcactttgatccagaacatcttttctcgcccgagcacattcgatgcctcctttgggatgtacacgctcgatgatgtcgttgaactccacccccctcaaatatggctgaatgtagagtacaattcattctttatggagcacaagttaagcagcgaggactacatactagagctaccaaaagattttagcctcacgtacatctcctcgccggagattgggttcctgaaaagcttgagtgggaagctcaggaacgccaagacaaagctcatcttccggttcctcaacgaagacgtcgaggagccttcgaccaagaaaacgtacggggagctcctgaaagatctgaagtccatcaaggagtttgcagctggcgtccttgtgcccaagacgtacatctggccactgaaaaaggaccagtacttggcgccatccaccagcttggtcaaggatgctcatgccctcggcctggaagtgtacgcctccgggtttgccaacgatatcatcttgagctacaactacagctacgatcccactgccgagtacttgcagttcatcgacaatccagacttctctgtcgacggtgtgatcacggacttcccgcccaccgcatcaggagctgttgcttgcttggctcattccaagggcaatcctctaccacctcctggaaaggacaccaggccgttgatcatcacccacaacggcgcgagcggcatgttcgccggcagcaccgaccttgcctaccagcaggcgatcaaagatgccgccgacgtcatagactgcacggttcagatgtcaaaagacgggacggccttctgcatgcagtccgctgacatgtccagctccacgaccgcgtccaccgctttcgcgtccaaggcctccactgtccatgagatccagaacaagtccggcatcttctcgttcgacctgtcatggagtgagatcgcgaccttgaagcccgacctcatctccccgtttgctcaggcaggcatgaaaagaaatcctcaagcgaagaatgccggcaagctgatgactgtgccccaattcttggacttggccaaggccagcaacatcaccggtatactgatcgaaatagagcatgcttcgtacctggccaagagagggatcggcgtggtggaggcggtgtccagcgcgctgaccaaggcgggctacgacaaggagaccaagcagcaggtgttcatccagtccgacgactcgtcggtgctcgcggcgttcaagaagttcacgacgttcaggagggtgctcaacatcgaggccaagatcagcggcgcctccaagccgtcggtggatgacatcaagaagttcgcggacacggtgaggatcaaccggaactcggtggcgcaggtcaccgggtacttcatgacgcacttcaccgacacggtcagtagcctgcaggacgccaacctcaccgtcttcctcggcgtgctcaagaacgagttcatgaacctcggcttcgacttcttcgctgacccgacgatcgagatcgttacctactcgtgggcggtgctggccgacgggctcgtcacggactaccctgccaccgcggcttcgtacttcagaagtccatgcagtgacatgaacctgaacctgagctactcgatcctgcctgcacaacctggcgctctggtgaacctggcagcccccgggacgctggctccggcgggagcaccggcaccattgctccaaccctccgacgttgtggacccgccgctgcctccagttaaagctgtgatcaccgccgacgcgccagcgccagaggcggctgacaatacctcctcggcgtccagctccaacgcggggaatggcctcttgtgggctgccatcgttgccctcttgtccctgagctttctgcgctgatcccttcctcgatggcttccattgtactcccgcatgtccccctcccccctacatcctcgaatgtgctgtaacataatgttccttaaatagatataacctgtcattaacctgcacataaatacaggtcagaaaaagtttaccctgcaccaattcatgattggatagtggatactacagac

SEQ ID NO: 207749 - DNA, 1522 bp, Zea Mays
gtcaaatagaaccctctttgacaggagcatatacttgttttaatcaaaaaattggtgcagaagagtataattatggttctagaatagaccacattctcatttccggttcctgtctccatcgctgtgattctgtggaggaccatagcattttttgttgccatgtagaagaatgtgagataatgaatcatttcaaaagagggaattctgaaaatttatcaaagtggaaagggggaagaagcagtaagctagaaggatctgatcatattccagtttatattttactgaaagaaatacctgaacttccggtccataatatcccaccatcagctgcaagatatcttccagagatccgtggaaggcaacaaagtatagtatcgttccttgataaagggaaaatttatgagctgcaaaatgctgcaaatttgattcaatctgaagatacagtacttgatagttactgtagtgatggcttggaaaatacaattctagctaagaaaggactggcaactggtataactgagtttgcaaaaggtggtaaccttcctagtttgatgtgcaaggggacagatctgaatcaatggataaatgaaggtttaatgggcatctctcatgtcagccagaaaaaatcactgtctagtaccaagtttgtgccacaaaagaaaattaaacgcaacttatcatcccaaccaacaatcaagtcattttttcaaagaccagggtcaaagacagtaaatgctagtaccagtaccttagttactccagcagaaacattagaccttacaaatcaagcatgtgtttcaaatggtgatacactgcctgaaaacatgcagtgcacaacttcagctgcaaaagttcaggataacacagatgcatcgtcatgttcactttcaacagacaagtctaatgctgcagcattggagtggcagaggatacagaaaaagatgaagatgacactaccacgttgcaaagggcatagtgaaccatgcattccgaggtctgtgaagaagggccctaatataggccgtttgttctatgtctgtgctcgtgctcagggacctgcatcaaatccagaagccaattgtggccactttcagtgggcacctggaaagtctaaagagaagagctctaaagagaaacgtctgtgacttcatttttctcccaggacattttgcttccaatgagtctggtacatcaccttgtcccagcatactgatgacgtggcgatgtatttgtggagaggtaagctgatcaagggcctgtttgggaggtctggctctgactggctccttgctctagtaaccggaggggccacaaaacgtgtcttcaccagctccccattgttttgaaaaggacagaaaacaacttcatgaacattgcagccacagtgccatggataagctacagtagcgcatcagctggaacagccaagagctgtcccaaacgtggcctgaacaagcacttctctcaggcagacaaaatttatgatcaaagcaaacgaatagtgacgactgttggggcgaag

SEQ ID NO: 207750 - DNA, 2850 bp, Zea Mays
cgggagccaccaccggttcgtgtcgggaccggaaaccacgatcagccttgcacagttcccggcttccagccgccgccgccgcggggagcaccggccgttggttcttcgtctccgccccgcttgcgagaagagcgacgcgtttccccttcgaaccctcgtgtatcgtgggtcatggtgacgcctcgtggtagcggcgggagatggtgaagatagtgacgtacaacgtgaatgggctgcggccgcgggtggcgcagcacggctcgctccgctgcctcctcgacgccctcgatgccgacatcatctgcttccaggagaccaaattgtcaaggcaggacctatctgcggatgtaattatggctgatggatatgaggcttttgtttcatgcaaccgctcttcaaaaggccgtggagcatactctgccaggaggttgctttgccagtagcagctgaagaaggctttactggacttcaggactatgcaaaaaatagtcaaactgttggggatttcagtattgcaatgcctgttgaggaggagggtcttggtgaactcacaagagaggacctcttaagggtggacaatgaggggcggtgcatcatcactgatcatggacattttgttcttttcaacatatacggcccagctgttgacggagatgataaagagcgtgttcgttttaagctactattttacaagatactgcagaaaagatgggaacgtctattggctcttggaaagagagtttttgttgttggtgatttgaatattgctcctgcttctatagacaggtgtgacgcggcacctggcttcgagaagcaaatgttccgggaatggctgagatccatgctgagagaacatggaggtcccttttttgatgcttttagatcaaaacaccctgaaaggacaggagcatatacttgttttaatcaaaaaattggtgcagaagagtataattatggttctagaatagaccacattctcatttccggttcctgtctccatcgctgtgattctgtggaggaccatagcattttttgttgccatgtagaagaatgtgagataatgaatcatttcaaaagagggaattctgaaaatttatcaaagtggaaagggggaagaagcagtaagctagaaggatctgatcatattccagtttatattttactgaaagaaatacctgaacttccggtccataatatcccaccatcagctgcaagatatcttccagagatccgtggaaggcaacaaagtatagtatcgttccttgataaagggaaaatttatgagctgcaaaatgctgcaaatttgattcaatctgaagatacagtacttgatagttactgtagtgatggcttggaaaatacaattctagctaagaaaggactggcaactggtataactgagtttgcaaaaggtggtaaccttcctagtttgatgtgcaaggggacagatctgaatcaatggataaatgaaggtttaatgggcatctctcatgtcagccagaaaaaatcactgtctagtaccaagtttgtgccacaaaagaaaattaaacgcaacttatcatcccaaccaacaatcaagtcattttttcaaagaccagggtcaaagacagtaaatgctagtaccagtaccttagttactccagcagaaacattagaccttacaaatcaagcatgtgtttcaaatggtgatacactgcctgaaaacatgcagtgcacaacttcagctgcaaaagttcaggataacacagatgcatcgtcatgttcactttcaacagacaagtctaatgctgcagcattggagtggcagaggatacagaaaaagatgaagatgacactaccacgttgcaaagggcatagtgaaccatgcattccgaggtctgtgaagaagggccctaatataggccgtttgttctatgtctgtgctcgtgctcagggacctgcatcaaatccagaagccaattgtggccactttcagtgggcacctggaaagtctaaagagaagagctctaaagagaaacgtctgtgacttcatttttctcccaggacattttgcttccaatgagtctggtacatcaccttgtcccagcatactgatgacgtggcgatgtatttgtggagaggtaagctgatcaagggcctgtttgggaggtctggctctgactggctccttgctctagtaaccggaggggccacaaaacgtgtcttcaccagctccccattgttttgaaaaggacagaaaacaacttcatgaacattgcagccacagtgccatggataagctacagtagcgcatcagctggaacagccaagagctgtcccaaacgtggcctgaacaagcacttctctcaggcaggtacatattctaatcctgtaattagttggttgacactaacatgcagccttccgttggttggctaacaactaagggcttgttcggttagctctcaatccatacgtacggattgagtaggattgggtgcgtttaaattccaagcaagtcaaacttctttttaattttttctaatctctcagggatcttctcagaagttatttatttttccgcctggtttagcgtattcaaattcttaatagacaagtcacaagtggccatcagtggagaaatcttacagtcctgtagtaatgttttatatgaaaactaatatggacattatagtattattgcccatatctccccagaaataaagtgccagtcgtgtaagtttttgtttctttcctttttcaaaacaacgagaaagagcatatattaggcaagaattaacatcgtctgcccgtagcttatgtcaaccactgttttgagtgaatttgtatggttgatgaagctatgtgtgc

SEQ ID NO: 207751 - DNA, 2811 bp, Zea Mays
cgggagccaccaccggttcgtgtcgggaccggaaaccacgatcagccttgcacagttcccggcttccagccgccgccgccgcggggagcaccggccgttggttcttcgtctccgccccgcttgcgagaagagcgacgcgtttccccttcgaaccctcgtgtatcgtgggtcatggtgacgcctcgtggtagcggcgggagatggtgaagatagtgacgtacaacgtgaatgggctgcggccgcgggtggcgcagcacggctcgctccgctgcctcctcgacgccctcgatgccgacatcatctgcttccaggagaccaaattgtcaaggcaggacctatctgcggatgtaattatggctgatggatatgaggcttttgtttcatgcaaccgctcttcaaaaggccgtggagcatactctggtgttgcaacattttgccgagtaacatcatcattttccagccaggaggttgctttgccagtagcagctgaagaaggctttactggacttcaggactatgcaaaaaatagtcaaactgttggggatttcagtattgcaatgcctgttgaggaggagggtcttggtgaactcacaagagaggacctcttaagggtggacaatgaggggcggtgcatcatcactgatcatggacattttgttcttttcaacatatacggcccagctgttgacggagatgataaagagcgtgttcgttttaagctactattttacaagatactgcagacaggtgtgacgcggcacctggcttcgagaagcaaatgttccgggaatggctgagatccatgctgagagaacatggaggtcccttttttgatgcttttagatcaaaacaccctgaaaggacaggagcatatacttgttttaatcaaaaaattggtgcagaagagtataattatggttctagaatagaccacattctcatttccggttcctgtctccatcgctgtgattctgtggaggaccatagcattttttgttgccatgtagaagaatgtgagataatgaatcatttcaaaagagggaattctgaaaatttatcaaagtggaaagggggaagaagcagtaagctagaaggatctgatcatattccagtttatattttactgaaagaaatacctgaacttccggtccataatatcccaccatcagctgcaagatatcttccagagatccgtggaaggcaacaaagtatagtatcgttccttgataaagggaaaatttatgagctgcaaaatgctgcaaatttgattcaatctgaagatacagtacttgatagttactgtagtgatggcttggaaaatacaattctagctaagaaaggactggcaactggtataactgagtttgcaaaaggtggtaaccttcctagtttgatgtgcaaggggacagatctgaatcaatggataaatgaaggtttaatgggcatctctcatgtcagccagaaaaaatcactgtctagtaccaagtttgtgccacaaaagaaaattaaacgcaacttatcatcccaaccaacaatcaagtcattttttcaaagaccagggtcaaagacagtaaatgctagtaccagtaccttagttactccagcagaaacattagaccttacaaatcaagcatgtgtttcaaatggtgatacactgcctgaaaacatgcagtgcacaacttcagctgcaaaagttcaggataacacagatgcatcgtcatgttcactttcaacagacaagtctaatgctgcagcattggagtggcagaggatacagaaaaagatgaagatgacactaccacgttgcaaagggcatagtgaaccatgcattccgaggtctgtgaagaagggccctaatataggccgtttgttctatgtctgtgctcgtgctcagggacctgcatcaaatccagaagccaattgtggccactttcagtgggcacctggaaagtctaaagagaagagctctaaagagaaacgtctgtgacttcatttttctcccaggacattttgcttccaatgagtctggtacatcaccttgtcccagcatactgatgacgtggcgatgtatttgtggagaggtaagctgatcaagggcctgtttgggaggtctggctctgactggctccttgctctagtaaccggaggggccacaaaacgtgtcttcaccagctccccattgttttgaaaaggacagaaaacaacttcatgaacattgcagccacagtgccatggataagctacagtagcgcatcagctggaacagccaagagctgtcccaaacgtggcctgaacaagcacttctctcaggcaggtacatattctaatcctgtaattagttggttgacactaacatgcagccttccgttggttggctaacaactaagggcttgttcggttagctctcaatccatacgtacggattgagtaggattgggtgcgtttaaattccaagcaagtcaaacttctttttaattttttctaatctctcagggatcttctcagaagttatttatttttccgcctggtttagcgtattcaaattcttaatagacaagtcacaagtggccatcagtggagaaatcttacagtcctgtagtaatgttttatatgaaaactaatatggacattatagtattattgcccatatctccccagaaataaagtgccagtcgtgtaagtttttgtttctttcctttttcaaaacaacgagaaagagcatatattaggcaagaattaacatcgtctgcccgtagcttatgtcaaccactgttttgagtgaatttgtatggttgatgaagctatgtgtgc

SEQ ID NO: 207752 - DNA, 2796 bp, Zea Mays
ggggtgtttggttcgggagccaccaccggttcgtgtcgggaccggaaaccacgatcagccttgcacagttcccggcttccagccgccgccgccgcggggagcaccggccgttggttcttcgtctccgccccgcttgcgagaagagcgacgcgtttccccttcgaaccctcgtgtatcgtgggtcatggtgacgcctcgtggtagcggcgggagatggtgaagatagtgacgtacaacgtgaatgggctgcggccgcgggtggcgcagcacggctcgctccgctgcctcctcgacgccctcgatgccgacatcatctgcttccaggagaccaaattgtcaaggcaggacctatctgcggatgtaattatggctgatggatatgaggcttttgtttcatgcaaccgctcttcaaaaggccgtggagcatactctggtgttgcaacattttgccgagtaacatcatcattttccagccaggaggttgctttgccagtagcagctgaagaaggctttactggacttcaggactatgcaaaaaatagtcaaactgttggggatttcagtattgcaatgcctgttgaggaggagggtcttggtgaactcacaagagaggacctcttaagggtggacaatgaggggcggtgcatcatcactgatcatggacattttgttcttttcaacatatacggcccagctgttgacggagatgataaagagcgtgttcgttttaagctactattttacaagatactgcagaaaagatgggaacgtctattggctcttggaaagagagtttttgttgttggtgatttgaatattgctcctgcttctatagacaggtgtgacgcggcacctggcttcgagaagcaaatgttccgggaatggctgagatccatgctgagagaacatggaggtcccttttttgatgcttttagatcaaaacaccctgaaaggacaggagcatatacttgttttaatcaaaaaattggtgcagaagagtataattatggttctagaatagaccacattctcatttccggttcctgtctccatcgctgtgattctgtggaggaccatagcattttttgttgccatgtagaagaatgtgagataatgaatcatttcaaaagagggaattctgaaaatttatcaaagtggaaagggggaagaagcagtaagctagaaggatctgatcatattccagtttatattttactgaaagaaatacctgaacttccggtccataatatcccaccatcagctgcaagatatcttccagagatccgtggaaggcaacaaagtatagtatcgttccttgataaagggaaaatttatgagctgcaaaatgctgcaaatttgattcaatctgaagatacagtacttgatagttactgtagtgatggcttggaaaatacaattctagctaagaaaggactggcaactggtataactgagtttgcaaaaggtggtaaccttcctagtttgatgtgcaaggggacagatctgaatcaatggataaatgaaggtttaatgggcatctctcatgtcagccagaaaaaatcactgtctagtaccaagtttgtgccacaaaagaaaattaaacgcaacttatcatcccaaccaacaatcaagtcattttttcaaagaccagggtcaaagacagtaaatgctagtaccagtaccttagttactccagcagaaacattagaccttacaaatcaagcatgtgtttcaaatggtgatacactgcctgaaaacatgcagtgcacaacttcagctgcaaaagttcaggataacacagatgcatcgtcatgttcactttcaacagacaagtctaatgctgcagcattggagtggcagaggatacagaaaaagatgaagatgacactaccacgttgcaaagggcatagtgaaccatgcattccgaggtctgtgaagaagggccctaatataggccgtttgttctatgtctgtgctcgtgctcagggacctgcatcaaatccagaagccaattgtggccactttcagtgggcacctggaaagtctaaagagaagagctctaaagagaaacgtctgtgacttcatttttctcccagggaatccaggacattttgcttccaatgagtctggtacatcaccttgtcccagcatactgatgacgtggcgatgtatttgtggagagaaaacaacttcatgaacattgcagccacagtgccatggataagctacagtagcgcatcagctggaacagccaagagctgtcccaaacgtggcctgaacaagcacttctctcaggcaggtacatattctaatcctgtaattagttggttgacactaacatgcagccttccgttggttggctaacaactaagggcttgttcggttagctctcaatccatacgtacggattgagtaggattgggtgcgtttaaattccaagcaagtcaaacttctttttaattttttctaatctctcagggatcttctcagaagttatttatttttccgcctggtttagcgtattcaaattcttaatagacaagtcacaagtggccatcagtggagaaatcttacagtcctgtagtaatgttttatatgaaaactaatatggacattatagtattattgcccatatctccccagaaataaagtgccagtcgtgtaagtttttgtttctttcctttttcaaaacaacgagaaagagcatatattaggcaagaattaacatcgtctgcccgtagcttatgtcaaccactgttttgagtgaatttgtatggttgatgaagctatgtgtgc

SEQ ID NO: 207753 - DNA, 846 bp, Zea Mays
atgctatttgttttcttgctctctgaaatgagtgttgggtttatcctaatagcagatgcggctgcttcttatctctaactaaaatattactatatgcattagctcaggaactataaaatcagagaatcctgtatctctaaacatggtaatcagtacaatgctcttctctatcctccaagtcctctggcagattgtattcttgatgtggcacatatattgcatctgcttcaacatcaagacatatgagtgggtaatttcaaatttcccatgctttagattcttttttcatcaattgcaggtcgtcttctcgttaggtgtttcttgtagctaaaaggtcagattttccagattaactggaagaaatatcctgagttccagatgaaggaacaacctcgatcagattctgaagtcaaatctatgaacccatatgacaaaggcatgctgtgtaacataagagattttctaaaaccagttttgagtacgaagacctgacctctgatggaactatagaaacatgggaaatctgaagtgcgttatactggagccaacatggaagcttgtttcccttgttgctgccgtagcatttattgagactcgtcgtgaggattctgctgtgtaatttaatgtgcaagtagcattcttttataagattacttccgaccgggaattctagtctcttaacttcagaactgatttggtgagtaggtaaatagaggggatctatggggtcccttactattcatatggagttcacatcgtgatcctgcatttttttcctgtctggtcttgccaaagggtaactcttgcaggtgaaaggaccacgatgctcaagagggggtgaattgg

SEQ ID NO: 207754 - DNA, 2020 bp, Zea Mays
cttgaacatactcttaattgcctcttatacttgaaaaatcgaactaacatcttagagttatacatgtcttcaatagatctcttatcttatcttctattttaaactacactaaataaatgtgtgtcaaatagagctgataccggcttaccgcttacctccgcgcactgcacacgttcgacgaaatgccgccgcgagccctcttcgtcgtcaactgagatttgcctcacatcatctccgattccttcccctacttccgtccccatcagtggacccagccgagatcgactggatctcctggctcgggcggctttgatggttcctggggtcggcccggggaggagttcgaggcgatgagcaggcttgcgtcggggctccagcgcccgcggaggtcgttgtcgccgtgcgaggtgctgtggtgcgcgctcgcgtcatgcggcctagtgcttttctcgcagctcgccgtggcgatggttccccgcctcttcccttccctctatctcctcgccatgctccccatcgcggggctggtgttactcgcggctatcgtgctcggccgcctgtggaggaggttcatcggagtgacggcgtcggcgccgctcttcgtgctcttcaacatcctcctatcgtggggcgtttacatcttcgtaatccgtagaagtactgtaaattggattcagccattaagagatgattttatgctccattcaatgagagttgcagacttcaaagcatatactaagggattatttcaactatgaatccctgtagtacttcaacattaggtcactccttgtcaccaaatttgtgctcaactacaaaacccgtatctgctcaagactgagctggcttcggttaagggaccaagtgtggacactgcatgctctagtcaatttgtgctcacttttagagtcctaattcttggtgaatcaaaatgcttcaagagatcaagcatggaagcattactcttggtttgtctgtgctcacctctagttcatcgtgaattgcagtgctattaaccagaaacttcttctctgctggacatgctaataaatgcagaatgtgcactgcttctgtggggattctacaggattttatcttgtgatcctggtatttttgcttgtgattcttcttatttggcagaggctggttgcaaggattttgtggaagctatatacacgagtgagagactcccaatgctctcaagagtcaggcagtgtacctggtgcaaagcaaacattaggggctatgaccatcattgccctgcatttggtacttgtataggacagaaaaatcatcgtctatttatggcccttttgacaggatttgttgttgctgaatcaacatatacgatgtgctcaacaaaatatattactatatgcattagctcaggaactataaaatcagagaatcctgtatctctaaacatggtaatcagtacaatgctcttctctatcctccaagtcctctggcaggtcgtcttctcgttaggtgtttcttgtagctaaaaggtcagattttccagattaactggaagaaatatcctgagttccagatgaaggaacaacctcgatcagattctgaagtcaaatctatgaacccatatgacaaaggcatgctgtgtaacataagagattttctaaaaccagttttgagtacgaagacctgacctctgatggaactatagaaacatgggaaatctgaagtgcgttatactggagccaacatggaagcttgtttcccttgttgctgccgtagcatttattgagactcgtcgtgaggattctgctgtgtaatttaatgtgcaagtagcattcttttataagattacttccgaccgggaattctagtctcttaacttcagaactgatttggtgagtaggtaaatagaggggatctatggggtcccttactattcatatggagttcacatcgtgatcctgcatttttttcctgtctggtcttgccaaagggtaactcttgcaggtgaaaggaccacgatgctcaagagggggtgaattgg

SEQ ID NO: 207755 - DNA, 2713 bp, Zea Mays
cgccgcctgcctctcccgccggccgtgggctgccgcatcccggcctggtgccctccggcggccgcatccaaacccccccaccccctcgcgtagataagcctagtaatcagtctcggcggcgcgggacgctgtggcgggggagaccagtgcgagactgcgctgtcttgtccattggggggatttggggctgtgcgcgaggcagttaataatgcccgtcctctccccaagtcagagtccgctgccatggccgtcgccgtcgccgtcgacgtcccctcctgcatccagctcctccgctcctgcagcgcggtcgccggccggcagctccaccagctcctcctcaaatccggccacgtcccctcctcgctcccgcccactaactccgtcctcctcatgtacgcgcgcggctctccgctccactcccgcgacgcccgccgcctgttcgacgaaatgcccacgaagaactgcttctcctataactccatcatcaccgccctcttcaagtccggagaccaccgtgcggctctccgcgtgtttcgctccatgcctgacaggaacaccttctcctacaacgcggtgataactggcctcactggtgctggggatctcgacaccgcgagtgagttgctagatgagatgcccgtgaaggacgccgtggcttgcaacgctgtgttgcatagtggttggcgcctgtgctgatcggacgcagtatgagattgggaggcaagctcacacccggttggtggttgccaacaccgggattgattcgatattgggctgcgcgttgattgacatgtattgcaagtgtggggatttggactccgctcaccaagttcttgacaggttagaacatgtcgatgagatttcgctgtccgcattggtctatggctacgcatcttgcggacagttgcacaaggcgttatgtcttttcgacaagatggagagccccagcattgctctatggacgtctcttatcagtggcatgctgaagcctggtcagcagacgcaagcttgtgctttaaagagtggggctgtcaatgacttgatagcagcaagtgctctcattgacttctactcgaaatgcggcctctgggcagatgcctgccaagctttcagtgagcttaggcatcatgacaccattgtgctcaactcaatgatcactgtatactcaaactgtggccaaatagatgaggctagaagagtttttcgtttgatccctagcaagagtgtcatctcatggaattctatgattgttgggttcagtcaaaacgggcatgctcttgatgcattggagctgttctgtgagatgcaccggcttggtttgcagcttgacaatgtagctatatccagtgtccttagtgcatcaggcagcatctgctctgtaagttccggggagcagatttttggtcttgctattgcgcttggtctgcagtctgaccatattgtagcctcctcgctcattgacctatactgcaaatgtggtaacttggccaatggacgcaggatcttcagtggtattgctaatccagacgaagtcctgtggaactcaatgcttataggttatgcttctaacgggtatggactcgaggcactgaaacttctagatttaatgcaaagtaggggtctgaagccaagcgaacggacatttgttggtgtcctttctgcatgctgtcattctgggcttgtggaagagggattgagatggttttaccggatgaaggaagattttggcgtgagtccatcagctgagcattatgcatgtgtgactgacctgttggtccgagcaggtcgactggatgaagcagttgagttcatagagaacatgcctttcaaagctgatgcaattagttggacttctattattggaggatgcaaagcccagggcaatgaggttctgttggacaaggttgcaaacaaattgatggaaacaggattgtcaacacattcaagtttgtatgtgcagctgtcaagcacactcgcagctcatggggattgggacaaatcagctgagattaggagtatgatgcatgacagaagaatctcaaagaatgctgggcgcagttgggttgacagggcatagaggaaatgaccagtgtcacctcccacaggcgtctcggtccattttctcttgggccttccctattggctttggtttcttcgatgtgttcttccgctagttaggaagtggtaacaaacaacgatcctgctaaaatatgtgcttttgatcatttgcttagttgaaccatatgaggtgatttcttggatgtggattcctgaagcatgcacaggttaatgctaatgattcagtccatgatatcttcgacatcaaaattgaccataatgaaaatgtgtcaaccaccaaaaagaaaatctttagctctaaagaagagaaaggaagggctctgaagttgaataatgaacacggtctagcccagcaatccctacagcggccaaatcattgcgtctctggggtgggcacaggatggagagtggagactctggggtgggcataggaaagagactccggcatcaagcaaacagttaattgatgagcagccgtactgatgcgcggtgagaaacgtgagcggcgcgccacatcggacaatggcagacatcaaatcaaggtccatctattgtgatcttgtcatgttcttgtatcttcgcaatggacaaaagggggttggacagtagtacctaggattatgtgcgcttgtct

SEQ ID NO: 207756 - DNA, 3025 bp, Zea Mays
cgccgcctgcctctcccgccggccgtgggctgccgcatcccggcctggtgccctccggcggccgcatccaaacccccccaccccctcgcgtagataagcctagtaatcagtctcggcggcgcgggacgctgtggcgggggagaccagtgcgagactgcgctgtcttgtccattggggggatttggggctgtgcgcgaggcagttaataatgcccgtcctctccccaagtcagagtccgctgccatggccgtcgccgtcgccgtcgacgtcccctcctgcatccagctcctccgctcctgcagcgcggtcgccggccggcagctccaccagctcctcctcaaatccggccacgtcccctcctcgctcccgcccactaactccgtcctcctcatgtacgcgcgcggctctccgctccactcccgcgacgcccgccgcctgttcgacgaaatgcccacgaagaactgcttctcctataactccatcatcaccgccctcttcaagtccggagaccaccgtgcggctctccgcgtgtttcgctccatgcctgacaggaacaccttctcctacaacgcggtgataactggcctcactggtgctggggatctcgacaccgcgagtgagttgctagatgagatgcccgtgaaggacgccgtggcttgcaacgctgtgttgcatagtggttggcgcctgtgctgatcggacgcagtatgagattgggaggcaagctcacacccggttggtggttgccaacaccgggattgattcgatattgggctgcgcgttgattgacatgtattgcaagtgtggggatttggactccgctcaccaagttcttgacaggttagaacatgtcgatgagatttcgctgtccgcattggtctatggctacgcatcttgcggacagttgcacaaggcgttatgtcttttcgacaagatggagagccccagcattgctctatggacgtctcttatcagtggttgtaaccctgcctatcatggagatggtgcttttgttctttttgtaaggatgttgcggtcagaaatgttgcctaattctactatttatgccattgttctgaacatgtgtggctttttaggcatgctgaagcctggtcagcagacgcaagcttgtgctttaaagagtggggctgtcaatgacttgatagcagcaagtgctctcattgacttctactcgaaatgcggcctctgggcagatgcctgccaagctttcagtgagcttaggcatcatgacaccattgtgctcaactcaatgatcactgtatactcaaactgtggccaaatagatgaggctagaagagtttttcgtttgatccctagcaagagtgtcatctcatggaattctatgattgttgggttcagtcaaaacgggcatgctcttgatgcattggagctgttctgtgagatgcaccggcttggtttgcagcttgacaatgtagctatatccagtgtccttagtgcatcaggcagcatctgctctgtaagttccggggagcagatttttggtcttgctattgcgcttggtctgcagtctgaccatattgtagcctcctcgctcattgacctatactgcaaatgtggtaacttggccaatggacgcaggatcttcagtggtattgctaatccagacgaagtcctgtggaactcaatgcttataggttatgcttctaacgggtatggactcgaggcactgaaacttctagatttaatgcaaagtaggggtctgaagccaagcgaacggacatttgttggtgtcctttctgcatgctgtcattctgggcttgtggaagagggattgagatggttttaccggatgaaggaagattttggcgtgagtccatcagctgagcattatgcatgtgtgactgacctgttggtccgagcaggtcgactggatgaagcagttgagttcatagagaacatgcctttcaaagctgatgcaattagttggacttctattattggaggatgcaaagcccagggcaatgaggttctgttggacaaggttgcaaacaaattgatggaaacaggattgtcaacacattcaagtttgtatgtgcagctgtcaagcacactcgcagctcatggggattgggacaaatcagctgagattaggagtatgatgcatgacagaagaatctcaaagaatgctgggcgcagttgggttgacagggcatagaggaaatgaccagtgtcacctcccacaggcgtctcggtccattttctcttgggccttccctattggctttggtttcttcgatgtgttcttccgctagttaggaagtggtaacaaacaacgatcctgctaaaatatgtgcttttgatcatttgcttagttgaaccatatgaggtgatttcttggatgtggattcctgaagcatgcacaggttaatgctaatgattcagtccatgatatcttcgacatcaaaattgaccataatgaaaatgtgtcaaccaccaaaaagaaaatctttagctctaaagaagagaaaggaagggctctgaagttgaataatgaacacggtctagcccaggatggagagtggagactctggggtgggcataggaaagagactccggcatcaagcaaacagttaattgatgagcagccgtactgatgcgcggtgagaaacgtgagcggcgcgccacatcggacaatggcagacatcaaatcaaggcacatacaacacatgctagacctttagttctaagggctagtgtgaaactccatttttttaatggatttccattttccaagtgaaaataaactaatttttcttggaaattgaaaatcctcggaagaatgaggtttctaaactagccctaagaattagatataaaagcagatacttattaagatattaattttttagtttttttattgcaaatctacttgttatttgtttctgctgcaggtccatctattgtgatcttgtcatgttcttgtatcttcgcaatggacaaaagggggttggacagtagtacctaggattatgtgcgcttgtct

SEQ ID NO: 207757 - DNA, 2710 bp, Zea Mays
cgccgcctgcctctcccgccggccgtgggctgccgcatcccggcctggtgccctccggcggccgcatccaaacccccccaccccctcgcgtagataagcctagtaatcagtctcggcggcgcgggacgctgtggcgggggagaccagtgcgagactgcgctgtcttgtccattggggggatttggggctgtgcgcgaggcagttaataatgcccgtcctctccccaagtcagagtccgctgccatggccgtcgccgtcgccgtcgacgtcccctcctgcatccagctcctccgctcctgcagcgcggtcgccggccggcagctccaccagctcctcctcaaatccggccacgtcccctcctcgctcccgcccactaactccgtcctcctcatgtacgcgcgcggctctccgctccactcccgcgacgcccgccgcctgttcgacgaaatgcccacgaagaactgcttctcctataactccatcatcaccgccctcttcaagtccggagaccaccgtgcggctctccgcgtgtttcgctccatgcctgacaggaacaccttctcctacaacgcggtgataactggcctcactggtgctggggatctcgacaccgcgagtgagttgctagatgagatgcccgtgaaggacgccgtggcttgcaacgctgtgttgcatagtggttggcgcctgtgctgatcggacgcagtatgagattgggaggcaagctcacacccggttggtggttgccaacaccgggattgattcgatattgggctgcgcgttgattgacatgtattgcaagtgtggggatttggactccgctcaccaagttcttgacaggttagaacatgtcgatgagatttcgctgtccgcattggtctatggctacgcatcttgcggacagttgcacaaggcgttatgtcttttcgacaagatggagagccccagcattgctctatggacgtctcttatcagtggttgtaaccctgcctatcatggagatggtgcttttgttctttttgtaaggatgttgcggtcagaaatgttgcctaattctactatttatgccattgttctgaacatgtgtggctttttaggcatgctgaagcctggtcagcagacgcaagcttgtgctttaaagagtggggctgtcaatgacttgatagcagcaagtgctctcattgacttctactcgaaatgcggcctctgggcagatgcctgccaagctttcagtgagcttaggcatcatgacaccattgtgctcaactcaatgatcactgtatactcaaactgtggccaaatagatgaggctagaagagtttttcgtttgatccctagcaagagtgtcatctcatggaattctatgattgttgggttcagtcaaaacgggcatgctcttgatgcattggagctgttctgtgagatgcaccggcttggtttgcagcttgacaatgtagctatatccagtgtccttagtgcatcaggcagcatctgctctgtaagttccggggagcagatttttggtcttgctattgcgcttggtctgcagtctgaccatattgtagcctcctcgctcattgacctatactgcaaatgtggtaacttggccaatggacgcaggatcttcagtggtattgctaatccagacgaagtcctgtggaactcaatgcttataggttatgcttctaacgggtatggactcgaggcactgaaacttctagatttaatgcaaagtaggggtctgaagccaagcgaacggacatttgttggtgtcctttctgcatgctgtcattctgggcttgtggaagagggattgagatggttttaccggatgaaggaagattttggcgtgagtccatcagctgagcattatgcatgtgtgactgacctgttggtccgagcaggtcgactggatgaagcagttgagttcatagagaacatgcctttcaaagctgatgcaattagttggacttctattattggaggatgcaaagcccagggcaatgaggttctgttggacaaggttgcaaacaaattgatggaaacaggattgtcaacacattcaagtttgtatgtgcagctgtcaagcacactcgcagctcatggggattgggacaaatcagctgagattaggagtatgatgcatgacagaagaatctcaaagaatgctgggcgcagttgggttgacagggcatagaggaaatgaccagtgtcacctcccacaggcgtctcggtccattttctcttgggccttccctattggctttggtttcttcgatgtgttcttccgctagttaggaagtggtaacaaacaacgatcctgctaaaatatgtgcttttgatcatttgcttagttgaaccatatgaggtgatttcttggatgtggattcctgaagcatgcacaggttaatgctaatgattcagtccatgatatcttcgacatcaaaattgaccataatgaaaatgtgtcaaccaccaaaaagaggttagtttggtatggttgcattatcccacgccttgaagattatggaaccagaagatcaggaatactgtcgcttcagtaatcatcttcagcaatgatcatcaatactgattacttatgatattgagtgattttcagttttctattcagtgatctgggtggctctagctctgcaccctagctgtaaagtagcatagttgagaattactgttgaagcatatttattga

SEQ ID NO: 207758 - DNA, 2586 bp, Zea Mays
acaaacccccgagtggaacacacaaaagcgccccaccaccgcggaccattcctttcctttgtatctctatctatccctcctcggctcctcgccctttcccctcttgcccgagtcgctagcctccctgcccctgcccctgccccgcctcctcccgtggaccacttcctccaccttcgcttccatagcaggctagcagctgagcgaggtcaactcttccgccggcggagagagagggagggagcggggaagagacgggagggtctccgcgcacctgccatcagccaccacccgatacccagatctaaatcaaagcttccgctccggttgttgtcggttggtcggtacctgggcggcggcggcggcggcacgggaggacagcgaacatgtcgtcgagcacgatccggaaggccctgggcgcggtgaaggaccagaccagcatcagcctcgccaaggtcactagcaacatcgcgcccgatctggacgtgctcatcgtcaaggccaccagccacgacgacgagccggccgaggagcgccacatccgcgagatcctccaccttacgtccggatcccgcgcccacgttgctgctgccgtggcagggtgctcccgcaggctctcccgcacccgcgactatgtggtcgcgctcaagtcgctcatgctcgtgcaccgcctccttgtcgatggcgacccgtccttccaccgcgagctcctacatggcacacggcggggcacccgcctgctgaacctctctgattttcgggacgaggcgcactctggatcgtgggatcactctgcctttgtgcgcacctatgcgctctaccttgaccagcgcctcgagttcttcctccatgagcgcaagcaggggttaaatgctggcagcagcagcagtgctaatggcccatcaccacgggaccgtgatcgctggggttcgcctgatccctatggccgccgctctccctcctactcgtcaccccctgggtatggaggatatgatgattaccgcgagaggaatggtgggaacaatgatgacaagaggccaccgaccccggtgagggatatgaagcctgagcgtgtccttgctcgtatgcaccacctacagcagctgcttgacaggttccttgcttgccgccccactggtggtgcaaagcaaagcaggatggtgctggttgcgctgtatcagattgtgagagagagcttccagctctactctgatatctgcgaggtgctggcggtgctgctggacaggttctttgacatggagtatgcggaatgcgtgaaggcttttgaggcatatgctagtgctgcaaagcagattgatgagctctctgcattctattcatggtgtaaagatactggagttgcaaggtcatctgagtacccagaggtgcagcgtgtcactgataagttgctggagacgctagaagagttcatgagggaccgggcaaagaggcctaagagcccaccacgggagcctgaacctgagcctgttaaggaagaacctgagccggatatgaacagcatcaaagcgcttccagcaccagaagattataaggagcctgaacctgtgaaggtggaggaagaggtgaagccggagccacccccacagccacagggtgacttggtggatctcagagaagatactgttagtgcagatgagcaaggtaataggcttgctctagcactcttccagggaccgcccgctgctggtggaaacaatggttcatgggaggctttcccttcaaatggtggcaacgaggtgacttcggcatggcagaatcctgcagctgaacctgggaaggctgattgggagcttgccctcgtagagacagcaagcaacttgtccatgcagaagccagcaatgtcaggtggtatggacccgctgctgctgaatggtatgtatgaccagggtgttgtgcgtcagcacgttagtgcacaggtgaccaccgggagtgccagcagcgtcgccctgcctgctcctggacagaagactcagatgcttgctctgcccgcaccggatggttcaatgcagactgttggtggtgacccctttgcagcgtcccttgccgtcccaccaccatcctatgtgcagatggcagatttggagaagaagcaacagctcttgtcgcaggagcagattatgtggcaacagtaccagagggacggcatgcaagggcaatcgagcctgaacaagctcgaccaggcttaccacaatggtttcgcgcccaacccgggcatgccctatgggatgcccgcggcgtacaacactgggtattactaccctacttactgaggaagcctattctttattcatccttacagttgctgtgaatttttgttctgtgttgtgatcttactcccagccctggggttgtgtccagcatcagctgttgttcccctgtctctggatcaaaccttttggtctgatatatgtaatgtaattttatttgtttggaaccaaatgcggcatccgagagtagctatagtatattacataatctcaattgatctgtacactgtttctgctaatcttctgcatgttatcacttcacttcacttgatgttgcagtgcgtttgttgcgtgtcacaca

SEQ ID NO: 207759 - DNA, 629 bp, Zea Mays
atgcccatgttgctgacagtggtctggctgaggactaggccgagaggcgagagatgaggattgtgtcctggaatacaggcggcacatattcaaagcaagcaagcaagatttcagggagcaaatatttcttggccagatctgtccagaatcttgagcggcaaccttatgatattggcaagaacgctgtgcagtacaaatcagagagacgagcagcaatggaagcggaaggtttcaagatacttgggaactcaggggatcagtggagtgatttgataggatcgcccatggcaacgagatccttcaagctaccaaacccaatgtacttcatcagctgattttattgttagagcagtggacgaaggagcaggttttcatagggtgttcatatggtcccggtgtgaaactgcttttgttagacatccctcgggacataaatttagatttttatcttcaagcatgttgaaattcaactgaggcttgggtccgtcgaatctgccctatgatgatctgtaattacacacttcttttcccacactactggaagcatttgtggtaaggcaaattgtgaggtcatttggtgttcgttccttcagtcaccatctaagctttagtcgttaaattttagtttt

SEQ ID NO: 207760 - DNA, 536 bp, Zea Mays
ggcaattggtcaggggcggagctaaggagtgttttggataggcctccgactatcctagaatttggcaaccttatgatattggcaagaacgctgtgcagtacaaatcagagagacgagcagcaatggaagcggaaggtttcaagatacttgggaactcaggggatcagtggagtgatttgataggatcgcccatggcaacgagatccttcaagctaccaaacccaatgtacttcatcagctgattttattgttagagcagtggacgaaggagcaggttttcatagggtgttcatatggtcccggtgtgaaactgcttttgttagacatccctcgggacataaatttagatttttatcttcaagcatgttgaaattcaactgaggcttgggtccgtcgaatctgccctatgatgatctgtaattacacacttcttttcccacactactggaagcatttgtggtaaggcaaattgtgaggtcatttggtgttcgttccttcagtcaccatctaagctttagtcgttaaattttagtttt

SEQ ID NO: 207761 - DNA, 687 bp, Zea Mays
gtaagatcacaggaattcaatgagacctcatttgatgaatgggtagatgctgcaaaggcaccaacattaccatcgagcttgaatttgtacaatcaacttcagggacttggtttccatgttatcctattgactggccggagtgaattccaacgtaatgccacagaattgaatcttttgtttgctggctacaactcatgggaaaaactcatactgaggcaaccttatgatattggcaagaacgctgtgcagtacaaatcagagagacgagcagcaatggaagcggaaggtttcaagatacttgggaactcaggggatcagtggagtgatttgataggatcgcccatggcaacgagatccttcaagctaccaaacccaatgtacttcatcagctgattttattgttagagcagtggacgaaggagcaggttttcatagggtgttcatatggtcccggtgtgaaactgcttttgttagacatccctcgggacataaatttagatttttatcttcaagcatgttgaaattcaactgaggcttgggtccgtcgaatctgccctatgatgatctgtaattacacacttcttttcccacactactggaagcatttgtggtaaggcaaattgtgaggtcatttggtgttcgttccttcagtcaccatctaagctttagtcgttaaattttagtttt

SEQ ID NO: 207762 - DNA, 1145 bp, Zea Mays
cctcgggctccacaacccacaaaatgcacgggaggacccagggcgccgccgtcggcgacatgacccagcgccttctcctcgccctctcgctcatcgcatcagcgaccgccgtgcccgctgtcatccgcacggtcccggacgaccccaccgcgggctcctctggcgcggcagacgccgcggacgcgctcttctgtgacagctggaggctgtcggtggagacggccaacgcgggcccctggagcgccgtgccctcgcgctgtggggctttcgtgcgggactacatggagggacctcgctacgcgtctgactccgccgtcgccgacgccgacgccctagccttcgcctccgaagccctggccgccgccgagtggggcggctcggcgagcgcgaggcctgcgtgggtgttcgacgtcgacgagacgctgctctctaacgcgccgtactacgcggtcaacggatggggatcacaggaattcaatgagacctcatttgatgaatgggtagatgctgcaaaggcaccaacattaccatcgagcttgaatttgtacaatcaacttcagggacttggtttccatgttatcctattgactggccggagtgaattccaacgtaatgccacagaattgaatcttttgtttgctggctacaactcatgggaaaaactcatactgaggcaaccttatgatattggcaagaacgctgtgcagtacaaatcagagagacgagcagcaatggaagcggaaggtttcaagatacttgggaactcaggggatcagtggagtgatttgataggatcgcccatggcaacgagatccttcaagctaccaaacccaatgtacttcatcagctgattttattgttagagcagtggacgaaggagcaggttttcatagggtgttcatatggtcccggtgtgaaactgcttttgttagacatccctcgggacataaatttagatttttatcttcaagcatgttgaaattcaactgaggcttgggtccgtcgaatctgccctatgatgatctgtaattacacacttcttttcccacactactggaagcatttgtggtaaggcaaattgtgaggtcatttggtgttcgttccttcagtcaccatctaagctttagtcgttaaattttagtttt

SEQ ID NO: 207763 - DNA, 2785 bp, Zea Mays
acacatgtgtgtgcagtgtagacgagcgcgtacgtaacttattgggaggttgcgcgtacggcaactcccgtcgcctccgcgctcccctaaccgcctcccccttgtctcatggtggaagtggaacaaccctccgcccgcgccgctgcgaagtgagaagggaaaacaagaaacgatcgagggaggggacgacggagcgagctagctagcggcgcggcgggcgtcgctcggcatggacgcggaggcgggagcggctgcggaggagcttcgcgtcggggaggacgcggccggcggcgtggcgggaggcgcagctgcgcggccttctgcgcatggccaccgagagggaggacgacatctgcgccgccctgcacgcggacctcgcgaaaccccttaccgagtgctacgtacacgagatatcgttggtcatttcttcgtgcaaatttgctctcaagaatctcaagaaatggatgaagccccgaaaggtattgtggtatcctctgttatattttcgtacgtggccagcattgtatccatggaactttaaccaacaacagacctccgatcggccacattaacaaatacgaatactctcaatacgattagaacagtcaatattggtttaaaatgaatctttaaatagggaatgtttgtaattgagaactctatatatgttgctttgatggatggaccctagttaatcacttagtatgtcacaactcacaaatgctatacactccattttgttttaaaatggttatcattctcacttcgtaatacatctctctctttgcatcatatttttttttgtttctcccaaattctgtgtttaaaactaaaacattaactattttgggatgaagtgcgtaagattcgagaagtagcgtttaatttggtggtcattagtttctattggaagttggaacatactttctccgatcttttttatttatcgtaaatgaactagcggacgacgaatattcgaaaatagaggtaatacacatttattatacgcgcacgttgacaacaaacaattcatcataattaataaatgcaagtgcacttagcttcaagacggatctgtacaaggacactcatcatcacagtaccaagctggccctggtcctggtcctggtcctggtcctagactcctagttcctagtcttgcagccatgaatgaattcgatcaagcatcctgttctagcatagcctcgtcatcagctagcttttcatgccaaaaatcatcctagctcccccgaactgactcgcgtgcgctgctggcggaatcaatgcgcattgactgctgcttctggccggttttttgtttttgttttcgtttctgtttttgttttcctttgcaggtccccggcgggctgctgaccttcccgtcggcggccagcgtcgcggcggagcctctcggcgtcgtgctcgtcatctccgcctggaactaccccttcttgctggccatcgacccggtcgtgggggcattcgcggcgggcaacgccgtggcgctgaagccgtcggaggtggcgccggccacgtcgctgctgctggccgacctgctgccgcgctacgtggacccctcgtgcgtcagggtcgtgcagggcggcatcgcggagaccaccgcgctgctggagctccagtgggacaagatcttctacacaggtaacagcagagtaggacgcatcgtcatgtcctacgctgccaagcacctgacgcccgtggtcttggagctcggtggcaaatgccctgtcgtcgtcgactccgacgtcaacctccacgtcgctgccaagaggatcgccgccggcaagtggggctgcaacagcggccaagcctgcgtctcgccggactacgtcgtcactaccaaatcgttcgcgccaaagctgctggagtccctgaagcgagtgctgttcgagttctacggggaggagccgctgcggtcgccggacctgtcgcgcgtcgtcaactccaaccacttcaacaggctcatggcgctcatggacgactactcggtctccggcaatgtcgcgttcggcggccagatcgacgagcggcggctaaggatcgccccgacgctgctgctggacgtcccgctcgactccgcgatgatgaaggaggagatcttcgggccgctgcttcccataatcacggtggacaagatcggcgagagcttcgctgtgatcaactccatgcccaagccgctggcagcttacctcttcagcaacgacgggcagctcaagcagcagttcgagaggaccgtctcggcgggagggatcatgttcaacgacaccggcatccacctgacaaacccgaacctgccgttcggaggagtcggggagagcggcatgggcgcctaccacggcgccttcagcttcgacgccttctcccacaggaaggccgtcctggaccgcagcttcctcggcgaggccagggccaggtacccgccgtacacgccggcgaagctcgccatcctcaggggcgtgctcaatggcagcccgcttgccacggttcaggcggctgcggggtgtacaggaggggcatcagctgactgactgactgaccccccttcatgcttattattaataataagcataaatattcaccgcatacacattgctgtgcttttattaaggttgttgtgagggcgaaaaatgtattgaccctttgcgtgtgcgcgtgcgtgtatagcaactattaataaaagaaaaaagtgatgttcatttcgtacagagtatactaaattaagatcacatcacgagttttaagcaaccgggctcatagcatttcaaaa

SEQ ID NO: 207764 - DNA, 4827 bp, Zea Mays
cttccttgtccttcgcctcttgtccgactcagatctccccgacctgccaccacccgcgagccctgcacaacatcactgctaccttctctgtcgatccctcgatctccagacaaccccgctcgcctctctccctgctccggtccccgcccgcctctcgctcgcgacaactccgccgcagcacgcggcggccgcggcgagatgctccgcctgcgggcgttccggccgacgagcgacaaagtcgtgaagatccagctccaccctactcacccctggctcgtcaccgccgacgccaacgaccgcgtctccgtctgggactgggagcaccgccaggtgatctatgagctgaaggcaggtggcgttgatgagcgtcgcttggttggagcgaagcttgagaaacttgctgagggagatgattcaaaaggaaagcccaccgaggctattcgagggggaagtgtaaagcaggtttccttttatgatgatgatgttcgcttttggcaacattggcgtaattgctctgctgctgctgaggccccaactgcagtcagtcagcagtcttccacgttcattgcacctgcaccttcgacacgaggaaggcactttgttgtcatttgttgtgagaacaaagtcatatttttggacttggtgactatgcggggccgtgatgttcctaaacaggagcttgacaataggtcacttctttgtatggaattcctctctaggacatcttctagcgatgctcctcttgttgcctttgggtcatctgatggtgtcatcagggtcctttcgatgttgacatggaagcttgtgcgtaggtatacgggtggacataaaggagcaatagcttgcttaatgacgtacatgtctgcagctggtgaggtacatttagtttctggtggcagcgatggcctgctgatattatggagtgctgatcatatccatgactcacgtgagcttgtgcctaaaattagtatgaagggcccatgatggaggtgttgttgcagttgaactttctagggtgatggggagtgctccgcagctcattacaataggggctgataaaactttagccatatgggatactgttactttcaaggaaataagacgcattaaaccagtgcctaaacttgcttgtcatagtgttgcatcgtggtgtcatccccgtgcaccaaaccttgatattctaacttgtgtcaaggactcacatatttgggccatagagcacccaacttattctgctttaacaagaccgctctgcgagctgtcatcactagttcccccacaggtccttgcactgcataagaaactgagggtttactgcatggtggcacaccccttgcagccgcatcttgttgctactggaactaatattggtatcatattaagcgagtttgacccaagagcacttccagctattgctcctttaccaacaccaacaggcaacaaggaacattctgctgtttacatagttgaaagagaacttaagttactgaatttccaattgtcaaacacagcgaatccatcccttgggaatgctggtgttgcatctgatgcaggaaggtcaatgaacaattcaatagaacagttgatagtaaagcagaccaagaagcatatcagcactcctgctccccacgattcctattcggtcctttcagttagcagttctggaaagtatgttgcaattgtatggccagatatcccttcttttgctgtatacaaagcaaatgattggtcagttgttgattcaggcacagggaagctttttgcctgggacacttgtcgagacagatatgctctggtagagagtgcattggccccaagaatgccacttgttgttaaaggtggttcttctaaaaaggcaaaagaagcagcagcagctgcagctcaagcagcagctgcagcagctagtgctgcttctgctgccacagtgcaagtgcgtatcttattagatgatggaacagcacatgttttgcagagatcgattgatggtcgtaatgaaccagttattggattgcatggtggtgctttacttggtgtcacataccgtacatctcgtagaatcagtcctttgacagcaacagctatatcaactgttcaatcgatgcccttatcaggttttggtggaagtggatcatcttttgcatctgatgatccattttcctctaaggaagggcctccacaaaatttccaactgtacagctgggagacctatcagcctgttagtggcctacttgcacaacctgagtggactgtgtgggaccaaactgttgagtattgtgcatttgcttatcagcagtatatagtgatttcttccttgcggccccaatttaggtaccttggagatgtttcaattccctttgcaactggtgccgtttggcatcgaaggcagttatttgtgtctacaccaacaacaattgagtgtgtctttgttgatgctggagtggcagcgattgacattgaaacaaaaaggataaaacaagaaatgaaagcaagagaagctcagagtcgggcagctgaagagcatggagatttggctcttatcactgttgaagctccccaggttactgtgagtgaaaaagtatcattgaggccaccaatgttgcaggttgttcgtttagcctcctttcagtacgctccatcgataccaccatttatagtaccaaagcaatccaagttcgatggagatgattcagtgtttcagaaagaactggatgacagaaggtatgctgaagttgctgtcgctggaggaggtgtgtctgttgcagtaactcgcttccctcctgaacagaagagacctatcggacctcttgttgtggttggtgtaagagatggagttctctggcttgttgacaggtatatgtgtgcacatgccttatcactcagccatcctggtataagatgccgttgccttgcagcatatggggaccctgttagtgctgtgaaatgggcaacgagacttggcagagagcatcacgatgacctggctcagtttatgctgggtatgggctatgccactgaagctctccatttgcctggaatatctaagaggctggagttcgaccttgcaatgcagagcaatgacctgaaaagagcacttgcttgtctattaacaatgagcaatagccgagatgtgggacaagaaacagctgctgctgatgccactgacgttacccagattcttagtttggcagtagctaagcaagctaagcaggaaagtcttacagatgccgtgcagggaatagtgaaattcgtcaaggagttttttgaccttattgatgcagcagatgccactggtcaatctgacattgctcgtgaagttttaaagagattagcggctgcagcttctgtaaagggagcactccatggacaaatgctgcgaggcctggcactccgtcttggaaatcatggggagcttactagattgtcgggtctggtaagcaatttgattacagctggccatggacgcgaagcagcatttgctgccgcagttctgggagataatgccctaatggagaaagcatggcaggacacaggaatgttagctgaggctgttttacatgctcaggcccatggtcgtccatcattaaggaacttggttataacatggaacaagatgctacaaaaggaactggatcacacaccgactgtaaaaaccgatgccgccgccgcattcttggcttctctcgaggatccaaagctcacaagcttgggggaaactgagaaaaagcctcccatcgaaatacttcctcctgggatgcctcccctatctgcacctccgatcgtgattaaaaaggctggagcaaaacctggtctccctaatgcagcaaaggcgtcaaatgggcctataggtgctcctatggctcaaggtgctcccatggctcatggtactcctgggccacaaggagtccccatgaatcaagttactccatcacagggcagtcatgacgaggcaaggccatcagatgctacagtggctgatgcagctgccgcggttgcagaaggtacagcagctcccccggctgcagaaggtacatcagctcctccggctgcagaaggtacagcaactcccagcagtgaggaagctaaagcagcacctggtaatgaggaaggcacatcaaatccaatcaacgaggaagccacagcagctgcagtttcagttgctgcaggcagccctgactctgctgctgctcctgcagctgatactagctcggacgcacctgctgttaatcccacggaagataccgtctctgccccctcaacggaggcaccaccagagttgacggataagccatcttcagcagaggcatcgttgccacctccacccagtgtttctggtgtataaatatttctgattctcttttagcagtgtgccgaattttctgtattctggttcgttcgttccaccacgcgcgctggtataggtatttgttgcctgtggtatacagatttcgcagacgccaggcagtatgtgagtagctttgtacatctgctgtctgcgtctcacgagaacgtgctaccgttgtgtcactgacactgtgtggccatatcttatgttgttggtgaccacagttcaattcttgcttgatgagttgatcgagctgcaccaccaatatccctgtcttggacgaccgattcgtctcttgcggaatctaacgtaactgctgaggttcgcaaaatgtcttgttgggtcatctaacttgggaatctgtgcgtaccgaaagcgctatgtcggcccgtgctgcagtgcaagtaccacgttttggccagtcgcccgttggtttgccctctatccattaagtaatctgattggtcgaggcgtgtcaaaagcca

SEQ ID NO: 207765 - DNA, 720 bp, Zea Mays
tccttcgcctcttgtccgactcagatctccccgacctgccaccacccgcgagccctgcacaacatcactgctaccttctctgtcgatccctcgatctccagacaaccccgctcgcctctctccctgctccggtccccgcccgcctctcgctcgcgacaactccgccgcagcacgcggcggccgcggcgagatgctccgcctgcgggcgttccggccgacgagcgacaaagtcgtgaagatccagctccaccctactcacccctggctcgtcaccgccgacgccaacgaccgcgtctccgtctgggactgggagcaccgccaggtgatctatgagctgaaggcaggtggcgttgatgagcgtcgcttggttggagcgaagcttgagaaacttgctgagggagatgattcaaaaggaaagcccaccgaggctattcgagggggaagtgtaaagcaggtttccttttatgatgatgatgttcgcttttggcaacattggcgtaattgctctgctgctgctgaggccccaactgcagtcagtcagcagtcttccacgttcattgcacctgcaccttcgacacgaggaaggcactttgttgtcatttgttgtgagaacaaagtcatatttttggacttggtgactatgcggggccgtgatgttcctaaacaggagcttgacaataggtcacttctttgggaatgttggttcctcttgctcaggaa

SEQ ID NO: 207766 - DNA, 4220 bp, Zea Mays
ccccatggaccgaagtatggaattcctctctaggacatcttctagcgatgctcctcttgttgcctttgggtcatctgatggtgtcatcagggtcctttcgatgttgacatggaaggttaaatataccctaccctacacccttttcttcattactggtgtgctgcaagtttaaactgagtcatttgatccttgcagcttgtgcgtaggtatacgggtggacataaaggagcaatagcttgcttaatgacgtacatgtctgcagctggtgaggtacatttagtttctggtggcagcgatggcctgctgatattatggagtgctgatcatatccatgactcacgtgagcttgtgcctaaaattagtatgaaggcccatgatggaggtgttgttgcagttgaactttctagggtgatggggagtgctccgcagctcattacaataggggctgataaaactttagccatatgggatactgttactttcaaggaaataagacgcattaaaccagtgcctaaacttgcttgtcatagtgttgcatcgtggtgtcatccccgtgcaccaaaccttgatattctaacttgtgtcaaggactcacatatttgggccatagagcacccaacttattctgctttaacaagaccgctctgcgagctgtcatcactagttcccccacaggtccttgcactgcataagaaactgagggtttactgcatggtggcacaccccttgcagccgcatcttgttgctactggaactaatattggtatcatattaagcgagtttgacccaagagcacttccagctattgctcctttaccaacaccaacaggcaacaaggaacattctgctgtttacatagttgaaagagaacttaagttactgaatttccaattgtcaaacacagcgaatccatcccttgggaatgctggtgttgcatctgatgcaggaaggtcaatgaacaattcaatagaacagttgatagtaaagcagaccaagaagcatatcagcactcctgctccccacgattcctattcggtcctttcagttagcagttctggaaagtatgttgcaattgtatggccagatatcccttcttttgctgtatacaaagcaaatgattggtcagttgttgattcaggcacagggaagctttttgcctgggacacttgtcgagacagatatgctctggtagagagtgcattggccccaagaatgccacttgttgttaaaggtggttcttctaaaaaggcaaaagaagcagcagcagctgcagctcaagcagcagctgcagcagctagtgctgcttctgctgccacagtgcaagtgcgtatcttattagatgatggaacagcacatgttttgcagagatcgattgatggtcgtaatgaaccagttattggattgcatggtggtgctttacttggtgtcacataccgtacatctcgtagaatcagtcctttgacagcaacagctatatcaactgttcaatcgatgcccttatcaggttttggtggaagtggatcatcttttgcatctgatgatccattttcctctaaggaagggcctccacaaaatttccaactgtacagctgggagacctatcagcctgttagtggcctacttgcacaacctgagtggactgtgtgggaccaaactgttgagtattgtgcatttgcttatcagcagtatatagtgatttcttccttgcggccccaatttaggtaccttggagatgtttcaattccctttgcaactggtgccgtttggcatcgaaggcagttatttgtgtctacaccaacaacaattgagtgtgtctttgttgatgctggagtggcagcgattgacattgaaacaaaaaggataaaacaagaaatgaaagcaagagaagctcagagtcgggcagctgaagagcatggagatttggctcttatcactgttgaagctccccaggttactgtgagtgaaaaagtatcattgaggccaccaatgttgcaggttgttcgtttagcctcctttcagtacgctccatcgataccaccatttatagtaccaaagcaatccaagttcgatggagatgattcagtgtttcagaaagaactggatgacagaaggtatgctgaagttgctgtcgctggaggaggtgtgtctgttgcagtaactcgcttccctcctgaacagaagagacctatcggacctcttgttgtggttggtgtaagagatggagttctctggcttgttgacaggtatatgtgtgcacatgccttatcactcagccatcctggtataagatgccgttgccttgcagcatatggggaccctgttagtgctgtgaaatgggcaacgagacttggcagagagcatcacgatgacctggctcagtttatgctgggtatgggctatgccactgaagctctccatttgcctggaatatctaagaggctggagttcgaccttgcaatgcagagcaatgacctgaaaagagcacttgcttgtctattaacaatgagcaatagccgagatgtgggacaagaaacagctgctgctgatgccactgacgttacccagattcttagtttggcagtagctaagcaagctaagcaggaaagtcttacagatgccgtgcagggaatagtgaaattcgtcaaggagttttttgaccttattgatgcagcagatgccactggtcaatctgacattgctcgtgaagttttaaagagattagcggctgcagcttctgtaaagggagcactccatggacaaatgctgcgaggcctggcactccgtcttggaaatcatggggagcttactagattgtcgggtctggtaagcaatttgattacagctggccatggacgcgaagcagcatttgctgccgcagttctgggagataatgccctaatggagaaagcatggcaggacacaggaatgttagctgaggctgttttacatgctcaggcccatggtcgtccatcattaaggaacttggttataacatggaacaagatgctacaaaaggaactggatcacacaccgactgtaaaaaccgatgccgccgccgcattcttggcttctctcgaggatccaaagctcacaagcttgggggaaactgagaaaaagcctcccatcgaaatacttcctcctgggatgcctcccctatctgcacctccgatcgtgattaaaaaggctggagcaaaacctggtctccctaatgcagcaaaggcgtcaaatgggcctataggtgctcctatggctcaaggtgctcccatggctcatggtactcctgggccacaaggagtccccatgaatcaagttactccatcacagggcagtcatgacgaggcaaggccatcagatgctacagtggctgatgcagctgccgcggttgcagaaggtacagcagctcccccggctgcagaaggtacatcagctcctccggctgcagaaggtacagcaactcccagcagtgaggaagctaaagcagcacctggtaatgaggaaggcacatcaaatccaatcaacgaggaagccacagcagctgcagtttcagttgctgcaggcagccctgactctgctgctgctcctgcagctgatactagctcggacgcacctgctgttaatcccacggaagataccgtctctgccccctcaacggaggcaccaccagagttgacggataagccatcttcagcagaggcatcgttgccacctccacccagtgtttctggtgtataaatatttctgattctcttttagcagtgtgccgaattttctgtattctggttcgttcgttccaccacgcgcgctggtataggtatttgttgcctgtggtatacagatttcgcagacgccaggcagtatgtgagtagctttgtacatctgctgtctgcgtctcacgagaacgtgctaccgttgtgtcactgacactgtgtggccatatcttatgttgttggtgaccacagttcaattcttgcttgatgagttgatcgagctgcaccaccaatatccctgtcttggacgaccgattcgtctcttgcggaatctaacgtaactgctgaggttcgcaaaatgtcttgttgggtcatctaacttgggaatctgtgcgtaccgaaagcgctatgtcggcccgtgctgcagtgcaagtaccacgttttggccagtcgcccgttggtttgccctctatccattaagtaatctgattggtcgaggcgtgtcaaaagcca

SEQ ID NO: 207767 - DNA, 2456 bp, Zea Mays
gaaactttgccttccccgcgtccggctactactgtcggggcgtcgacccatattcactcctctgccctctcagatcccgaactaccaaacccccttctcgccggcggaggaaggcgggggcggagaaaagagatcacgatcgctaatccgtgacggcagcggtcgggatggcggcggcgctagctccgggggtgtcccggaagttgaagaaggtgctggagacgcgtacggataacccggatctgctggcctcgctgggcgcgctctccactttctacgtccagaacaccccgcaggcgcgccgcaatctcaaatcctccattgagcagcgtgcacttgccatcaatcgccacttcctcgacgcctcgctccccgcccacaaggcgctggatcgcgtcgagggggaggtgcacgcgctgaacgactcctggaagaagatcgaggaagcattgaacagttgtagtgcaagtactggggacatcatcagtacaacagagaggttgcaacaggaacttgaagttatcactcagaggcaagaaattgtgtcatgcttcctgcgggattaccaactttcaaatgaagagataaatgcacttcgggaagaggagatagatgacaaattcttcaaagcattgctgcatgttcaagaaatacactcaaactgcaaggtcctgctgcgaacacaccaccagcgtgctggtttggagcttatggatatgatgtctgtgtaccaagaaggggcttacgaaagattatgcaggtgggttcaagctgaatgtaagaaattaggtgatactgacaatcctgaagtaagtgagcttttgaaaatggctgtttgctgcctgaaggaaagacctgttctgttcaagtattgtgcagaggaggttgccaacatgaggcaccatgccttattcaggcggtttataagtgctcttactagaggtggacctggagggttcccaagaccaatagaagtgcatgcccatgatcctcttcgctatgtaggcgaaatgctgggttggctacatcaggccctggcatctgaaagagagcttatagttgtcttgcttgatcctgatgcaatgactgacagtggtccaacttttcgacgtcagtctggtagagatggtgattcttccaaaggagaacctgatgtaacttctgtgcttgatagaatatttgaaggagcatgtcggccatttaaagttcgagttgagcaagttttgcagtcacagccaagcctgatagtttctttcaaacttagcaataccttggaattctattgttacacgatatcagaactgctgggtgaagacactgcgctgtgcaatacaatatggtcacttagagatgcagctcagcagacattcttcaatatcctgaagagtcgtggagagaagttattgcgatatcctccactagttgcagttgatctctctcctccaccagctgtaagagaaggaatttctttgctgcttgagctcatagatacctacaatagcatgatggttcctgcctctggaaaaagaccaaactttgaccctgttatttctgcattattggatccaataattcaggtgtgtgagcaagctgcagaggcacagaagtcaaaaggatcacttgcgcggcgtggtagaacaagctctgatcctagtggaaatagcagggattctatatcagttgatgctattctgtctaagaatttatctacgtcgattctgagtgccgaatcttcatccaaagtctacctcatcaactgcttgtcagctattcaggagccattgatgggccaggaggtcgctacaagctatatgccgtacataaaggagtatggtagcaaggctgatgcaaggcctctggcagatattatcgagacgtcgccacaaatgcttatggaatgcttgaaggcattctatggtattgtgactggaacagaaggttccttgcctgaatttgagcaactgcaggttccaaggttacgttcagatgcctgcaatggtttggcaagagctctagcagaatcttatgagctcatttacagcgcagtcatggatccgaataacagttatcctgacccaaggtctttggttaagcactctcctgaacagataagaactatactggaagcctgaggtcttcgcacgatgccttatggtacatgttaagtagaggtctttcgtgcatgaaactttgtcatgtaaatttccgactacaagctgtgggttcaattgattacagaaatatggaagcggtgactctctgaactcatgtatcggtatctagtgtctcgttgtcctatattccttttttctttatgtatcaagttattgtatacttcatgatgtaatttgaggtacaacttaagtgcttaaccgactattatgataccaaagctactatgcaagcatggtgaaggcttgtcggggagaaggtcgaatgggaccttgataatccgc

SEQ ID NO: 207768 - DNA, 832 bp, Zea Mays
cacaggtcacccggggcagtacgagttccttgtctctccttgacggcctccttgctcagcacgatctcggctccgtctctctctagtctctaccaacggtagcaccatctcgctcccactcccaaccactccgccaccaccgctctcctgcgcctgcgtccgcgcctcctccctgcggccccggccgcaccggcgacatggccatccccgttgaggaggccatcgccgccctctccaccttctcgctcgaggatgagcaaccggatgtgcaggggttagctgtgctcctgtctagtgaaagatatgcgactaacagtcctattgagtacagcgatgttgctgcttatcgtctatcactaggagaagatacaaaagcaatcaaccagctgaatacactgatcaaagaaggaaaagaaatgacatctttgctgtacacataccgtagctgtgtaaaagctctacctcagctgcctgattcaatgaagcataatcaagcagacttgtatcttgaaacctatcaagttcttgacatggaaatgagccatttacgtgaaattcagagatggcaagcttctgctgcttctaagttagcggctgacatgcagagattctctaggccagagagactggttaatggacccacaatcactcatttttggtctatgcttaagttgcttgacgtcctactgcagcttgatcatctcaagaatgcaaaagcaagcataccaaatgatttttcatggtacaagagaacgttcactcaagtaagcacccagtggcaggatactgacaccatgagagaagagctggatgatcttcagcaggagttgag

SEQ ID NO: 207769 - DNA, 1673 bp, Zea Mays
tgcatgttcacattatcagaccaagtaggaagttcacactgtgatgcatgttcgcacaatctgatcaaccgctagaacacaatcgaacatgttcaagctctccgttgtggatagtaatttcagtttttcaggttcattaagaaatttcagaaatagcatcagggctgttacattggtaacagttttacagctacagttcagataggcacatatctgaacgaaaaccaggtagctaacagagagtcacatatctgaataaaatcgcaagtgattaagcatagacaaatattttgcgtagtcacatatcggagcagcaacgtatgtagagtttgttcttcagcccgttttcatatctatcattggcaacaactcttgcaatcatatgtccaaaacatccatttgtatctcggacatgaagttctccagaacattattttcatgatatttgaatctgctccatcatctgtgacgcgagccatggactctggtccggtgcccacgcgcccaacaggaggttccgcagcggtggcttcgtcgtcttcatcactcatctttctgggcaccggctgctccggcgcgctccccgacgcgcgatgcctcatccagccgtcggagcctccgtgcaccgtctgctccacggccctctccctgccgccggaccggaaccccaactacaggtgcaacacctccctcctggtagattactgccacgacgatggagctcacaggtatatcctgatcgatgtcggcaagaccttcagagagcaagtcctccggtggttcgtgcaccacgaagtcccgtccattgactcggttattctcacgcacgagcacgcagatgctgtcttaggcctcgatgatctctgggtggcactaccgagctgtcagagaaacggtagtgccaaagttccggtttttctcacccaattcacaatggacagtgtggccgcaagattccccaacttggttgaacagaagctgcagggaggtgatgacttcgccagacctgctcagctccattggacgataatcgagggtgatgttgacaagccatttgtagcatcggagcttcagttttggccgttgcccgtcatgcatggagaggactatgtctgtttaggcttcttgttcgggaggaaagcgagagttgcatacttgtctgatgtctcaagaattctacctagaactgagcacgcgatttcgaagtctggtaccgccaccggacaagggcagctagatctactcatactagaaacaaacaggttgcatggggcgggagacggtcgcagttgccatttgactctgagccagagccttgacgctgtcaagaggatacgccctaaacgagctctgctgattgggatgaaccacgagtttgaacatcacagagaaaaccagctgttagcaagatggtcatgcagggaaagaataccagtgcagctagctcatgacggcctgcgtgtcttcattgatctgtgataacgcagtgttttagcaacactttgatgccaacttagctgttcggtactagtgggaagtccaccggtgcatattaattactcagtgatcactttgacaatttgctagagtccattgaaatcaaggctgtatttgtctttatctgcggccgcaaggattgtgtaacattcagacagttgggttcagggttcttg

SEQ ID NO: 207770 - DNA, 612 bp, Zea Mays
gaccttgaaagggaaaaggctgccagggcagaaattgagaaaacatcttcccgtgaagcgcctaaagctccacttcccgatcaaacaagaaatgcccctctcagaaagctgtctagttctggcagtataaatagtctagaagaaagccattttcttcaagcatcgttggatttatctgacaatgcttcattagagaggcgaatgtcttcagaaagtaatatgtcgtattatctgaagaccatgactccaagtgcttttgaatcagcacttcgtcaaaaagatggagagctggcttcttacatgtcacgcttggcctcattggaatctattcggaattcactagcagaggagttggtaaaactgacagaacaatgtgaaaagttacggactgaagccactgctgtgcctggcttaagggctgaattggaagctctgaaacaaaggcactttcaagctctagaactcatgggggaacgtgatgaagagctccagtcattgggtgctcgtgtatagcgctgcctgcgctggtatgaatttgtcataccatctaattctcgtccagtgcatcgcggccaggccaagataccagctctgcagaagaacaaagcgaag

SEQ ID NO: 207771 - DNA, 2566 bp, Zea Mays
ccatttcaaataggagttatttataaaaatacgaggcaggaccaatagagattttacatgatccgtcgcgttacaacggtcaccgtctgtaaaaccgcaagaatccaggggctggattgcaaccggcgacgcaactgacctccctccagagtccagaccgaccgacgccgaccggcgacggcgaccgcccgcgatttgtttactcgtctcgctcacctccgcctccgcgaggagctcctttttctctatccaaccataccctcaccaactccccctgtctcggtttgcgtggagagagaaagggagggagcgagaagtcaagccggagccgggaacagctcaacaccacgggccgcggtttctgaaaaggagaggcgtggtgggaaggggagggggagcgggaggggggcgagccagccagagagccgtacgcgaagcaagcagccccctgcatctagatcaggcgttctgctcgcaccgccgccgccgccgccgccgccgccgcttccttctctcaccgacgctaattggagatcacgtctgggcctggctgctcgtcttccgtcctgggtacaattcgattgatgacctcatcagggaagaatgttttgcagtcttacatgagttaaagggatagaaagtgcaacaaccgtggaataaaggactcgtgcttttgagtaattcaggaggagtacatgcatcacgaagccttgattctggaatggtgtccagtcgaaggaacagtgggattatcctacgggaagggtcggttagggactggtccgagttcaacaatccctcgccgtccccaaaactgctgtactcacagtcctatgtcgcaatgagggggttgctggcctcagtgatctccttggactttttcctgctgtcgagcaagctaaaatctgtgtgcgcggctatgacttcccagaggcatggccgatcacaggagaggtcaaaatcaaaggggttgacctgcaggagagttgcagtccatctgctgttctttttcatggttggcattttcattgggttcatgcctttgttctctgtcgatgtttacaagaaaatagtatccgaaaacgagaggcttccgttccatgatggtgtgattgaggcggaaatgatgggcaccaaagttaaggagttggagacagttgtagtagagaaagaggtcgaactgattgacgagcctcaggttcaagagagccctccagttcctgcaatgttggatgatgaggcagattttgctgaatcttcacctgcattacctgctattgaagaatctgacattcctgtgaagaagctgctgataatcgtgacgatcacttctgttcggccacaacaggcatattacttgaatcggctagcccatgttttgaaagctgtacaggcacctcttttatggttggtggtggaatggcctgaacagtcctatgaaacagcagaaattctgaggtcttctggggttatgtacaggcatcttatatgtagaaagaataccacgagtgtacgaaagattgctgtatgtcaaaggaataatgcaatctatcatgtcaaaaggcatcaccttgatggtataatgcattttgctgatgaagagcggtcatactcagctgatgtatttgaagaaatgcagaagatcaggcgctttggctcatggcctgtagcaatccatgttggaacgaagtatagggcagttttggaaggccctatttgcaaaggaaaccgagtcatgggatggcacacagtccagacggttcagaagaagagttcgactcgtcgattcccaattggcttctctgcatttgctttcaacagcacaatgttgtgggaccctcaaagatggaaccgcccacctatggattctgttatggtccactcaggtggaagaggtggtttgcaggaatcacgatttatagaaaagctcgttaagaacgagcgccaggtagagggtcttccggacaattgcagtcgggttatggtctggaatttcaacctggaacctcctcgagtcaactaccccacaggctgggcactatataagaacctagaaccggacatgcctgtgacatagtttcctgccgctgccactgtgcctgcttctagaggtggtccagaactccacataggctgctcgtccatgccatcctgagcgagttgcgccaaagattacatggatactgcacgctgagatcttactcccttcccccgcgcgccttttagttttgtgtattcctgttatgccctttattttgtgtttctccttatattcaccagcagctagatacgccgtgtagactttcttttcatgtaggctcttctgttcttttcatactgtgtgtgttaccttactacagatgtataaaggctctcatacattgcagctgtttttaagaggaaaggcaaaaataccttcttgatagttgatacgtgaagagattcaagcaaaaccgatcagcttttcagtcgttttggctttccatgagttgctttgccacgaggcaatgacctttgcgcgtctgcgtcagtgtacgtagctacgctcgtgttctgtaacagtgag

SEQ ID NO: 207772 - DNA, 1661 bp, Zea Mays
gcgagatacgcgcggacggccgcgcgccgctggtctggtcgtcatgacagtcgccgccgcctcgtcccacccgacctgaaccccgcaccgtgacagccacggcccaccggacgcgggaccctcatgtcggcgggcacgcacgtgcccccgcatcggcgtcgttgcctcgccaaggccgacgcggatccgagtcatcccgcgtcaccatccatttgacgaggcggtttatcccccagcaccccaaccaacctttccacgtaccaccgggtttctgtccgcgccccgcccttcaaaagcaggtccgcacgccggccggcgagacgagacgacaccaccacgccgggacgggaggcacaggtgcggtctgcgtcgagagttggtccactggcaggccggaatgaagaagtgcgcgtcggagctggagctggagggagcggcgtcttctcacccggcttcggtttcgccgactcggacaccatggatggaggcagttggtggtacgggaacgtccgcacgccgaacccagtcatgtcgcaggcggcgtccatatccgctagccccgggctaaccacctcagccaatcatgctcttgaaagcgagtcagactccgacagcgaatcactgtatgaggtagagggagttccatacgagcgaggtaacagatccattgagacgaagcgaataagaaggatggtgtccaatagggagtctgcgcggcggtctaggaggaggaaacaggcacagttgtctgaccttgagtcacaggttgaacgactcaaaggtgaaaacgcaacactgttccagcaactttcagatgccaaccaacagttcagtactgcagtcacagacaacagaatcctcaaatccgatgtagaagcgttaagaattaaggtaaagatggcagaggatatggtagcgagaagtgctgtatcgtgtggcctaggcgaccttggcctggcaccatacgtgaactcaaggaagatgtgccaagctttgaatgtgctcacagggttggatttactagggagtgatgcgttcaggggtccaaccgcaggtacacgagtacagaactcaccagtacagagcactgcaagcctagagagtctggataaccgaaagtccaacgaggtgaccagttgcgcggcggacatttggccttgagcttcaagccattgatctgattcaaagcttgctccaccctcaaaaaaaggaccagagtttgtcaactcaaatagctggtggcttgagcagagcttctggcacgagttctcttgaaccatatttccacataagctttataggatgcatcactcttttgatgtcacttagtttcaagtataaaatgaagctgtctttgtacaaagctgcaaatgagaagtaaatgaaacgtcctggacaaacttgtgaagtaggaatgatacataggctctatttccaggtcagatgagacagttatgtttacaacaaaaagcaatacatgttgtttagaaaccgctattaattcacaggaatgttcaatccagtacaagtcatctagtagatttgcacccctaccttctagtagattcaaccatgttttcactactacttgctgggactacaactgtacatcatgatggtaaaatgcataactagtgaggttcttgactcgaaaccttcag

SEQ ID NO: 207773 - DNA, 1974 bp, Zea Mays
ttccaggaggacgaacaacacgtcagcactactcgcagtcccatcttcgccccccgcgacccgcccactatataaaacccgcctccccacccataggcccacaccaccaagaaaaataaattcagagaaaggaggaagggagactgggagaaacagacaggaaggagcccatccgcgtctgcctccacccctcggctcccagagtccccgctagccaagcccccacatggcaccaccgcccgcgggcctcgtgctcgtggctctgctcgcgctggtcctggcgctggcgctggcgccggcgccggcgcgcggggacaagccggcgaggggcggggcgtccagctccatcgccgccggggcggagacggagccgtcctccgccgtcttcccgctctacggcgacgtctacccgcacgggttgtactacgtggctatgaacatcggcaacccacccaagccatacttcctggacgtggactccggcagcgacctcacctggctgcagtgcgacgcgccctgcaggagctgcaacgaggtgccgcacccgctgtaccggccaacaaagagcaagctggtgccatgcgtgcaccggctgtgcgcttccctgcacaacgggctgaccgggaagcacagatgcgactcgccgcacgagcaatgcgactacgtgatcaagtacgcagaccaggggtcgtccaccggcgtgctcatcaacgacagcttcgcgctccgcctcaccaacggctctgtcgctcgccccagcgtcgccttcgggtgtggttacgaccagcaggtccgcagcggcgacctgagttcgcctaccgacggcgtgctggggctcgggaccggctcagtcagcttgctctcgcagctcaaacagcgtggcgtcaccaagaacgtggtcggccactgcctcagcctgaggggcggcgggttcctcttcttcggtgacgatctcgtgccttaccaacgcgcgacatggactcccatggctcgcagcgcgttccggaactactactcccctggctctgcaagcctgtacttcggcgaccggtcactgggcgtgagactggcgaaagtggtcttcgacagtggaagctcgttcacctacttcgctgcaaagccataccaagcacttgtcaccgctcttaaggatggcctgagcaggacgctggaagaggaacccgacacttcgctgcctctctgctggaaagggcaggaaccattcaagtctgtgcttgatgtgaggaaggagttcaagtctttggtgctcaacttcgccagtggcaagaagacgctcatggagatccctcctgagaactacctcattgtcacagaaaacgggaatgcctgtctgggcatcctcaacggatccgaaatcggtctcaaggacctgagcattattggagacattacgatgcaggatcacatggtgatatatgacaatgagaaagggaaaattggatggattcgtgcaccctgtgacagagcccccaacgacataaatacggttcatgggtttgaggaaggttactgttggcctcaattcctcccggggatcattggtcttcccaacgaagattgcccagcctattaccgttcaaacaaagagcgatttgccaaggcccaagggggaggccgctagaatgacagaaacagcagaaggatggtcacggaggctggtgtgtgttctttaggaaaggagagaaactagcccatgtaaacatcataatgttcatatgaaatataacgatgatcaccctgttacgagtacaatcttttcggaccttttctgtgtacattctttacttggttttctttctgttgatgtgatatatactcggttccaggtgtctcgcgactatgtgtgagtgtgatacgcaggcagcagattgtcttgttcttcagggtcgttgtgtggataacgtcaggaatttagacattttcagattcaatttaatctagaaatatagcacg

SEQ ID NO: 207774 - DNA, 2163 bp, Zea Mays
ctctgctccctccgactccgacctctctcgtccgtccctcgctctcgcaaaagctccgctctgcttgtcgcagtgtcccttgtctgtttcccctcgccggctcgccgccaccgccgcatccacttctgcgccgcggccgcccatattcctccgagcgcatcttctcctcgcattacagcaccgtaaagccgcatcatttccggatccctacctaggccgaagccgcagctcccaatggcggccgcctcgtcgttgcgtgtcacgtctttcgccgccacatgccctagagcgcgggtgggatctgccggcctcggatctgcctgatgcacggctggagctttgaagctttgctgacattggcggtggttttccctttcttcagcgcccgggggccttgctcgttgctgcggcggggcggacagaaaactgcaatgtgaagtacagcgggtcgatgtcttcaaagagcaatcctgttcttttgtccttaaccgtttggttaattacatcaagtgtccctgaatatacaagtgtcccctgaatatacatcacgtacctaacaccactctactgccaccccccctctccccttgcaaattcacagtattttaggcctcatcactcatcagtcgtagcttgttgtcacagtgcagatttcagtatgtctttcaagattcagctattgtcctccattgccatttttgcttttgccttgcatcttcacccttgtgtgtccactgagtttcgccgtgagctctccagctggaccactggcatagctacgtggtatggcgatgctaatggcgccggaagtgaaggtggtgcatgtgggtaccaatatgctgttgaccaaccaccgttctcgtccttgattgctgccggcagccccttcatctatgactctggcaatggatgtggctcttgctatcaggtggtatgctctagcaatcaagcttgctctggttacccggtgactgttgtcatcaccgaccagggccctggtggtggcccatgcctgagccaagcaagcgatggcatgtgcatgaatgagggagcccactttgacatgagtggaactgcatttggcgccatggcaaagcccggaatggccgatcaactccgtgctgctggcctgctacaaatccaatacactcgtgtgcagtgtgaatggcctggagttgatgtaaccttctctgttgactccggctcgaacccgaactatctggctgtgctcatcgagtacgaggactgcgagagcgatctttcagccgtcgacatcatgcagagctcagcagggcaatgggtgccgatgcagcattcgtggggtgcaatctggaggctcgactctggctctgctcttcagggcccgttccacctccgcttgacgttcagctcaggccgggtactcatagccagcaatgccatacctgcaggatggaatgcgggtgtggcgtaccgggcaggcggagtggcggtgactagggccaggcccaggagtggtggcagccaggccggtgaggctgctgctggaacatttagaggtttggtgtatcaccttctgatgtttgtggtattggcgttgtgaattatgatgcaaatgcatctttggtagtttagaggtgtaaatttaacaaatttaggactacccagggattttagatgtgcattttgatgttttcttgtagctgaggtctgagaggggggagtgatgttaacgtttttgttgtggttgagttatcagcatgcaactgatcaggttggatggtagtccttgcatgtaaatacacatttggtgaaactgtttaggttaagtctttagttcctttatggaagagatgtcttctttctagctttttatttgatttcgaggtgtttttcatggatcgaataccactagtcattgagttagtaaacaaattgtttttctgacagtattgagttgaaatttgttgtttcgagttaaaagattgagtttgtaaattacatgagtctttaaacaaatgctttgaagtacaaagtgagaatcctacttttcaatttttcatctggagagtcttaatctcaggtttcgtagtagttttttgttactgtactgtagcgcagtgcagtgagaagcgtaactacatatctgatctctgtagtctaattcaggaccaacgagtttgg

SEQ ID NO: 207775 - DNA, 1826 bp, Zea Mays
ctctgctccctccgactccgacctctctcgtccgtccctcgctctcgcaaaagctccgctctgcttgtcgcagtgtcccttgtctgtttcccctcgccggctcgccgccaccgccgcatccacttctgcgccgcggccgcccatattcctccgagcgcatcttctcctcgcattacagcaccgtaaagccgcatcatttccggatccctacctaggccgaagccgcagctcccaatggcggccgcctcgtcgttgcgtgtcacgtctttcgccgccacatgccctagagcgcgggtgggatctgccggcctcggatctgcctgatgcacggctggagctttgaagctttgctgacattggcggtggttttccctttcttcagcgcccgggggccttgctcgttgctgcggcggggcggacagctggaccactggcatagctacgtggtatggcgatgctaatggcgccggaagtgaaggtggtgcatgtgggtaccaatatgctgttgaccaaccaccgttctcgtccttgattgctgccggcagccccttcatctatgactctggcaatggatgtggctcttgctatcaggtggtatgctctagcaatcaagcttgctctggttacccggtgactgttgtcatcaccgaccagggccctggtggtggcccatgcctgagccaagcaagcgatggcatgtgcatgaatgagggagcccactttgacatgagtggaactgcatttggcgccatggcaaagcccggaatggccgatcaactccgtgctgctggcctgctacaaatccaatacactcgtgtgcagtgtgaatggcctggagttgatgtaaccttctctgttgactccggctcgaacccgaactatctggctgtgctcatcgagtacgaggactgcgagagcgatctttcagccgtcgacatcatgcagagctcagcagggcaatgggtgccgatgcagcattcgtggggtgcaatctggaggctcgactctggctctgctcttcagggcccgttccacctccgcttgacgttcagctcaggccgggtactcatagccagcaatgccatacctgcaggatggaatgcgggtgtggcgtaccgggcaggcggagtggcggtgactagggccaggcccaggagtggtggcagccaggccggtgaggctgctgctggaacatttagaggtttggtgtatcaccttctgatgtttgtggtattggcgttgtgaattatgatgcaaatgcatctttggtagtttagaggtgtaaatttaacaaatttaggactacccagggattttagatgtgcattttgatgttttcttgtagctgaggtctgagaggggggagtgatgttaacgtttttgttgtggttgagttatcagcatgcaactgatcaggttggatggtagtccttgcatgtaaatacacatttggtgaaactgtttaggttaagtctttagttcctttatggaagagatgtcttctttctagctttttatttgatttcgaggtgtttttcatggatcgaataccactagtcattgagttagtaaacaaattgtttttctgacagtattgagttgaaatttgttgtttcgagttaaaagattgagtttgtaaattacatgagtctttaaacaaatgctttgaagtacaaagtgagaatcctacttttcaatttttcatctggagagtcttaatctcaggtttcgtagtagttttttgttactgtactgtagcgcagtgcagtgagaagcgtaactacatatctgatctctgtagtctaattcaggaccaacgagtttgg

SEQ ID NO: 207776 - DNA, 1143 bp, Zea Mays
ctttgcgtggtccgtcctgttcatttgaagatgaactcatccctctgcttgatgtcctagcaaacaaagtgaacgctatcaggaggcttagggaactcttgacaaccaatcttcctacaggcacatttccagtcaaggaagtcatagctgctacaatgataagaagaaagtagaggaaaaggaacagatctcgactgtaattctgcagatgaagcataccaataaaaaggcatatgaccagactctgtaacaatatctgcacatcagtaccttggcagactctccaagcagcaaacaaagtgaaggctatctggaggcttagtgaactcttgacaaccaaacttcctacaggcacatttccagtcaaggtaaactatctggcaccttggttacattacccgtgcttccagcagattacatcttgccatttattccaatcacaatgcatggttcaatccaatcatgagaagtggcaatctgtgaggtttttgcaagggagatgagctcaccttggcaatggtagttaatcttattaatgcaaacaaggatgattaatttgatgtacttttctatgcctcgtggtgcccattctcacaagaatgcatttgaggaatctgcaattaggccaaggcgtcccacacaggtgtttcttccataagaagactaccgacatgggatacgtctcttcagtttgtttgtcaatattttgtaggaatcagaagaggtgttcaacatgtgggttaattttgttttcaagtgtgctcctctaatgacacccttttcttttttggagtaccttttgataataacaaatttgggttctatttttgtttctagactcaagtctagagttccatgaattaaaatattggtttatttgttgtggccacctatggtctcattatcttctctccacttagttatttgttcctgcaatttgggtttggccagtatcaaatttggtaaggaaggaggcaactagatgcttaccgaatttactctcaattttgctttccttatcgcagttttactttgacatgcactaccattccccctctaatctctaccaaccatatgcaaaattggaatcatctcaatgtttagataggttttggtgtttatataagactgccataaaagcat

SEQ ID NO: 207777 - DNA, 3416 bp, Zea Mays
ctttatgcgagaaaagagaggagtcgagccgacgattggggagcaaggagagaagaaaatagatagatgcaatacagtcaatagtgagaaataaaaaacaaaatgattagaaaaggttagagtactatttttaaggataaattaatttataaatagaagattaaattgagagtaccaaacgagagaaaccccacaaaatcaatattataacagaaaaaagtcggagggttcgggtcgaggtgcttcatccacacccagcgaatcctcgccgcgggagtcacgcaaccgccgtctcctcgccggcacgcttcgccgccgccgcctctctcctcctcgtctcaaccgccgcctgcacacgcagaaaaggagggagaataagaggatcagcaaaccccaagccctccactcgtcgccccctgctgcaatcgccccacccgcctccgcccgccgccgcttctcctcaccttcctctcccgcgacatctcagttcttcatcaccaaaagatggtcggcggcggcaacgagttccgtttcttcttgtcctgcgacatcagccacccgcttgccttccgtgttctccacgcagaacatatcttgttgaccgaccaaaaagtcccagagctctttgttgagtgcaagctatacatcgatgggatccaatttgggttgcctgtaaaaacaaggttggaaccttctggaccgaaatactgttggaatgagctcataacattaagtaccaaatacagggacctaacatccctctcgcagcttgcatttacggtgtgggatgtctcatctggtgagaaccctgaggttgtcggtggagccaccatatttctttttaacagcaaaaggcagcttaaaacaggaagacagaagctgcggctgtggcccacaaaggaggcagatggaggagtccccaccacaactcctggcaaggttcctaggaatgagaggggtgagatagaacgtttggaaaggcttgttaacaagtatgagagagggcagatacaacatgttgattggcttgatcgtcttgccttcagtgctatggacaaagctatggaaaaagagtgtgagaggaaggccaatttgtaccctagtctggttgttgaattgtgcagtttcgaacatagaattgtcttccaggaatctggagcaaatttttatacaccggccccagtatcattatcaaatgaactggttactgtatgggaccctgaacttggaagaaccaatccatctgagcacaagcagttaaagcttgctaggagcttgactcgtgggatagttgatagagatctaaaaccaagctcaaatgagagaaagttactacaaacaattattaagtttcctcctacacgcaccttggaagtggatgagaagcaattggtgtggaagtttcgtttctctttgatgtctgagaagaaagctctaacgaaatttgtccgctcagtggattggagtgataaccaagaagctaagcaagctgttgagttgattggaaagtgggaaatgattgatgtggctgatgcactagagcttctctcacctgattttgaaagcgacgaagttcgtggttatgctgtcagcgtacttgaaagggctgatgatgaagaattacagtgctatttactccagttagtgcaagctcttcggtttgaaagatctgacaagtcccgtctagcactctttcttgtaaaccgtgctttgtccaacatcgaaattgctagcttcctccggtggtatatattagttgagcttcacagtcctgcatatgcaagacgatattatggcacatatgacatgcttgaaaacagtatgatgaaattggttggtagggaggatggggatgaagatggatttcgactgtggcagagtttaacccggcagacagacctcactgctcaattgtgttctattatgaaggatgtaagaaatgtaagaggtagcgcacaaaagaaaattgaaaaattgaggcagctattatcaggagttttcagtgagcttacaaactttgatgagccaattcgttcaccattagcaccaactcttctcctaacaggagttgtgcctcaagaatcgtctatatttaagagtgccttgaaccctttgcgcctgacatttaaaacagcaaatggcggaacatccaagattatttacaaaaagggtgatgacctccggcaagatcagttggttattcaaacggtttctttgatggaccgactactcaaattagaaaatctagatttgcaccttactccataccgagttcttgcaactggacaagatgaagggatgcttgaatttattagttccagttctcttgcacagattctatcagaacatcgcagtattacaagttacctacagaagttccatcctgatgaggatggtccttttggtataacggctcaatgtttggagacattcataaaaagctgcgccggttactctgtcattacatacatattgggggttggagacaggcatctggataatcttcttctaactgatgatggacgcctttttcatgttgactttgcttttatccttgggcgagacccaaagccatttccgccaccgatgaagttgtgtaaggaaatggttgaggccatgggtggtgcagaaagccaatattacacaaggttcaagtcctactgctgcgaagcatacaacattctgaggaagtccagcagtctcattttgaatctattcaagctgatggagcgatcaggcattccggacatctctgccgatgaaagcggaggtctcaagctccaggagaaattccggttggatctggacgacgaggaggctatacatttcttccaggatcttatcaacgatagcgtgagtgctctgttccctcaaatggttgagaccatccatagatgggctcaatattggcggtaacacaagctaatgtcgtagaagcaagtgtgaatctgtacatgctgactgtcacaagccacggtaataagcgagaaacgacactgatggatggaagcctaggcgcctagcatttggggttcaagctgcgccgcatctgcgaattgattgggctgatgcagggcatgggcaatcttctcgtgccggtgacacccaggaattcgggttgtcagttgtcacttgtgatagtagaattccgtcacgcactgctgtagacctatgggcattcgtcagatgtatatatgcgttaatgtataaaatcaacttcagtagcaaatttgtgaataccggaatacgtgatggtttaagttctttagtagtttgtaatgataagactagcctgccaggtgccagcagtctcaggagcatgtgggctctacaaggagattagcagctgctggagcattattgtgaaactaccaagtcttatatgatagcaatatcttttgctcatacaagtagtc

SEQ ID NO: 207778 - DNA, 3010 bp, Zea Mays
gaaaaaagtcggagggttcgggtcgaggtgcttcatccacacccagcgaatcctcgccgcgggagtcacgcaaccgccgtctcctcgccggcacgcttcgccgccgccgcctctctcctcctcgtctcaaccgccgcctgcacacgcagaaaaggagggagaataagaggatcagcaaaccccaagccctccactcgtcgccccctgctgcaatcgccccacccgcctccgcccgccgccgcttctcctcaccttcctctcccgcgacatctcagttcttcatcaccaaaagatggtcggcggcggcaacgagttccgtttcttcttgtcctgcgacatcagccacccgcttgccttccgtgttctccacgcaggtgtgggatgtctcatctggtgagaaccctgaggttgtcggtggagccaccatatttctttttaacagcaaaaggcagcttaaaacaggaagacagaagctgcggctgtggcccacaaaggaggcagatggaggagtccccaccacaactcctggcaaggttcctaggaatgagaggggtgagatagaacgtttggaaaggcttgttaacaagtatgagagagggcagatacaacatgttgattggcttgatcgtcttgccttcagtgctatggacaaagctatggaaaaagagtgtgagaggaaggccaatttgtaccctagtctggttgttgaattgtgcagtttcgaacatagaattgtcttccaggaatctggagcaaatttttatacaccggccccagtatcattatcaaatgaactggttactgtatgggaccctgaacttggaagaaccaatccatctgagcacaagcagttaaagcttgctaggagcttgactcgtgggatagttgatagagatctaaaaccaagctcaaatgagagaaagttactacaaacaattattaagtttcctcctacacgcaccttggaagtggatgagaagcaattggtgtggaagtttcgtttctctttgatgtctgagaagaaagctctaacgaaatttgtccgctcagtggattggagtgataaccaagaagctaagcaagctgttgagttgattggaaagtgggaaatgattgatgtggctgatgcactagagcttctctcacctgattttgaaagcgacgaagttcgtggttatgctgtcagcgtacttgaaagggctgatgatgaagaattacagtgctatttactccagttagtgcaagctcttcggtttgaaagatctgacaagtcccgtctagcactctttcttgtaaaccgtgctttgtccaacatcgaaattgctagcttcctccggtggtatatattagttgagcttcacagtcctgcatatgcaagacgatattatggcacatatgacatgcttgaaaacagtatgatgaaattggttggtagggaggatggggatgaagatggatttcgactgtggcagagtttaacccggcagacagacctcactgctcaattgtgttctattatgaaggatgtaagaaatgtaagaggtagcgcacaaaagaaaattgaaaaattgaggcagctattatcaggagttttcagtgagcttacaaactttgatgagccaattcgttcaccattagcaccaactcttctcctaacaggagttgtgcctcaagaatcgtctatatttaagagtgccttgaaccctttgcgcctgacatttaaaacagcaaatggcggaacatccaagattatttacaaaaagggtgatgacctccggcaagatcagttggttattcaaacggtttctttgatggaccgactactcaaattagaaaatctagatttgcaccttactccataccgagttcttgcaactggacaagatgaagggatgcttgaatttattagttccagttctcttgcacagattctatcagaacatcgcagtattacaagttacctacagaagttccatcctgatgaggatggtccttttggtataacggctcaatgtttggagacattcataaaaagctgcgccggttactctgtcattacatacatattgggggttggagacaggcatctggataatcttcttctaactgatgatggacgcctttttcatgttgactttgcttttatccttgggcgagacccaaagccatttccgccaccgatgaagttgtgtaaggaaatggttgaggccatgggtggtgcagaaagccaatattacacaaggttcaagtcctactgctgcgaagcatacaacattctgaggaagtccagcagtctcattttgaatctattcaagctgatggagcgatcaggcattccggacatctctgccgatgaaagcggaggtctcaagctccaggagaaattccggttggatctggacgacgaggaggctatacatttcttccaggatcttatcaacgatagcgtgagtgctctgttccctcaaatggttgagaccatccatagatgggctcaatattggcggtaacacaagctaatgtcgtagaagcaagtgtgaatctgtacatgctgactgtcacaagccacggtaataagcgagaaacgacactgatggatggaagcctaggcgcctagcatttggggttcaagctgcgccgcatctgcgaattgattgggctgatgcagggcatgggcaatcttctcgtgccggtgacacccaggaattcgggttgtcagttgtcacttgtgatagtagaattccgtcacgcactgctgtagacctatgggcattcgtcagatgtatatatgcgttaatgtataaaatcaacttcagtagcaaatttgtgaataccggaatacgtgatggtttaagttctttagtagtttgtaatgataagactagcctgccaggtgccagcagtctcaggagcatgtgggctctacaaggagattagcagctgctggagcattattgtgaaactaccaagtcttatatgatagcaatatcttttgctcatacaagtagtc

SEQ ID NO: 207779 - DNA, 1978 bp, Zea Mays
tgaacactgacgaggtctttgatgatgactggtgggataaaatctcaaggcaagggtgcctgatcatttaagaaagggtttcaactccatcatcattttagggacttggacattgtggaatcttcataattgatgttcgtggttatgctgtcagcgtacttgaaagggctgatgatgaagaattacagtgctatttactccagttagtgcaagctcttcggtttgaaagatctgacaagtcccgtctagcactctttcttgtaaaccgtgctttgtccaacatcgaaattgctagcttcctccggtggtatatattagttgagcttcacagtcctgcatatgcaagacgatattatggcacatatgacatgcttgaaaacagtatgatgaaattggttggtagggaggatggggatgaagatggatttcgactgtggcagagtttaacccggcagacagacctcactgctcaattgtgttctattatgaaggatgtaagaaatgtaagaggtagcgcacaaaagaaaattgaaaaattgaggcagctattatcaggagttttcagtgagcttacaaactttgatgagccaattcgttcaccattagcaccaactcttctcctaacaggagttgtgcctcaagaatcgtctatatttaagagtgccttgaaccctttgcgcctgacatttaaaacagcaaatggcggaacatccaagattatttacaaaaagggtgatgacctccggcaagatcagttggttattcaaacggtttctttgatggaccgactactcaaattagaaaatctagatttgcaccttactccataccgagttcttgcaactggacaagatgaagggatgcttgaatttattagttccagttctcttgcacagattctatcagaacatcgcagtattacaagttacctacagaagttccatcctgatgaggatggtccttttggtataacggctcaatgtttggagacattcataaaaagctgcgccggttactctgtcattacatacatattgggggttggagacaggcatctggataatcttcttctaactgatgatggacgcctttttcatgttgactttgcttttatccttgggcgagacccaaagccatttccgccaccgatgaagttgtgtaaggaaatggttgaggccatgggtggtgcagaaagccaatattacacaaggttcaagtcctactgctgcgaagcatacaacattctgaggaagtccagcagtctcattttgaatctattcaagctgatggagcgatcaggcattccggacatctctgccgatgaaagcggaggtctcaagctccaggagaaattccggttggatctggacgacgaggaggctatacatttcttccaggatcttatcaacgatagcgtgagtgctctgttccctcaaatggttgagaccatccatagatgggctcaatattggcggtaacacaagctaatgtcgtagaagcaagtgtgaatctgtacatgctgactgtcacaagccacggtaataagcgagaaacgacactgatggatggaagcctaggcgcctagcatttggggttcaagctgcgccgcatctgcgaattgattgggctgatgcagggcatgggcaatcttctcgtgccggtgacacccaggaattcgggttgtcagttgtcacttgtgatagtagaattccgtcacgcactgctgtagacctatgggcattcgtcagatgtatatatgcgttaatgtataaaatcaacttcagtagcaaatttgtgaataccggaatacgtgatggtttaagttctttagtagtttgtaatgataagactagcctgccaggtgccagcagtctcaggagcatgtgggctctacaaggagattagcagctgctggagcattattgtgaaactaccaagtcttatatgatagcaatatcttttgctcatacaagtagtc

SEQ ID NO: 207780 - DNA, 1257 bp, Zea Mays
gaaaccgtaaaccgtgaatggccatcgaggtccaaaaatccatctggattctggagagaggagaccccaaaatcgcagcgcgcgaaaacgcaggagcaacccgcccactcgccaccaccgcccgcgcgcacggcggcgaccgatggccccgctcgtgccgatgtcgcagccatgggtggagaaataccggccgaggcaggtcaaggatgtggctcaccaggaggaggtgattcgggtgctcaacaacaccctccagaccgccgacctgccgcacatgctgttctacggcccgccggggacgggaaagaccaccaccgcactagccatcgcctaccagctctacggtccagagctgtataagtcaagggttttggagctcaatgctagtgatgatcgtggaattaatgtggtgaggacgaaaatcaagaactttgctgctgttgctgttggtactgcacggaaagctggttatccctgcccaccttacaagattattatacttgacgaagcagattcaatgacagaagatgcccagaatgctttgaggcgtaccacagagacttactccaaagtgaccagattcttttttatatgcaactatatcagcaggataatagaaccacttgcatcaagatgtgcaaagtttaggttcaagcctctttcagaagaagtgatgagtagtcgcattatgcatatatgcaatgaagaaggcctcaatcttaatgctcaggcgatgtccacactgagtgtcatttctcaaggtgatcttcgtcgtgctataacctaccttcagagtgcagctcgcttatttggatcttctatctcttccagtgacctgatcagtgtttctggggttatccctgaagatgttgtcaagtcactgcttgcagcctgcagatctggtgaatttgacgtggcaaacaaggaagttagcagcattatagcagatgggtatccggtctcacagctgatggcacagtttctagatgttattgttagcgcggatgatattccagatgatcaaaaggcaaggatatgtaaaaagcttggggaaaccgataagtgcttggttgatggggcagatgagtatctacagctgctggatgtcgccagcgagactatccgctctcttttcaacatgccgcggacgctggtcttctaagagttcataaagaggaatggcggttccgatccttggcgaaaactttttcctgcctcttagatgccgcccaagaaggcatcgatgctatgggtcat

SEQ ID NO: 207781 - DNA, 2455 bp, Zea Mays
cagacgcatgcatgatgcatcgagcccccccagctcgcagtcgcaccggaggaatgctaactggagagccacgcctgccgcggaggaccgggactaactacgagctgccgcggccgttcctggtgcaggtccagggtagagagagagagaggggatggtgtgagggagggaagggagcaaaggcaaagcagccaacgaccagagagacacggaggctcagagagagagagcgaggaagaagaagagaagaagaagatggagcaagaggaagcgtgctcctcctcgctgcggcagtgcaggatttgccacgacgaggaggacgagcggcgctccgccatggagtcgccctgcgcctgctccggctccctcaagtacgctcacaggggatgcgtgcagaggtggtgcgacgagaagggaagcgccgtctgcgagatttgcctccagaactttgagccaggctacaccgttcctcccaagaaaacccaacctgctgatgtcgcggtgaccatcaggtgcctccttctctatctctctctggtaactgtgcgcattaaggctatctatcagggcgaatgctgtgcttaattgtaggtggtcactggtcagctgtagttgttccataatatagtaactgtcatcagaacatccacttcgcccatttcattcattcatccattccttcgttcatttttgtttggcatcaacctcatctcatctgaaccgagcgcggttgctggccaacccatctttatctcccattccatcgattgattaaacggaatctgccagcgcgacgggcactttaggcgaccaagaccaaccacccgctcttgatagctcgtcgtcgcatccgcatactacccaccagcaaaattccaagacgcgtcccaggcggcggcccccctcgttctcatccgctgacgcagcacagcatgcgctctcacccaagcccctgatccggtcgccaccatctccagaccaagcaagagaccaaagcgctctgatcgaacagtggtgctggtggcctggcgcacattccattctggcagtggcagtggcagggcagctgtctatgtctatcgcagcatgttgttcttcgggattcccgaggcggtcgggggtgggagcccctgtgtttgtgtgtgtgtggcgtggctgccaggtgggtccggcccagctgtttccgttagccaggccaaccaccgggtcccaactcccaatcattctttcgccccgcatgagatgatgatgccctcgcactgttgctgcacctcttctgctgtagtggactacaaatgcaagccgtgccctgcactgcactcactcctccctgctgtcctgcacccgttggcacaggagtcaagcccgtccgttcttgttcatcggtggttgcaggcagcacggccgatcaccgcgtctgcacttttaatttgtaatgtgactgacggagaaaatttgtggaatctgtcgatcctggttggctgtctgtctgtctggtcagctcagcaaccaccaccgatgatcagtttacgaccactacctacctaccattaccactaccagccagagcctggcaaccaccacgcgcgttgctgatctgggctttcgtggtgcatgcgcagagacagcgtgggggtgcccaggccgcagcacgagcctgaagaggaggaggagcaggagctggtggacgtggcgttgatcggagccagcgacccggagtacgccgagtgcgcgcgcgccgccggcaggagcgcgtcctggtgccgctcggtggccgtcacgttcacggtcgtcctgctgctgaggcacctggtcaccgtggtcacggtcggggcggccaaccagttcgccttcggcctcctcacggtgagtagcacggaaatctgaaaagaaaaataaaagaaaaggctggaatgaaaagcagacaaggttggttcgtttctgcgatcgaccgacgactatatactgtaaaaacctaacgtctgttccttggcttggaaatgcaaggtatacttgctgcgggcgagcgggatcctgcttccgttctacctcgtcatgaggctcatctccgtgatacagcaggggcagaggcagtaccgcctccggctgctccagaggagacacgcgttgaggtcgggccggctgcacggccaggaacagcaacaacagcatgtcatcctggttcgctgaggaacgagccattcattcaccttgccttggtgtccatacattccattcatccgtcgtacgcgtacaaggttgtaagatgtaccgctccatttttttctttttgttcaggcctttacaagcctaaaaaaagcttatatgtaccaccacttcatttgtaaaccctcaaaatttgttgctgagaagatcgacatatcatgtatagaattgtaaaaagaaacaaacaaaaaaaaaggggaaaagagaactggcgcaatgttcgattacc

SEQ ID NO: 207782 - DNA, 2320 bp, Zea Mays
cagacgcatgcatgatgcatcgagcccccccagctcgcagtcgcaccggaggaatgctaactggagagccacgcctgccgcggaggaccgggactaactacgagctgccgcggccgttcctggtgcaggtccagggtagagagagagagaggggatggtgtgagggagggaagggagcaaaggcaaagcagccaacgaccagagagacacggaggctcagagagagagagcgaggaagaagaagagaagaagaagatggagcaagaggaagcgtgctcctcctcgctgcggcagtgcaggatttgccacgacgaggaggacgagcggcgctccgccatggagtcgccctgcgcctgctccggctccctcaagtacgctcacaggggatgcgtgcagaggtggtgcgacgagaagggaagcgccgtctgcgagatttgcctccagaactttgagccaggctacaccgttcctcccaagaaaacccaacctgctgatgtcgcggtgaccatcaggtgcctccttctctatctctctctggtaactgtgcgcattaaggctatctatcagggcgaatgctgtgcttaattgtaggtggtcactggtcagctgtagttgttccataatatagtaactgtcatcagaacatccacttcgcccatttcattcattcatccattccttcgttcatttttgtttggcatcaacctcatctcatctgaaccgagcgcggttgctggccaacccatctttatctcccattccatcgattgattaaacggaatctgccagcgcgacgggcactttaggcgaccaagaccaaccacccgctcttgatagctcgtcgtcgcatccgcatactacccaccagcaaaattccaagacgcgtcccaggcggcggcccccctcgttctcatccgctgacgcagcacagcatgcgctctcacccaagcccctgatccggtcgccaccatctccagaccaagcaagagaccaaagcgctctgatcgaacagtggtgctggtggcctggcgcacattccattctggcagtggcagtggcagggcagctgtctatgtctatcgcagcatgttgttcttcgggattcccgaggcggtcgggggtgggagcccctgtgtttgtgtgtgtgtggcgtggctgccaggtgggtccggcccagctgtttccgttagccaggccaaccaccgggtcccaactcccaatcattctttcgccccgcatgagatgatgatgccctcgcactgttgctgcacctcttctgctgtagtggactacaaatgcaagccgtgccctgcactgcactcactcctccctgctgtcctgcacccgttggcacaggagtcaagcccgtccgttcttgttcatcggtggttgcaggcagcacggccgatcaccgcgtctgcacttttaatttgtaatgtgactgacggagaaaatttgtggaatctgtcgatcctggttggctgtctgtctgtctggtcagctcagcaaccaccaccgatgatcagtttacgaccactacctacctaccattaccactaccagccagagcctggcaaccaccacgcgcgttgctgatctgggctttcgtggtgcatgcgcagagacagcgtgggggtgcccaggccgcagcacgagcctgaagaggaggaggagcaggagctggtggacgtggcgttgatcggagccagcgacccggagtacgccgagtgcgcgcgcgccgccggcaggagcgcgtcctggtgccgctcggtggccgtcacgttcacggtcgtcctgctgctgaggcacctggtcaccgtggtcacggtcggggcggccaaccagttcgccttcggcctcctcacggtatacttgctgcgggcgagcgggatcctgcttccgttctacctcgtcatgaggctcatctccgtgatacagcaggggcagaggcagtaccgcctccggctgctccaggagcagaggagacacgcgttgaggtcgggccggctgcacggccaggaacagcaacaacagcatgtcatcctggttcgctgaggaacgagccattcattcaccttgccttggtgtccatacattccattcatccgtcgtacgcgtacaaggttgtaagatgtaccgctccatttttttctttttgttcaggcctttacaagcctaaaaaaagcttatatgtaccaccacttcatttgtaaaccctcaaaatttgttgctgagaagatcgacatatcatgtatagaattgtaaaaagaaacaaacaaaaaaaaaggggaaaagagaactggcgcaatgttcgattacc

SEQ ID NO: 207783 - DNA, 1782 bp, Zea Mays
ggtacagcaagctgagtatttacgcaaagggggaaaaaacattgcctgaaagttcttcaggccctggtgtagcagctgaattacccagtttaatggcgaagaacgagctttagatggtctaaagatggagatgagatagaagcaccacaaagtgtacagtggggtagcaaggatatgactgtcatgatgcctcagcgccaccgggctacagccaagaagcccatgtggataatcgtgctcttgtgcatggtttgcatcgtgctgattggggcttacgtcttcccaccgcggcgcttctctaactgctacctctctgcttcaagtgtatgcgcacctttcaaggattggctcccttctatgggccgtcgggagagaactgacgaggagattatttcatctgtagttattagggatatcctttcaatgcccatgcctatgccaaaaaatccaaagattgcccttatgttcttgacaccaggttcattgccctttgagaaattgtgggagaagtttttacagggacatgagggaagatactccatctatgtgcacgcatcacgtgaaaagcctgttcatactagttctttgtttgctggccgggatattcacagtgatgcggtagtatggggattgatttcaatggttgatgctgagaaaagattgttagcgaatgcactggaagatgttgataatcaagtttttatcttgctttctgacagttgtgttccactgcattcatttgattatgtgtataattacctcatgggaacgaatgttagcttcattgattgtttcaaggatccaggtccacatggcagtggaaggtactctattgagatgtatcctgaaatagacgagagggattttagaaagggtgcccagtggtttgcagttacaaggagacatgctttaatgattctggctgacagcttgtactacaagaagttcaagctatactgcaagccagcagaagggcgcaactgtattgcagatgagcattatttgccaaccctgttcaatatggtagatcctggtgggatctctaattggtctgttacacatgtggattggtctgagggaaaatggcatccaaggtcatatagcgctgatgatgtcacctatgatctcttgaagaacattacattgatgagaacttccatgtaacaagtgatgacaagaaacttgtgatgcagaagccgtgtttgtggaatggatcaaagagaccgtgctatcttttcgctaggaagtttaatcctgaagcacttgacaacctactgaagcaatttaccagttacacatctgtttgagtcctaccggattctttgccttgtgctgtcaaatccgacaagcttttttctcttcctgtttatatgtaaattgtgaagtccgtacttattaggatctgggcctgaagataccggtacaactgcaacagctgtgatggcttggagctgagtcatgggtaaaacggccacagcgatgtttatagaatggcactgccctcatagtaatttatcgtgttcaatgtatgtctccatagtcttccacccaactcccaactcattagttctttattcttggagaacagtttttgtcagagtgttatactgtcatgatatgatccattctttgtagacacagagattacaacagatgtatcacaaatgcagtcttaattttgtcactattaaatcttttatcatgcgttctactgaattaggtgttagcatttcttaaatttcactgtgatcaattttcagcaaagtaagcgtatttgagctg

SEQ ID NO: 207784 - DNA, 3128 bp, Zea Mays
tgcagctgccacctccaccttttctcgttctgtcgccgcctccacttccaccatcccaggccctctatcgtccctcagtccgctgccggtgccggtgccgcatcgggtagttcagcggcggcggcgctgctgatcaggtggtgcccaggccgtccacggaccgagccctctcgtcctcgtccgacgcgagggcaatcacccacccgggacgccttccgaagcggcatccctcctctggccaacgtcccagcaacgaagctcactgatgcgatatggaacaactgcttcctagacaagctcgccttcaggtatcgaagtcgaaccaaaggaggttgaagccatggccctcatcgtagctgcagctggaggaaaccttcttgtcagaaagttggtcaatttaactccctcgcaaacatgatgaggagcgaagtaattgaggctggaaagctagtgaacctgtggaatgaatgggggctacagatcctggtcattgcaagcttcgggttacaagtattcctcctcgttttcggaggagtccgccgtcatagcaactccactgccctgacgttcttcctctggtcggcatacctactggccgattccacagcgatatacaccctgggccacctatctgttgacagtatgtcagacgagcaccagctggtggcattctgggcgccgttcctattgctgcacctcggtggcccagacaacatcacagcgtatgcactcgaggacaatgcgctctggctacgccacctgcaaactctcgccgtgcaggtcctaggagctgcttatgtgatatacgagtacatcgccagcagaggggcattgctttttctggcctccttgtccatgttctttgccggtcttctcaagtatggcgagaggatatgggctctcaagtgtggcaacatcagcagcatccgcagcagcatcagcatccggaagatcaagactgacccttatcagctattgactttgggtactagcgaagaggatttgctgcttggagcccactcccagtttgatatctgcaaaggtgtcttcgccgatatcataatgctaccaaatcccttagttcgttcacagcctaaaccacgttccgtgatatcttatctgggagaggatctatacaagttggttgagatggagctgtctctgatgtatgacttcctgtacactaaggcagcagtgatccacacatggtatggcttctgcatccatttcatctcgctgtttggcacagccaccacattccttttgtttcagctcagtatcagcaacagtggaaatcggtacagcagagtggatgtggctatcagttatgttttactggttggggctttggtcttggaaatcatatcagtgtgcagagctgtactatccacctggacatgttctttgttgcaccgcaggggcaggggatgggagtggtctctccacattgtcacttcccttggtcagcgtgtccatccagcaagtaggagactctggtcgggctccattgggcagtacaacttgttccacctgtgcacccgcaacaccaacgagatagggagcagactagcaacgaaactggggctcgaggactggtggaacaagatgcacttctccggaactttcccacacgctaactcgtctttgtcaatacaagatatcaagaaattggttctgcaagcactgcgaagcaaagagcaagcactgcaacaccaggatactgatttgaactcaagaggcagctttatactgaaacgtatggaggcctacaaagactttgctcgctggagcgtcaacattgacttcgacgagagcatccttgtttggcacattgcaaccgaggtgttcatcaggaaatccaaggccagacatgcaaaagaactccttgaggctactgaggacactgtcgaacgcgatttggtgataaggacaacccagtggcgccatcccctgtaagctggaacccgtactatattcttaaggaattgttccaccatgatggtcccagttgctccaggataccacggagggagaagcttgcagaggtggcctggagtttctcccaatttgcactggtataacttccctgatcattcaactgaaacacatttcgttggtaaatatgtttgaagatatagaacatgttaaacaaccttttgttttcatacttgctgatttcactaatagaaccagcacatgcctttattcagagctgcaccaaattgattctcttcgagtgaaattccattcatagtggatcatctgaattttatttcttgacttcatttgactattctacaatgaatttcaaagaaggcaatatctgtttttttagatagaccttggtctaacaaagttcatactaaagttcagggtgcattagttttatttaattctccttatttgtctcagggatcagtaaaggcaccaaatccacatggggactccatccgtgacagtgctaatatgtatgcaatcttgctcgccaacgagcttctgagcatagagttgcagtggcaggatcagcgtgacactttggaactgatcctgggggtgtgggtggagatgtcgttgtatgctgcggatcattgcagccaagagtcccatgccaggcagctcagtaatggctgcgaattcattaccatcgtgtcgttgctggcacaccacttcaagtactactctggggccttcaggggcgccgacaaccttggagaagataaacccgctagtgaaaataaacccgttactgtaaataatcccatgagtgaaaattgtgggaacttggtttagatgagttcgcacaattttcatttgaaatgacctctctgtcagttcagggaaaaacctgaggattcatgactccaaacaagagtaaatatatttatctgtcgatgaacatagtaattaaagtgctaggattcatcaatgttagctttggactctacattcaacagtttgtaaggtgagtctgactgtgtgtgtgtgtgacatgctcatatatcttccatgatcaaggtaatgatcggcgttgagtgtgttgctcaaccgccattatacaatatgcaattattattagataattatcaacgagattcctgaattatatttttggatggagggagtagtat

SEQ ID NO: 207785 - DNA, 2835 bp, Zea Mays
tgcagctgccacctccaccttttctcgttctgtcgccgcctccacttccaccatcccaggccctctatcgtccctcagtccgctgccggtgccggtgccgcatcgggtagttcagcggcggcggcgctgctgatcaggtggtgcccaggccgtccacggaccgagccctctcgtcctcgtccgacgcgagggcaatcacccacccgggacgccttccgaagcggcatccctcctctggccaacgtcccagcaacgaagctcactgatgcgatatggaacaactgcttcctagacaagctcgccttcaggtatcgaagtcgaaccaaaggaggttgaagccatggccctcatcgtagctgcagctggaggaaaccttcttgtcagaaagttggtcaatttaactccctcgcaaacatgatgaggagcgaagtaattgaggctggaaagctagtgaacctgtggaatgaatgggggctacagatcctggtcattgcaagcttcgggttacaagtattcctcctcgttttcggaggagtccgccgtcatagcaactccactgccctgacgttcttcctctggtcggcatacctactggccgattccacagcgatatacaccctgggccacctatctgttgacagtatgtcagacgagcaccagctggtggcattctgggcgccgttcctattgctgcacctcggtggcccagacaacatcacagcgtatgcactcgaggacaatgcgctctggctacgccacctgcaaactctcgccgtgcaggtcctaggagctgcttatgtgatatacgagtacatcgccagcagaggggcattgctttttctggcctccttgtccatgttctttgccggtcttctcaagtatggcgagaggatatgggctctcaagtgtggcaacatcagcagcatccgcagcagcatcagcatccggaagatcaagactgacccttatcagctattgactttgggtactagcgaagaggatttgctgcttggagcccactcccagtttgatatctgcaaaggtgtcttcgccgatatcataatgctaccaaatcccttagttcgttcacagcctaaaccacgttccgtgatatcttatctgggagaggatctatacaagttggttgagatggagctgtctctgatgtatgacttcctgtacactaaggcagcagtgatccacacatggtatggcttctgcatccatttcatctcgctgtttggcacagccaccacattccttttgtttcagctcagtatcagcaacagtggaaatcggtacagcagagtggatgtggctatcagttatgttttactggttggggctttggtcttggaaatcatatcagtgtgcagagctgtactatccacctggacatgttctttgttgcaccgcaggggcaggggatgggagtggtctctccacattgtcacttcccttggtcagcgtgtccatccagcaagtaggagactctggtcgggctccattgggcagtacaacttgttccacctgtgcacccgcaacaccaacgagatagggagcagactagcaacgaaactggggctcgaggactggtggaacaagatgcacttctccggaactttcccacacgctaactcgtctttgtcaatacaagatatcaagaaattggttctgcaagcactgcgaagcaaagagcaagcactgcaacaccaggatactgatttgaactcaagaggcagctttatactgaaacgtatggaggcctacaaagactttgctcgctggagcgtcaacattgacttcgacgagagcatccttgtttggcacattgcaaccgaggtgttcatcaggaaatccaaggccagacatgcaaaagaactccttgaggctactgagaaggacactgtcgaacgcgatttggtgataaggacaacccagtggcgccatcccctgtaagctggaacccgtactatattcttaaggaattgttccaccatgatggtcccagttgctccaggataccacggagggagaagcttgcagaggtggcctggagtttctcccaatttgcactggtataacttccctgatcattcaactgaaacacatttcgttgggatcagtaaaggcaccaaatccacatggggactccatccgtgacagtgctaatatgtatgcaatcttgctcgccaacgagcttctgagcatagagttgcagtggcaggatcagcgtgacactttggaactgatcctgggggtgtgggtggagatgtcgttgtatgctgcggatcattgcagccaagagtcccatgccaggcagctcagtaatggctgcgaattcattaccatcgtgtcgttgctggcacaccacttcaagtactactctggggccttcaggggcgccgacaaccttggagaagataaacccgctagtgaaaataaacccgttactgtaaataatcccatgagtgaaaattgtgggaacttggtttagatgagttcgcacaattttcatttgaaatgacctctctgtcagttcagggaaaaacctgaggattcatgactccaaacaagagtaaatatatttatctgtcgatgaacatagtaattaaagtgctaggattcatcaatgttagctttggactctacattcaacagtttgtaaggtgagtctgactgtgtgtgtgtgtgacatgctcatatatcttccatgatcaaggtaatgatcggcgttgagtgtgttgctcaaccgccattatacaatatgcaattattattagataattatcaacgagattcctgaattatatttttggatggagggagtagtat

SEQ ID NO: 207786 - DNA, 3131 bp, Zea Mays
tgcagctgccacctccaccttttctcgttctgtcgccgcctccacttccaccatcccaggccctctatcgtccctcagtccgctgccggtgccggtgccgcatcgggtagttcagcggcggcggcgctgctgatcaggtggtgcccaggccgtccacggaccgagccctctcgtcctcgtccgacgcgagggcaatcacccacccgggacgccttccgaagcggcatccctcctctggccaacgtcccagcaacgaagctcactgatgcgatatggaacaactgcttcctagacaagctcgccttcaggtatcgaagtcgaaccaaaggaggttgaagccatggccctcatcgtagctgcagctggaggaaaccttcttgtcagaaagttggtcaatttaactccctcgcaaacatgatgaggagcgaagtaattgaggctggaaagctagtgaacctgtggaatgaatgggggctacagatcctggtcattgcaagcttcgggttacaagtattcctcctcgttttcggaggagtccgccgtcatagcaactccactgccctgacgttcttcctctggtcggcatacctactggccgattccacagcgatatacaccctgggccacctatctgttgacagtatgtcagacgagcaccagctggtggcattctgggcgccgttcctattgctgcacctcggtggcccagacaacatcacagcgtatgcactcgaggacaatgcgctctggctacgccacctgcaaactctcgccgtgcaggtcctaggagctgcttatgtgatatacgagtacatcgccagcagaggggcattgctttttctggcctccttgtccatgttctttgccggtcttctcaagtatggcgagaggatatgggctctcaagtgtggcaacatcagcagcatccgcagcagcatcagcatccggaagatcaagactgacccttatcagctattgactttgggtactagcgaagaggatttgctgcttggagcccactcccagtttgatatctgcaaaggtgtcttcgccgatatcataatgctaccaaatcccttagttcgttcacagcctaaaccacgttccgtgatatcttatctgggagaggatctatacaagttggttgagatggagctgtctctgatgtatgacttcctgtacactaaggcagcagtgatccacacatggtatggcttctgcatccatttcatctcgctgtttggcacagccaccacattccttttgtttcagctcagtatcagcaacagtggaaatcggtacagcagagtggatgtggctatcagttatgttttactggttggggctttggtcttggaaatcatatcagtgtgcagagctgtactatccacctggacatgttctttgttgcaccgcaggggcaggggatgggagtggtctctccacattgtcacttcccttggtcagcgtgtccatccagcaagtaggagactctggtcgggctccattgggcagtacaacttgttccacctgtgcacccgcaacaccaacgagatagggagcagactagcaacgaaactggggctcgaggactggtggaacaagatgcacttctccggaactttcccacacgctaactcgtctttgtcaatacaagatatcaagaaattggttctgcaagcactgcgaagcaaagagcaagcactgcaacaccaggatactgatttgaactcaagaggcagctttatactgaaacgtatggaggcctacaaagactttgctcgctggagcgtcaacattgacttcgacgagagcatccttgtttggcacattgcaaccgaggtgttcatcaggaaatccaaggccagacatgcaaaagaactccttgaggctactgagaaggacactgtcgaacgcgatttggtgataaggacaacccagtggcgccatcccctgtaagctggaacccgtactatattcttaaggaattgttccaccatgatggtcccagttgctccaggataccacggagggagaagcttgcagaggtggcctggagtttctcccaatttgcactggtataacttccctgatcattcaactgaaacacatttcgttggtaaatatgtttgaagatatagaacatgttaaacaaccttttgttttcatacttgctgatttcactaatagaaccagcacatgcctttattcagagctgcaccaaattgattctcttcgagtgaaattccattcatagtggatcatctgaattttatttcttgacttcatttgactattctacaatgaatttcaaagaaggcaatatctgtttttttagatagaccttggtctaacaaagttcatactaaagttcagggtgcattagttttatttaattctccttatttgtctcagggatcagtaaaggcaccaaatccacatggggactccatccgtgacagtgctaatatgtatgcaatcttgctcgccaacgagcttctgagcatagagttgcagtggcaggatcagcgtgacactttggaactgatcctgggggtgtgggtggagatgtcgttgtatgctgcggatcattgcagccaagagtcccatgccaggcagctcagtaatggctgcgaattcattaccatcgtgtcgttgctggcacaccacttcaagtactactctggggccttcaggggcgccgacaaccttggagaagataaacccgctagtgaaaataaacccgttactgtaaataatcccatgagtgaaaattgtgggaacttggtttagatgagttcgcacaattttcatttgaaatgacctctctgtcagttcagggaaaaacctgaggattcatgactccaaacaagagtaaatatatttatctgtcgatgaacatagtaattaaagtgctaggattcatcaatgttagctttggactctacattcaacagtttgtaaggtgagtctgactgtgtgtgtgtgtgacatgctcatatatcttccatgatcaaggtaatgatcggcgttgagtgtgttgctcaaccgccattatacaatatgcaattattattagataattatcaacgagattcctgaattatatttttggatggagggagtagtat

SEQ ID NO: 207787 - DNA, 3148 bp, Zea Mays
tttatgatcaaacaaaggctctccatgaaggttcttccacagtttaaagtgcacatttcagcatattgagagaatgccaactttgcattgatccaaggatcaagagatcctagaagatccatcaaaaggagctagaaaaaaaaatgctctctcatatttccgttcgtttgatgcttatcataaaatatcacatccagatcaactggtctgggactatatcttcatcagtttggcataaatcgtaatcatgtcgtccaagcttggttgtccatcttacaacagaatatatgaacagtggttgatcaggtgctgtactgattgtgtatcatccacgttgctccctaaagcaacgacaatctcttgcccttgggagcttgcaaagacataggattccacagatgaatggtgcctcgggaaatgcacgcccgcccttgttaaggacccaacaagctcggtactgccaacatgagaggaaaattagcaaactgttttatatcagaatgagcatttgaagctaaacaatcctttgaaacggaaatctgaagtagagtagcttcatttccacatctgtagcactgtggcagtagacatgaggagaccaagagcaggggggaagataggattccaacagagcaacagtggccggtgctggaaattgaaaagtcggagccggacaagtatggcggaaccactgtgacctcgaggcgagaatacgacaggattcttttcggtaaacaacaacgacaacaataaccgctaaaactagttgggaaaaatggtggcaagcagcataggaatcaagggttctacaacaaatgtcagcatggatgtgagaagatacaactcgatgccattccattatacgggggaagaagaagagatcggtacctcccgagcgaaaaaaattggactggggaagtgcggaggaggcccgatttcatttgatttgaggcggcgcaggcacagaggagagcgctgcgccatgcgccgactggggaggaaaacaacaggttacgcgaacagaataagaaagcgaattaatggaatacgccttttctgtgattggaggggctaccgggatttttgctacttgcctccattgatggcttatcttcttctccatcctcagttcacttgctcccagcccccttctcatcgattgaggggtcaaatacattacaagacaaacaatatggggaagaacatggctaaatctacagtgagtttgcttaaccgcagtgctaattttgcatcaaggacttcacaagatgccgtggatgggttaagcgatgaaagtgacggtgaaacctcaacaaaaaagaagagaaccccaagacgtggaagaaagaaagccaccgttgaaacatcgagagatgtaggagaagaaatcgaagtcatcactgaacaaacggccgctgaagagactaaggaagttaagaggagaggccgcaagaaagctgctacttctgcaagctcagaagaggagaaggataaggccaaggaaccgaagaagaggggacgtagaaaagttaagactgtagaggaacctattgataatgctggagagcatctgagcaaagatttgatgctctataatgaaagagaagatcagactcgtctacagaattctgccagtgttctggaaagtaaaatagcgtcagtgctacatgaggatattggagaggttgacgatttaattccgctcgtgtgctgctttggacctgccaaatactcctttattccttctggaagaccagcaaataggttgatagaccatgagattcatgatagaatgaaggacatgttttggtctccagacaaatttgtgagggcaccaggagggtcttcatccaatgttgctctagctttagcagcgattggtggaagggttgcattcatgggaaaattaggtgatgatgactacggtcaaagtttgctgtatcacttaaacatcaatggagttcaaactcgagcagtttatatggacccttcagcaccaactgctgtgtctttgatgaaggtcagaaccgaaggaagtctgaagacaaactgtgttaaaccttgtgctgaggattgtttcctgccgtctgatatcaacccggcagttctaaaagaggctaagatgttttactataattcttcagctttgcttgagcccactacagagtcatcattgttgaaagctattgatgtttcaaagaaatttggtggtacaatattctttgaccttaatcttccacttccactatggtcatccagcaaggaaaccaagtcactcattaaggaggcatgggaagctgccaatatcattgaagtcacaaaacaagaacttgagttcctttgcagcatcaaaccttctgagaaatttgacacaaatgataatgataaatccaaattcacacactatagttcagaagttattatgaaattgtggcacagtaatctcaaggtcctctttgtgacaaatggtacctccaagattcactattacacagaaacacacaatggctgggtccgtggtacagaagatgcaccgatcactcctttcaccggtgatatgtcacaatctggcgatgccattgttgcagccctcatgaggatgctggtaattaaccctcacctgatcacagacaaggtttacttgcacaaggcagtcaaacatgctattaaatgtggtgtcatcgaccagtgggtgctcgcgcgagaacggggcttccttcccaaagagagagcagatccaaccagcgagcagtacgaagtgaagtccatcacagagagggaataccgcacacttcctgatgccatgcaatcagaaaacacgtcaaccagtgaacttgcttatgtggagtgaaaggacaggccattggtgtctgtacactggattcctctatttatttatggaaactgactggtgctgcagttggtattcagaagaattagtttaaacatgcagattttaggtttgtcgagtgtaggttaatagcccccaaagtaagactaacatattgataacatagagacaatgcaaatgtggctgatgccaggaatttttcctacaatgcaatatttgttcattcttgatttctctgcaacaccactatcaattgtgggatggaggtcatttgatcttatcggttatgcaccaaat

SEQ ID NO: 207788 - DNA, 2023 bp, Zea Mays
ggttttgctgttcctcgttgctgagcagtgattggaggggctaccgggatttttgctacttgcctccattgatggcttatcttcttctccatcctcagttcacttgctcccagcccccttctcatcgattgaggacttcacaagatgccgtggatgggttaagcgatgaaagtgacggtgaaacctcaacaaaaaagaagagaaccccaagacgtggaagaaagaaagccaccgttgaaacatcgagagatgtaggagaagaaatcgaagtcatcactgaacaaacggccgctgaagagactaaggaagttaagaggagaggccgcaagaaagctgctacttctgcaagctcagaagaggagaaggataaggccaaggaaccgaagaagaggggacgtagaaaagttaagactgtagaggaacctattgataatgctggagagcatctgagcaaagatttgatgctctataatgaaagagaagatcagactcgtctacagaattctgccagtgttctggaaagtaaaatagcgtcagtgctacatgaggatattggagaggttgacgatttaattccgctcgtgtgctgctttggacctgccaaatactcctttattccttctggaagaccagcaaataggttgatagaccatgagattcatgatagaatgaaggacatgttttggtctccagacaaatttgtgagggcaccaggagggtcttcatccaatgttgctctagctttagcagcgattggtggaagggttgcattcatgggaaaattaggtgatgatgactacggtcaaagtttgctgtatcacttaaacatcaatggagttcaaactcgagcagtttatatggacccttcagcaccaactgctgtgtctttgatgaaggtcagaaccgaaggaagtctgaagacaaactgtgttaaaccttgtgctgaggattgtttcctgccgtctgatatcaacccggcagttctaaaagaggctaagatgttttactataattcttcagctttgcttgagcccactacagagtcatcattgttgaaagctattgatgtttcaaagaaatttggtggtacaatattctttgaccttaatcttccacttccactatggtcatccagcaaggaaaccaagtcactcattaaggaggcatgggaagctgccaatatcattgaagtcacaaaacaagaacttgagttcctttgcagcatcaaaccttctgagaaatttgacacaaatgataatgataaatccaaattcacacactatagttcagaagttattatgaaattgtggcacagtaatctcaaggtcctctttgtgacaaatggtacctccaagattcactattacacagaaacacacaatggctgggtccgtggtacagaagatgcaccgatcactcctttcaccggtgatatgtcacaatctggcgatgccattgttgcagcctcatgaggatgctggtaattaaccctcacctgatcacagacaaggtttacttgcacaaggcagtcaaacatgctattaaatgtggtgtcatcgaccagtgggtgctcgcgcgagaacggggcttccttcccaaagagagagcagatccaaccagcgagcagtacgaagtgaagtccatcacagagagggaataccgcacacttcctgatgccatgcaatcagaaaacacgtcaaccagtgaacttgcttatgtggagtgaaaggacaggccattggtgtctgtacactggattcctctatttatttatggaaactgactggtgctgcagttggtattcagaagaattagtttaaacatgcagattttaggtttgtcgagtgtaggttaatagcccccaaagtaagactaacatattgataacatagagacaatgcaaatgtggctgatgccaggaatttttcctacaatgcaatatttgttcattcttgatttctctgcaacaccactatcaattgtgggatggaggtcatttgatcttatcggttatgcaccaaat

SEQ ID NO: 207789 - DNA, 1931 bp, Zea Mays
ctcagttcacttgctcccagcccccttctcatcgattgaggacttcacaagatgccgtggatgggttaagcgatgaaagtgacggtgaaacctcaacaaaaaagaagagaaccccaagacgtggaagaaagaaagccaccgttgaaacatcgagagatgtaggagaagaaatcgaagtcatcactgaacaaacggccgctgaagagactaaggaagttaagaggagaggccgcaagaaagctgctacttctgcaagctcagaagaggagaaggataaggccaaggaaccgaagaagaggggacgtagaaaagttaagactgtagaggaacctattgataatgctggagagcatctgagcaaagatttgatgctctataatgaaagagaagatcagactcgtctacagaattctgccagtgttctggaaagtaaaatagcgtcagtgctacatgaggatattggagaggttgacgatttaattccgctcgtgtgctgctttggacctgccaaatactcctttattccttctggaagaccagcaaataggttgatagaccatgagattcatgatagaatgaaggacatgttttggtctccagacaaatttgtgagggcaccaggagggtcttcatccaatgttgctctagctttagcagcgattggtggaagggttgcattcatgggaaaattaggtgatgatgactacggtcaaagtttgctgtatcacttaaacatcaatggagttcaaactcgagcagtttatatggacccttcagcaccaactgctgtgtctttgatgaaggtcagaaccgaaggaagtctgaagacaaactgtgttaaaccttgtgctgaggattgtttcctgccgtctgatatcaacccggcagttctaaaagaggctaagatgttttactataattcttcagctttgcttgagcccactacagagtcatcattgttgaaagctattgatgtttcaaagaaatttggtggtacaatattctttgaccttaatcttccacttccactatggtcatccagcaaggaaaccaagtcactcattaaggaggcatgggaagctgccaatatcattgaagtcacaaaacaagaacttgagttcctttgcagcatcaaaccttctgagaaatttgacacaaatgataatgataaatccaaattcacacactatagttcagaagttattatgaaattgtggcacagtaatctcaaggtcctctttgtgacaaatggtacctccaagattcactattacacagaaacacacaatggctgggtccgtggtacagaagatgcaccgatcactcctttcaccggtgatatgtcacaatctggcgatgccattgttgcagccctcatgaggatgctggtaattaaccctcacctgatcacagacaaggtttacttgcacaaggcagtcaaacatgctattaaatgtggtgtcatcgaccagtgggtgctcgcgcgagaacggggcttccttcccaaagagagagcagatccaaccagcgagcagtacgaagtgaagtccatcacagagagggaataccgcacacttcctgatgccatgcaatcagaaaacacgtcaaccagtgaacttgcttatgtggagtgaaaggacaggccattggtgtctgtacactggattcctctatttatttatggaaactgactggtgctgcagttggtattcagaagaattagtttaaacatgcagattttaggtttgtcgagtgtaggttaatagcccccaaagtaagactaacatattgataacatagagacaatgcaaatgtggctgatgccaggaatttttcctacaatgcaatatttgttcattcttgatttctctgcaacaccactatcaattgtgggatggaggtcatttgatcttatcggttatgcaccaaat

SEQ ID NO: 207790 - DNA, 3703 bp, Zea Mays
gttttataatggaaaaaatctcctcccgggattcccccagccaccaagcccgactccgctgatcccctcaccacgcaaccctcgccggatcccggcatgccgtcgtggaagcctctcgctggcggcaagctcaagaagccgctcactgacaagcagcgcgctgccgcggagcagcgcctgtcccacctccgcgcccacctcatcctgcgctccctcgactccccagctggcggggcccgttccctaccgccgccgcaggaggcggcgctcgatgccctcggcctgctcatttttttccgcctcgacctgcagtccggcgccccgcgccccgacctcatcgctccgctcgtcgcctactacgaccgtgtctgcaagcgcagcttcgtccgcggcgtccgtgtcggcgtctcgcgccaccacatcatccgcgcgctctgcctaccctcgaagcccgcctctgcggcgccggccccagcagacgtcgatcccgcagcggtggtcgctgccgttatgcagctccttcaggattatgtcctgctcccgttccagggggacgacaggtgcatactaccgcagcaggtggctgccgcagagcagatggtcagggagggggcggcgcatagggttgattggggagagctgatctggggcctcgtcgagaaggagatgctcgagctgcccaagagggaagactgggtgtgctactacgggccgcacctacagcggctcatttatgcccaaaagccacatctgttggagctggtggaggaagggcctgttcaggagccgtctgctaatgtggatttgaaaaggaagagcatggtggagctggagcaaggggatggggatagagaagcgggtaacaatgtcaaaagcaagagcttgaatgattcagaatcggggaaggctggtgcaaggaatgatggtttggacgagttggagttggctgatgctgttacgaggaacaaggtcatgggggagttcggtttaggggatgtagatgctaggaagaacagcatagtgaaactagaggttgtcgacgaagatgcaaggtgcaagtgcttgaatgaaattcaggctgtggatgctatcaacaacaatatagttgaattggatgcggccaatgaagatgcaaggagcaagagcttgaatgaatgtgaggctgtggatgtggatctggatgctatggacatcaatataaatgacagagagacgatcaatggagatacaaggagcaagagtttgaacgaatctgaggctgtggatctggatccagatgccatggaaaacaatatagatgaaatggagacggtcaatgaagatgcaaggactaagagcttggatgaatttgaggctgtggatgtggctccagatgccatggacaacaatatagatgaaatgggtgtggtcaatgaagacgcaaggagcaagggcttgaatgaatctgaggctgtggatgccataaacaacaatatagttgaattggatgcggtcaatgaagatgcgaggtgcaaaagcttgaatgatgaatcagagctggttgaagaggaatttaagagcccaagctttgatgacatgaacaccgtggatgagcacgtcaatggcacagacacggatggattatgtttgggatttgtggaagttgaagcggtgcctgctgtacatgaggcaatgcctgataataatgaagaaacgacagaggaagcaccagcagggggtgctgatgtggcaggcagtgataatgtggcagtgcctacagatgtggattgtgaagaacactatgttgaggcagtagttgtaacacaagaggtagtggctgttgcagaggagttgggggatgaggaggccaagagggatgaagagaaggatgtgatgggattgagcttgggttttaattctaccaatggttatggtgctatggatgtggaaaaggaaaccaatgttgaaagtttggatgaggacgagagtgacagtggcaatgaagaggcagaagagtcagaggatggtgcatttgacgttaatgatggagaggacatgaattggagaattggggatgtcaacgggggtgagggaatgacacattccttacaacgctgtaacacatttgggggcatggagtttgagaacctgaataaaggagaggatgagatgagggatgagttaagatttgacgattttcctgcaagggcatctttggaaaggatgacatcatcaaacctcctccaagccatgaactcaattccctcatcatacaatgtatcagagaatgtgcatgatctgccctctggggatttcttggctatgggggctgatgcacataagagtggagtggacctgggaccagggagctcatatttatttgggaataatggtaagaggaatattgatgatattgatgggtacaatggcaatatgcaggtgcaagaggggtttcctcggtctaatcagcagaagaggatgcggcatagtaacagtagcaacatatcacctggatcaggctttttcaatgcaagcttttcggtgcctatacagaacttgatggttgaggcaagcaggctctatgagcagaatgagcaaaaacttcagagtttgcaatttgagaagcaacattggtctgacatgctgcagcagaaggaagccattatccaatccctaaactcagctcgttttgagcaacataataagtatcaagcggagcttagacgcttcgagcatgatctgaatgttatggctcagttggtcactacatacaaaaaagctttaaaacagacccgggcttcttttgatgagtacaggaagaagttcccttgcaatgttcctctttatggtgatgttgcttgtggcggtggtcttgttcttagtgtgagggagttggagaaaaggcggtgtgaggagcagcagcaaaatattgccatggtaaatggtatgattgaaagattccagtacaaatggctctcaaagtttgaagagtggggactttctgtcaattcactgtggagcagaatggaaggactctataaggagattgagcttctcaaggaaaacagaagagcaagatttgctaccccagctacagaggaatctaccctagctacagaaggatctactccagctacagaggaatgagctccctgacaatcagaggttcagttgtgatgtgaagatgactccctattactgccctaccctctgctggatgttttggtgtcaacgagcatacaagagcaattgtggctgcctggtggtggtacatactgtagtaagataaatagtttcgcttgtaactatggttgtttcctcatgtagggacgttttgattattagtgcttaatttaggtgcatttagggttccgtaatctatatcaaagtgtgcgtttcatatccttttttatgcactaacgacgtgctcatggcctcggaaagccatttaaagactgcatatgctagtggcaccactaatccatactgccttcagcttaactgctggtagtagcttctgcacctgactagtggcctagtgggcggatactgctaggccatgaacaagtttcaggtatcatacgcgatgcactagctgcatttggctctagtggtttgaacgctaatctctatattgggagagggagtttccagtagggtctctgattctaaatcttaattccatgtgtaactaaataatagaatttaggaaaattgattccaa

SEQ ID NO: 207791 - DNA, 3355 bp, Zea Mays
cccacgccagcgcggtcccctccccgaattccccaagccaccatgcccgactccgctgatcccctccccacgcaaccctcgccggatcccgacatgccgccgcggaagcctctcgctggcggcaagctcaagaagccgctcactgacaagcagcgcgctgccgcggagcagcgcctgtcccacctccgcgcccacctcatcctgcgctccctcgactcccccgctggcggggcccgtgccctaccgccgccgcaggaggcggcgctcgatgccctcggcctgctcaatttcttccgcctcgacctgcaatctgacaccccgcgccccgacctcatcgctccgctcgtcgcctactacgacccggtctgcaagcgcagcttcgtccgcggcgtccgtgtcagcgtctcgcgccaccacatcacccgcgcgctctgcctaccctcgaagcccgcctccgcagcgccggccccagcagacgtcgatcccgcagcggtggtccctgccgttatgcagctcctgcaggattacgtcctgctcccgtttcaggggggcgacatgtgcatactgccgcaggaggtggccgccgcagagcagatggtcagggagggggcggcgcatagggttgattggggagggctgatctggggcctcgtcgagaaggagatgctcgagctgcccaagagggaagacggggtgtgctactatgggccgcacctgcagaggctcatttattccgaaaagccacatctgttggagctggtggaggaagggcctgttccggaggcgtccgctgatgtggagatggaggatgaggatggtgatgtggatttgaaaagcaagaacttggtggaactggagccgggggatggggatggagaagcgggtaacgatgtcagaagcgagagcttgaaggattcagaattggggaatgctggtgcaaggaatgatggtttggacaagttggagttgggggatgctgttacaaggaacaaggtcatggaggagttgggtttaagggatgtagatgctaggaacaacagtatagaggaactagaggtggtcgaggaagatgcaaggagcaagagcttgaatgaatgtgaggctgtggatgccataaacaacaatatagttgaattggatgcggtcaatgaagatgcgaggtgcaaaagcttgaatgatgaatcagagctggttgaagaggaatttaagagcccaagctttgatgacatgaacaccgtggatgagcacgtcaatggcacagacacggatggattatgtttgggatttgtggaagttgaagcggtgcctgctgtacatgaggcaatgcctgataataatgaagaaacgacagaggaagcaccagcagggggtgctgatgtggcaggcagtgataatgtggcagtgcctacagatgtggattgtgaagaacactatgttgaggcagtagttgtaacacaagaggtagtggctgttgcagaggagttgggggatgaggaggccaagagggatgaagagaaggatgtgatgggattgagcttgggttttaattctaccaatggttatggtgctatggatgtggaaaaggaaaccaatgttgaaagtttggatgaggacgagagtgacagtggcaatgaagaggcagaagagtcagaggatggtgcatttgacgttaatgatggagaggacatgaattggagaattggggatgtcaacgggggtgagggaatgacacattccttacaacgctgtaacacatttgggggcatggagtttgagaacctgaataaaggagaggatgagatgagggatgagttaagatttgacgattttcctgcaagggcatctttggaaaggatgacatcatcaaacctcctccaagccatgaactcaattccctcatcatacaatgtatcagagaatgtgcatgatctgccctctggggatttcttggctatgggggctgatgcacataagagtggagtggacctgggaccagggagctcatatttatttgggaataatggtaagaggaatattgatgatattgatgggtacaatggcaatatgcaggtgcaagaggggtttcctcggtctaatcagcagaagaggatgcggcatagtaacagtagcaacatatcacctggatcaggctttttcaatgcaagcttttcggtgcctatacagaacttgatggttgaggcaagcaggctctatgagcagaatgagcaaaaacttcagagtttgcaatttgagaagcaacattggtctgacatgctgcagcagaaggaagccattatccaatccctaaactcagctcgttttgagcaacataataagtatcaagcggagcttagacgcttcgagcatgatctgaatgttatggctcagttggtcactacatacaaaaaagctttaaaacagacccgggcttcttttgatgagtacaggaagaagttcccttgcaatgttcctctttatggtgatgttgcttgtggcggtggtcttgttcttagtgtgagggagttggagaaaaggcggtgtgaggagcagcagcaaaatattgccatggtaaatggtatgattgaaagattccagtacaaatggctctcaaagtttgaagagtggggactttctgtcaattcactgtggagcagaatggaaggactctataaggagattgagcttctcaaggaaaacagaagagcaagatttgctaccccagctacagaggaatctaccctagctacagaaggatctactccagctacagaggaatgagctccctgacaatcagaggttcagttgtgatgtgaagatgactccctattactgccctaccctctgctggatgttttggtgtcaacgagcatacaagagcaattgtggctgcctggtggtggtacatactgtagtaagataaatagtttcgcttgtaactatggttgtttcctcatgtagggacgttttgattattagtgcttaatttaggtgcatttagggttccgtaatctatatcaaagtgtgcgtttcatatccttttttatgcactaacgacgtgctcatggcctcggaaagccatttaaagactgcatatgctagtggcaccactaatccatactgccttcagcttaactgctggtagtagcttctgcacctgactagtggcctagtgggcggatactgctaggccatgaacaagtttcaggtatcatacgcgatgcactagctgcatttggctctagtggtttgaacgctaatctctatattgggagagggagtttccagtagggtctctgattctaaatcttaattccatgtgtaactaaataatagaatttaggaaaattgattccaa

SEQ ID NO: 207792 - DNA, 2607 bp, Zea Mays
ccagcctctcatctcatttctgtgtctttgggctgcgatcggatgatggacttaggcacacgtgactggtggactagacaggaaaatcccaagttacgacgacttccccgagacgacggcgtaacaaggggggaaaaaaggaaaggggatcgccatggcagcgtcgccgcagcagcaaggccagggcggccctggcagcggcgggtggactcccgagcagttctggtcgctgctggacaaggcggaccgccggttcgcccgggtgcgagacctgccctccttcggccgccaggagcccgacgagttcgccaaggccttccgcgcctacacccagctctggcggatgcagcaggagcaccgtcaccgtcttctcgacgcgggcctccgccgctggcaggtcggcgagatcgccgcccgcatcgcccacctctactacgcccagtaccagcgcaccgccgacaccgcgcttctctccgaggcgttcgtcttctaccacgccgtcctcgaccgcgcctacttccaggacgccgaccaccacctcgcccccgccaaacacctccgcttcctcgccaggatgccgaatacaaggagtggaagcatgtcgtgcaagagatcgcgaggttcctgcgagctgactcaccatttatgaacatgaggccgctcaggtacagctatgcattcgatccgcccccggacacgcttcgtactgtgccaactactgtcaagaagcgaggtctcgtcttaagtgacaccatactttgcagctactatcctaacgaggtcaaatttacagacctctccatagatgtattcagaatggttcagtgcctcgaatgggaaccatgtggttcatttgcgctaaacgatggttacagcgcccatgatgaaagtggacaaaatcaacccaatctattgaaagatttaagagatgctgcactgcccccgaatccacttaagacaattctctatcgcccttcggtaacacatttcctaacggtcctttccacaaaatgcgaggagcttccttcaaatggtatcatgttaatatatctttcagctacaggggagatgggaacttctggattttgtcctgatactggtgaaaatgttttgagcaactttaataagtttgacatatccagtcttagtcatactagttcaaaggaaaacaaagaaccttgtctatggttaggctgccgtgaaactgaaggttcaaattgcatataccctggtgatctaatcccatttacaagaagacctctatttttggtgattgacagtagcaccagctatgcattcaagtctattcatggtactgaaaggggggagacttctgccatgctactttcaccaagttcccgatcttccgctgcgggattcagtggcgattctactcggcacagtggtagccaatttactatgttcctcacatctccattgcaagctttctgccttctgcttggcaacaatgggacagatattgacagggatgcatataacaaagctgaggagttattattattgtccctaaatgaatgggctgcgactttagttgcatcatcttcacttcattctatttgggttgaagttttaggcgacccgctcctaagaaggttacttctcaggttcatcttctgccgagcaactcattccctgttcaaaccaacaaaccataagacagagttccttccgacctgcatgcctcctttgcctgagtctgttgatgcagagagcatgctctcccaaagctgtgtgctgcgagtcgcatcattctttggcgctgccagtcagttctcatttgctgaggttaccacatggcctgatgttgactctgaggaggctgttgtcaccagttcatctggcagtgccaacaaaggtgtgcctgagacagccagagattcagacatttcaaactcatcatcatctttttgatgcgaccatggcgctaccttcgtccgcttgtgttatttacttatctgcatatgcggatccatttgtaattactggtgctcctttatgcttgatttacacatcatgcagaactgccttgcctttttgtttcctggttacttactgaattaatagtcactagaacatttttttatcccttagtttggaggtgtggaggagctgtgtgagaaagtgtggttgaagagtgttgtttcgttactgtccatggctcggtagaatgtattccctcggtcatttcggtttttctatgtatgttttctatacaccttggtatacattagattagatacataataaaagttatatatgtaaaaaagacaaaatggcatctaatttagaacggaaggaatattatgcaatatttttgttagattaccgtgtttattcttaatataatgggccttggtttagcccatgttatagatatagtcctttagtccagcatggtccaagcacaaaaaggtccgacacatttaaattaaatttcgggctgataatggtccataattgttataggctatgtcggcctagtccatgggtttagttctcgacccacgacatattatgtgttagaccttttttttttgcaacccgaaattataaatagcctaaaattcacattagatctcgaaatcc

SEQ ID NO: 207793 - DNA, 1090 bp, Zea Mays
agcttctgagaaaggaatgcatttcataggaggagagagcgcagctcttggtagggtacatgagtacttctggaagaaggatcagctgaaagattacaaggtgaccaggaacggcatgttaggtccagactactccacaaagttctctccttggcttgcttctggcagcctttcgccgcgttatatttgcgaagaggtgaagagatatgagaagcaaagagtggcaaatgattcaacatattgggttttatttgagttgatatggagagactacttcagatttctatcagcaaaatatggaaacgccatatttcacctgggaggcccgaggaaagtagtatcgaagtggagtcaggaccaagcactgtttgaatcatggagagatggtcgaactggataccctcttattgatgccaacatgagggagctttcagccaccggttacatgtccaaccgtggtcgtcagattgtctgctcatttcttgttcgagatatgggtgttgattggcgaatgggagccgaatggttcgagacatgcttattggattatgacccagcttcgaattatggcaattggacatatggagcaggagttggcaatgatccacgagaagatcgatacttcagtatcccaaaacaagccaagtcatatgatcctgaaggggaatacgttgcatactggttaccagaacttcggtcacttgcaaaggaaaggagaaatttcccaggagcctcatacatcaggcaggtagtaccactgaagtttgatggtggaaatcagaggaaggatcagcaattcaaccggcagagaagaccaaacaacgtgtacataagacaagtaaaataggaggctcttgattcacttgaaattgaaccatctatcagtaggagatgaagcaaatttttacacaactgattgtggtgtaaacatacgcgaattactctatggtcttatgcaatgttcattgatgcattcagatacactttgcaacgtttgtcagcagatccagcagtccagcacaaagactcagaagacctgaacattgacttgcacatccaacacattttaacatggcaatcagaaactgaa

SEQ ID NO: 207794 - DNA, 1483 bp, Zea Mays
tttttttgcatcgaacacactgtggttagttctagcctcccagccacccacgcttctctcgtccctcccctttgtcggtgtcttccccctctctcttctcttctctacaaatctctcttccgcatccgccgcaaaaccctaacctaagcggctcaaccctacgattaccgccgccgccgccccccgctcgcccacgcaagcttgggcgggcctccctcagctcggccaagagcccgaccccctgctccggcaccagcgccgccaccgccatggatatggaagtgtacgagcgcctcaccgccgaaaccagtcactaccgtggcacgcgtttcgatgcgctgatcgggctcgacgaggtggagcctagtgacgaggaagaggatgaggaggaagaagagcgagcggcgggtgccggggctggagacgagctgctctgcccgttctgcagcgaggagctggacgcggtggggctgtggtgccatatggacgacgagcaccgtgctgaggtgtgtccaatttgcacagataaggttgatatgaacttgattgtccacatcagctcacagcatcgaggtttcttgaaggataagtggagaaatcagcaaggttcatctggggtgcgttattcaacacttgccttattgaagaaagatctacatgagaggataagtggatcatctcgtgctgccccagtcagcacggtgcctgatcctctactgtcctcttttgttggtagcttttatgaagtcgatttgccaaaggatgctaaaaaagagtccttggttgagacagaagtgagaagtgataacatagagcagagagcagcggagagctttgatgagcctttgctccctgaggtgaaggaggagaaaaccaggaggagccaatttgtgcaggggcttgtcttgtccctgatgtttgatgacatcttatgaagagcacatcccaaaaggggaagggagaaggcatattttgctaccagcaaacgtttcgccggcacagctgttgtaacgattcgctgatttgccatcggaagatggtgacattgctctgggataatgggggagatgaactgtggatatggatgtttcgtagtactatgcatcatcattgcatgaataatagagtatatgtatgtatagtttgttagcatcatggtactggatattctggggctctgtatgtatattgggaggccgaaatggaccctacctatcataaatcagccatttgataatgtgcatgtggtgtttttctggaagcctgggatgtgcgtaggtaacaccagacacatctgcctgtggttgtcgtaccgacttttcaacaaatcctttatttcaaaaataaaatggcatggtttggttaaatttggacgaaaggattcacgttttttttgttcaaaaataaaacggcatggtttactttttttagtggtgtgatgtatcggcgttcggttcccatcatcgacaagtgtgaagagtaa

SEQ ID NO: 207795 - DNA, 1125 bp, Zea Mays
cacaaggccggagcccacgtcccacccctcctgcatttcaaaataatatctccctgcgcttttcctagccctttgtcatccaaggatacaataaacaaccggcgcttttacacccccgccaagaacaggagcaacaacaataaggctcctcgcaacaatccattctcatccatggcgaagctcatgaacaagctggtcgattcgttcgagcacgacgagatactggacgtcggctgcgtgcgcgccgtgctggccgagctcgtcctcaccttcctcttcgtcttcaccggcgtctccgccgccatggccgccggtgaccccggtgcacgccctgggcaggggcatcagcccgatgcagggcctggtgatggaggtcatcctcaccttctccctgctcttcgtcacctacgccatgatcctggacccgcggagccaggtccgcgccatcggcccgctgctgacgggcctcatcgtcggcgccaacagcctcgccggcggcaacttcaccggcgcgtccatgaacccggcacgctccttcggcccggccctggccaccggggactggacaaaccactgggtctactggatcggcccgctgctcggcgggcccctggcaggcttcgtgtacgagtcgctgttcctggtgcagaagatgcacgagccgctgctcaatggggaagtctgacgaccatcagcccctgtgttgtggcgcatgcttcatgcttgtttctgtaaaacaggtcattctctgcaagcatggtacatacattggccaaggtaattagagaggcttgctgtaaagcagtaggattgctggctgtagaaattgttgatgggctttttttgggggtttcctgccaaggaattctttcttttatataatctcaaaaaagttttttttttttggtatgggctgggttctatcaagggtttgttaaggctattagtttaccatgtagcagaaaaactagtgggacgtgaagttttttcacgtacattgtaatactttggtatttttgtctaccagatgaaactggaagtacagagcaaaaacttctctatcaaacagtatttatgcctaccgcattttagtagaaacaacaagaagaagaaaacacaacctca

SEQ ID NO: 207796 - DNA, 833 bp, Zea Mays
taccacgtgattttactccaagtgaccccggtgcacgccctgggcaggggcatcagcccgatgcagggcctggtgatggaggtcatcctcaccttctccctgctcttcgtcacctacgccatgatcctggacccgcggagccaggtccgcgccatcggcccgctgctgacgggcctcatcgtcggcgccaacagcctcgccggcggcaacttcaccggcgcgtccatgaacccggcacgctccttcggcccggccctggccaccggggactggacaaaccactgggtctactggatcggcccgctgctcggcgggcccctggcaggcttcgtgtacgagtcgctgttcctggtgcagaagatgcacgagccgctgctcaatggggaagtctgacgaccatcagcccctgtgttgtggcgcatgcttcatgcttgtttctgtaaaacaggtcattctctgcaagcatggtacatacattggccaaggtaattagagaggcttgctgtaaagcagtaggattgctggctgtagaaattgttgatgggctttttttgggggtttcctgccaaggaattctttcttttatataatctcaaaaaagttttttttttttggtatgggctgggttctatcaagggtttgttaaggctattagtttaccatgtagcagaaaaactagtgggacgtgaagttttttcacgtacattgtaatactttggtatttttgtctaccagatgaaactggaagtacagagcaaaaacttctctatcaaacagtatttatgcctaccgcattttagtagaaacaacaagaagaagaaaacacaacctca

SEQ ID NO: 207797 - DNA, 2184 bp, Zea Mays
ctgagatttcgcgctccgttcacccaaaatttccccatctccgacctcccccttcctctccccctgccgctccccgcgccgagaaggagaaccccagccgccgcgcagcgcgccgcccatggcctcctcgtcggagaacgcggctgtgccgccggaggaggagccccaggccccgccgccgccggacacagagcctaccgaggcggcgcccggcgaggcggaggatgagccgcaaaccctagagcgggcgcaggagctcttcgacaggggttccaaggccatcgaggatgaggacttcgtcgacgccgtagactgtctcagccgagcgctcgagatcagggcttcacattatggagagctcgcaccggagtgtgccagcacatacttcaaatatggatgtgccctgctatacaaagctcaggaggagagtgatgttttgggaaatgttcccaagagcttgccaaatgaagactcagtgaagagtacagctactaaagatgacagtggaacctcaaaggtctctggtaccgatgcggaggatgctgcgtcatcagaaaaagttgatgctgaagaaggtcacaactcaaatggcaaaaatcaggagaatgggaatggtgaagttgagaaagatgatgacgacgtcgacgatgatgagaagatgggagatgaagaggataatgatttggatctttcttggaaaatgttggacattgctagggcaatagttgagaagagccaagataacactatggagaaagtaaaaatatattctgctcttgctgaagtggcaacggaaagagaggacatggacaactcactcagtgactatatgaaagctttatccatgttggagcatttggttgagcctgaccatcgtcgagttgtggaattgtatcctctttgtcatagttacactattttgtctgctaaagagagatattacaacctgcagtcagaattatatgacattaggatcatcaaattgacttgaatgtaattcttacgtcatatataatgactggagtctggaggtagtattattacataaataagcatctgcaacctggtcgtgccttgctctatttttcatgcctttattttatagttatttgtagcctgataaacttataatttgggttggtaaagaatgccttttttatattcaataaattagttcagttgttttggtggaatgcgtatccataacattatttacttgaacgcacatgctactttagatgatatgattgcttcccagggtcagtttgttgatcttcctttgttatttgccttaatccagtcttagaaacttccgcatttgtttggtttatgaactagtttccaagatcggagaagcaatttcatactgtgcaaaagcaatttcgctatgcaagtcacgcatacagagcctgaaaagttccaaggatgctttgttggctggtatagatggtgatgcatctgctgctgaagctgaaggaggctcagaaaaatctgccattgaaaaagagctagagcagcttactagcatattgcctgatcttgagaagaagcttgaggacctgtctgaagcaaacccaagcgctgacatggatgagatggtgaaggcaatcgtgtccagggtaactgatgtgatgccaaaagctgcatcttttacttcttcccagatggcaacctcaagcaatggattcgactcctcggttatgtctacggcagcgacaaccggaagctctggaagcaccgtgactgaccttggggttgtaggcagaggcgtcaaacgagctagcatcaagccgatctctgctgaacctgctgctaagaaacctgcacttgattcaccatctcaacaaggtgacagcagcatcaactctgaggttgttcctgcaacgcagactggagacgagtcagtatctaagtaaattacaatttcattagccctactgtaatgttaacttgctggaacatattagctgctatgtaaacgcttaagaagggactgctggggccatagactcatcgtgagctgaccattgaaatgttaaattgctgagatcatcatggcggtaaatcatgtctgctatatcaaatatgcttggtgagatgtgtactttctgatttttttgatgtatctgaccgtagtagcccatcacttgcctatccactgctgtggctgtgctacgataggac

SEQ ID NO: 207798 - DNA, 624 bp, Zea Mays
tttttttataaatagtcttcttcagttaaatggtaaaaaaaaactaaagtgcctaaaggtaccaatagcactttcccaaccattgtaaaagagctcttgttttaattttgtttcctgttttaaccatggaccagacaagatgagaactttaaaaaggttttacatcaagagagtacaagatctccataaggaagtacaagtatttgaggaaaaggaccttatgaaaagcttgagcaaatcaacttgcgtgccagaagttctgtctacttgtgctgatcagtcataccttggaatattactgaattgttgcctttgttgctcactggcttcaatacttcatacaccactaaatgagacatctgcaagattctttgcagcctcagttgttgttgctctagaagaacttcatcagaagtccattatctatagaggtgtttcggcagacattcttatgctcgacagatcaggacatctgcagctggtggattttaggtttgcaaagaagttggaaggtcaaaggacatacacaatatgtgggatcgctgactctctggcaccagagattgttcttggtaggggtcatggatttcctgctgactggtccctttgattttgtatgatcag

SEQ ID NO: 207799 - DNA, 1622 bp, Zea Mays
ccttcctttccctcccctcccctcccctcaaaccgcccctcgttgtaaaaggaaggagacgaccgaggctggggaaaggggagaagatttttcagattctgcggcagcgacctacccagctccgcgcgagagagaccgagcggcagcagctctcttcccttcccttccctccgacatgacgccgcatctgcccgccgtctcctcctcctcgaccaccaccacatcccgcgccgccgcggccgcccaccacctgctcgacgccgccgccgcgcccccgtcctcgccgcaccagtaccggaggcggaggcggcgccgggtgctggggtgcctccgcccgcgcgccgcgtccgtccgctgctgcgccgcggcggcgcgggcggcggaggccaccacgcgtgtcttcgtcgtctccgacctgcacacggactacccggagaacatggagtgggtgcgccgcctgcccgcccaggtcggggcgggcgaggggcgaggcgtcgacgcgctcgtcgtcgcgggcgacgtggccgagaccagggataacttcgcgcgcaccatggaggtcctcagggagcgcttcgccgccgtcttctacgttccagggaaccacgacctctggctgcgccgcgagggcggcctctatatggattcgctggagaaactgactgcattgcttgatgcatgtagtgagctgggtgtggatacaggcccaagaacgataggtgacttgggaatcataccattgttctcatggtaccacaagagttttgacaaggagaaggatgttaacagtgtgcgtgtcccttcgctagaaatggcttgtaaagactttcatgcttgccaatggccttcagacctgacaaatgatgatgaggctcttgctctttactttgacaagttgaatgacaagaatcatgatgctattgaagaagtgaaaagtagcagcaaacatatattaacgttttcacactttgtaccaaggcaagagttgtgtccggagaaacgaatgctttattacccatatcttcctaaggtcattggctctgattttttggagaggaggctgagagatatacacagcaacagagaagacagagcagcttgccatgtttttgggcacactcatttctgttgggattctgtggttgatgagatcaggtacgtgcaggctcctctggcataccctcgagaaagaaaacgccggatgaacggtgaaggctggctgccattttgtgtataccgtgacggtttcaacccagaaatttatccagcactgtggtcagattactacaacaagaacaaaagggaacccgagaacactcagctcgcgccttgggttgccagccattacgcaaagtaccacaagttccactgaccctttctgagttgccttggctttttgccgaattgatgcagatcgtcccttcaggatggtgttgaattagctgggaaaaggagatattgacgttttacctgtacatgatcttttcttgtttctacccttaccataacttttgggcaagttattttttattggtgtatctggaaatcatttgtctgaaatctgaagagaagggaaagtttgtgtcgcggcctcgctgagtgcatcaactcgcaacctgttg

SEQ ID NO: 207800 - DNA, 1112 bp, Zea Mays
tttaatttggagggggtacagtggatttacagtggatttggagagcgctgcggaggaggagtggaaggcctgtgccgcccacgcggccgccgcgcccctccgtgcggctagcatcccctcccctctcggctgcttgctgcggcggcgcgtcggcccacgggtgaagaggggagagaaatggctgatggtgaggacatccagcctcttgtctgcgacaatggcaccggaatggtcaagagttggagactgccaagaacagctcctcagttgaaaagagctatgagctacctgatggccaagtaatcaccatcggtgcagagagattcaggtgccccgaggtcctcttccagccatccatgattggtatggaggctgctggaatccatgagacaacatacaattcaatcatgaagtgtgatgtggatatcaggaaggacctctacggcaacattgtgctcagtggaggttcgactatgttccccggtatcgctgatcgtatgagcaaggagatcacttcccttgcaccaagcagcatgaagatcaaggtcgtcgcaccacctgagaggaagtacagtgtctggataggagggtcgatcctagcctcgctcagcactttccaacagatgtggatatccaaggaggagtatgatgagtctggcccggcaatcgtccacaggaagtgcttctaggttccgcaagttcctcattgttatctagtctcaagttatgcccccgtcatttctcgagatatgtgtggcagatttgcctgcgacgtttattttcatcggacctgagtcttctcggggttagcagctacctttgaatgttgtggctccctgtgcgagcgtgctgtgtcgtatcacctggtttgtgagattagttgttgtcaaacttgcttggtttgattggttgtgcgtttaagagctgatagttatatacatatattgctttgctataccgccgctatatctatgtagcctttatgtatgtatctggattctgaaatgcaagaatgaacttcgagcagcctttgtgttgccgatattttgtggtgccgttattgaacagtgtgccaactgaagattatacgaccgtggaagcctggtttggat

SEQ ID NO: 207801 - DNA, 1767 bp, Zea Mays
  misc_feature (1767)..(1767): n is a, c, g, or t
atgaaaacaagttataccaatatgatatatagaaactgtagtaatatagacatctataaattttctctctccaccttcggttacctcctcgtttctacggtttaacgattttcaaattcggcctaatcaagtcaaggtactcctaattgatatacgtttaattaaaaaagtgaaaggtccgctgcatatgcttgtcgggttcacccaatcacccctgcgctgcttcctttgtcaggttcagtcgctcaccattctgccgttcacacctctctcgctgcctttatttcctgttggcgacgctctcgccaggtcttcggcggcccgttcggcggcgactagcgcctccgtttgccaggtcttcgtcgtccgtttcgccgtcgactggtgcccagcagccaggtacatctggaagaatgggggtttaccttagcacaccgaaaactgacaaggtatccgaagatggggaaaacgataaacttaaattcggactttcatctatgcaagggtggcgtgcaactatggaagacgctcactcggctttgctagatcttgacaatgacactgcattctttggtgtttttgatggacatggaggaaaagtagttgccaaattctgtgcaaaatatctacacagagaagttctccataccgaagcctatgctgctggtgacctgggtgctgctgtccacagagcttacttaagaatggatgaaatgatgcggggtcaaagaggatggcgggaactccaagcacttggagataagataaatcagttcactggcataatagaaggcttgatttggtcccctaaagcaagtgattcaaatgatagacatgatgattgggctttcgaggaggtacttgtggaactggcatggttccataattctatactcatcttcctatgtctaggagagcatgccatctgccttttatttattaatttggcacagtcattggatttcattctgaaagtgtcacgggattatcattaataagggaccacactctgactttactgggccaaattgtgggagtacagcatgtgtagcattagtcagaaataggcaactcgttgtggcaaatgctggtgactcccgctgcgtcatctcaaggaatggccaggcatacaatttgtcaagagaccataaaccagagcttgaggcagagagagaaaggatacaaagtgccgggggttacattaaaatggggcgtgtaaatggaagtttaaatttgtcaagagctattggtatcatttttttacttgcttctttttgttcatacctctcatcttaactgatgtcttgcatatgcaaaatacctttctaggagacatggagcttaaacaaaacaagttcttgtcccctgataagcaaattttgaccgcaaaccctgacataaacattgtcgagctatgtgacgacgacgaattcattgttttggcatgtgatggcatttgggactgcatgtcaagccagcagttggttgatttcatccgtgaacatataaacacagaggaaagcctttctgcagtatgtgaaagagtgcttgatagatgcctggctccatcgacggctggcgagggatgcgataacatgacgatgatcctggtgcagttcaagaagccatttgctcaggtaaaggatgccagtggtgcggaacaactaactggagatgcgggatgctctgagacccagtgagtttacctgtgattgtggtaactacttttgttttttcttcactatgaatctttctttcttcctcgcn

SEQ ID NO: 207802 - DNA, 2003 bp, Zea Mays
ccacaaggcccccggagtctctgcccagcgggcccggcagtcccacaagatcacagcacatacgcttcctccattccactcggccgcgaccgcgaccgcgacggcgagcgaggggccgaggtgggacgccgcgccgcttctgcagaaagaaaaaggccaggactcttgatttgctcctcgcgggggttcggtcccatggcggcagctgcgctggcaatggcagagcaggtggtggccgagctccgagtgaggtgtgagacgccgccgtcgatgctgcgcgaggtggccgtggagatggcccgcgagatgggcgcggggctggagaaggacggcgggagcagggtcaagatgctcctctcctacgtcgataagctccccacagggagagaggaaggattattctatggattggacctaggaggaacgaatttccgcgtcttgaaagtgcaactaggtgggaatgcgaagcatgtcgttgaccgtgactccagagaagtcggcattccgccacatctgatgtcagggagctcctcggagctttttggtttcattgcttctgaattggccaagtttgttgacgatgatgagaagtgcgctaacatttcgaatggcaagaagcgagaaatagggttcacgttttcgttcccagtgaagcagcgttctgtagcttccggtacgcttgtcaagtggacaaaggcattttccattaatgatgctgtaggcgaagatgtggtggctgaactgcaaacagccatggagaagcaaggtctggacatgcatgtagctgcattgattaatgatgctgttgggacgctggcgggagcaaggtactatgacaaagatgttgtcgctggtgtaatatttggcactggcacaaacgcagcatatgttgagaaggcaaatgctattccaaaatgggagggtgagctgccccattcaggagacatgaaaaaaaacgattttgctgtacttcaggtcatcaacatggaatggggtaacttcttctcatctcatctccccatcactgaatatgatcaagaattagataaggagagcttaaatccaggagaacagatttacgagaagttaacgtcaggaatgtatttaggtgaaattgtaaggagggtgctccttaaaatatcattgcagtccgccatttttggtgatattgaccacactaagcttcaaacccatttccttctgcggactccacatatttcagcaatgcaccatgacgaaacatctgatctgaagattgtggccgaaaattttgaagaaaacctagaggtacgtcggcattgtgaccatgtgctttgtcatgtcatacagaggtatacctgagctggtttgatgatgtctactgcagattacaggcacatccttggaggctcgtaagctggtcgttgaaatctgtgacattgtggcgacaagagcagcccggctggctgctgcggggcttgcagggatcctcatgaagatcgggagagatcacagcgtcgaggaccaacggtcagtcatcgccatcgacggaggactgttcgagcactacaccaaattccgccggtgcttggagaccacactgggtgagctgctaggagacgaggcgtccaaggcggtggccatcaagcatgccgacgacggttcaggaataggtgctgccctgattgcagcttcacagtctcagtacaaaaacgacttagtggccgtcaagcatgcagatgacggttcaggagtcaagtatgcagaagacaagcgtgcagatgacggatcagaaataggtgctgccctgattgctgcctcgcaatctcagtagagagatgtccgagtggtatagaggtagcaagtagctatgatttgtttccaacgtcttaactgtccagcgtctgcagtttagcatgctagagctggatgcgatctgtaaccaaaaccaggcttggccaactggctgttcataattccaataacagcagggttgcagatgtctcctaaccccctacgatctt

SEQ ID NO: 207803 - DNA, 2414 bp, Zea Mays
agcgggcccggcagtcccacaagatcacagcacatacgcttcctccattccactcggccgcgaccgcgaccgcgacggcgagcgaggggccgaggtgggacgccgcgccgcttctgcagaaagaaaaaggccaggtgaggtgctcgacgcgggagcgggaccggagtagcgccagcgtcccattcccggccaacctccctgttcatctccatgccgacctgactcggtatgataagatccatgtgatccagagcctgatccgaacacgatccctttctcccctttccctgcgtagtgcggagctccagtgaaggaaccaaacagcgcaacacacgaacacaccaggcggcaggctccaccccgtccttttcctgccttttccccccgtcgagttaatccatccagtcgccaaaagctttgctaaatttcacgtgtctcgcctcgagtcgtccctaatccgacgatgccttgttctactcctaaaaaaacccaaatatcctgactttctcttgctgctagcctcccttttcccttctcccttaatcgcactgttggaagctcttcgctgtcacccccacccacctccggcgctcttttttagcattttccttgggctctggactccaaaatcccagccttttgtttgcttctctgtctcctgctgattggtgtccccgggtccaggactcttgatttgctcctcgcgggggttcggtcccatggcggcagctgcgctggcaatggcagagcaggtggtggccgagctccgagtgaggtgtgagacgccgccgtcgatgctgcgcgaggtggccgtggagatggcccgcgagatgggcgcggggctggagaaggacggcgggagcagggtcaagatgctcctctcctacgtcgataagctccccacagggagagaggaaggattattctatggattggacctaggaggaacgaatttccgcgtcttgaaagtgcaactaggtgggaatgcgaagcatgtcgttgaccgtgactccagagaagtcggcattccgccacatctgatgtcagggagctcctcggagctttttggtttcattgcttctgaattggccaagtttgttgacgatgatgagaagtgcgctaacatttcgaatggcaagaagcgagaaatagggttcacgttttcgttcccagtgaagcagcgttctgtagcttccggtacgcttgtcaagtggacaaaggcattttccattaatgatgctgtaggcgaagatgtggtggctgaactgcaaacagccatggagaagcaaggtctggacatgcatgtagctgcattgattaatgatgctgttgggacgctggcgggagcaaggtactatgacaaagatgttgtcgctggtgtaatatttggcactggcacaaacgcagcatatgttgagaaggcaaatgctattccaaaatgggagggtgagctgccccattcaggagacatggtcatcaacatggaatggggtaacttcttctcatctcatctccccatcactgaatatgatcaagaattagataaggagagcttaaatccaggagaacagatttacgagaagttaacgtcaggaatgtatttaggtgaaattgtaaggagggtgctccttaaaatatcattgcagtccgccatttttggtgatattgaccacactaagcttcaaacccatttccttctgcggactccacatatttcagcaatgcaccatgacgaaacatctgatctgaagattgtggccgaaaattttgaagaaaacctagaggcacatccttggaggctcgtaagctggtcgttgaaatctgtgacattgtggcgacaagagcagcccggctggctgctgcggggcttgcagggatcctcatgaagatcgggagagatcacagcgtcgaggaccaacggtcagtcatcgccatcgacggaggactgttcgagcactacaccaaattccgccggtgcttggagaccacactgggtgagctgctaggagacgaggcgtccaaggcggtggccatcaagcatgccgacgacggttcaggaataggtgctgccctgattgcagcttcacagtctcagtacaaaaacgacttagtggccgtcaagcatgcagatgacggttcaggagtcaagtatgcagaagacaagcgtgcagatgacggatcagaaataggtgctgccctgattgctgcctcgcaatctcagtagagagatgtccgagtggtatagaggtagcaagtagctatgatttgtttccaacgtcttaactgtccagcgtctgcagtttagcatgctagagctggatgcgatctgtaaccaaaaccaggcttggccaactggctgttcataattccaataacagcagggttgcagatgtctcctaaccccctacgatctt

SEQ ID NO: 207804 - DNA, 1587 bp, Zea Mays
ccagcttttttttttgaacaatccccgattggttcccgtgccgtagatgtttggctcgaagtcagtcctgagcatgtcaaggctgaagtgcgcactgcggggatttgatctgagggttctcttgatcctactgattggtgtgccaattttgatctttgccatatatgtgcatggccagaaggtgacttacttcctccgaccaatctgggagaagcccccaaagcccttcacaatactccctcactattaccatgaaaatgtctcgatgggtaacctatgcaagttgcatggatggaaagtcagggagactccacgccgtgtctttgatgccgtgctcttcagcaatgagcttgacatccttgatatccgctggcacgagcttagcccgtatgtgtcagaatttgtgctgcttgagtccaattcaacttttaccggcataaagaaggaccttcacttcaaggaaaaccgccaacggtttggctttgcagagtcacggttgacctatggcatgataggtggaaggtttgtgaagggagagaacccatttgtcgaggagtcgtatcaaagggttgctctcgaccagctcattaagattgcgggcatcacggatgacgacctgctgatcatgtctgatgttgatgagatcccaagtggacacaccatcgacctcttgagatggtgcgatgacgttccggagatactccatctccagctcaggaactacctctactcgttccaattcctacttgacgacaagagctggagggcttcagtgcacagatacagagctgggaagacgaggtatgcacatttccggcagacggacgacctcctggctgattcagggtggcactgcagcttctgcttccgctacataaacgacttcatcttcaagatgaaagcctacagccacgtcgaccggatcagattcaagtacttcctgaacccgaagaggattcagcatgtgatttgcgaaggggctgaccttttcgacatgcttcccgaagagtacacgttccaagagatcatcgccaagctggggcctatcccgagtacattctccgccgttcatctccctgcctatctgctggagcaattcgatcggtacaggtaccttctcccaggcaactgcgttagagagagtggctaggcagctggctgcccgccgtctgcatcatgaccctgaggcgcacggacgtcgctctctcgcggatgtctgtcttatggcggcgggggttgtgtccgatacgattggctgacttagttgagtgatcgcttggctgctggttgagttcatatgggatttttgtgtaccgtgtaacagaaaccatggaaggcctgacggctgcgtagcgcagcgcgtgcttgatcgctgctgcgttcttgtttggcagaggagagctgagagctttttgttcgttgcttccatgattgatatatgatgaactcagaacctgttgtagatctcataccgccgagcgacattcagattctttctttctttgctcgtgatgtacattgccgttcacttacctagttacgttgagccatagatgtttccaatccagtttctgactgtttctcata

SEQ ID NO: 207805 - DNA, 3333 bp, Zea Mays
gcggactgcgctcttgcgccttaacggcggagatactcgacaaggggaagaaggtgaaggatggaggagggggagacggggaaaccgatctcaacgaggctcttacctcgcaggtgcgtcgccttgccatggaggtccggcaacttggtaattcacgttcaataactgttctcaatggaggttctgcacaatcaggagtatcaggcctgatagtacctgcagcaactgtaggagcactgggttacggttatatgtggtggaaggggatctcgttctcagatctaatgtatgtcaccaagcgcaacatggcaaatgctgtttcaagcatgactaaacatttggagcaagtgcaaagttctcttgctgtaagtacttattctttcctaatttatcacaggaactacaccttcaactgcataatgtgtctactatgacttctaggtagtgtttggttgggagacatggtaggatgggacggtcttgtctcattttttagagacgggacgatcctgtctgtttggttgggagagagcaagatgaccccgttttttgttttgtttgaggacataaaaatggaatcagctaaatgacatatgggctccacatgctagtctcttattttccctccttcctctgctttctttcctatgcatgcatctacgagaagcaccactatcccacactgagctcacggtcgagggtcgacattcaaaacagggtgtggagctgtcccattcagcggcaaagctagggcagagctcgcccacacgctgacggagctagcccatgctctggcagagctggaccacgtggctttggcgccaccgtcggagcttggccatgcttggacctcacccctcctcttcctctcctgcatgcaccttatcttccccgcgagcgagctcgttccacctcggacgaccttgtctaagaattttctgagggcggggtgaacccgcatctggaaagaatattccctagtggatcatctgttgggtcctgacaggcggacccagacgctcagtgacatgtgtggagaacaatgcacaacaaaatgttaggtagggagttgtagcgtctatgtgtgtcctgtctgctacaggacgggggtatttatagggcaacctgggggtaggtggtccaaagtacattcgtacccccggttaccaactacattcctagaatatttcgtgcaacgggataattacaacactgcgacaccttttggacacatgcacacacaatcctaccctctagttacactgacaaatgggccctctgggagccccacagtgggccggtgacccggatgggtcttcttccctagagccttcgttgtctcatagccttcgcgtcttggtacccctcgctctaggggggcatagcttttgcagagggccccttggagattcgtgtctggcgaagtccttgacctcaatgtttggcccgagcctaggctctcgcctgggcaccagtcttcgccacggtcggtattagttgcttgaccgaaggctccatcgaagttgcgcctgacgaaggctctgattgtccctgtccctgcgctcaagtatggttagtcaagacgaggggcaaacttgcgcggtgctgattgaggtctggttcgacctctgccccaacatcattccatctcattgtctctgaaccaaatactgtgcgaaggtgggatatcccacttgggttggtctcgtcctcagaaccaaacactaacctagtttgacattctctaaaacgatacttctcaaggtttaaaagtgatagcgtggaatattgtgtgttgtattgtactgagtagcatgattacaatatatatacctctaccagattgtgctccacctgatttatagaaacaatgatcagggagatctcacactaaataggaaacaaccatataggaaagaatcacccattagcgcctaatcaggggcaatcagccaacgcctgatagggaagggtatcacctaattaggggcaatcaatcaacacctaatagggaaggaaacctcctaaacatggaaggaaataagctgtctaacccccccggcagtcgaaacgtcgatggcgcaaacgttaagacaggagcggaactcggagaagacaagtgggcagccccttggtgaagatattcgcacactgagacgtcgttgggacatgaagaacacgaacatcaccaatggcagcgcactcgcggacgaagtggagatcaatctcgatatgcttcgtgcgctgattgacacaatagactaaggagctcttggtcaagtagacaacactgtcattgtcagaataaactaaggagctcttggtcaagggactgtgaagctcctatagtaactgacgcagccaggaagcttcagcgacaccgttagcaaccaccctgtatttagcctctgcactggagctagacatcgtaggctgctgcttggaggaccaggagacgaggttatctccaaggaaaacagcgtaccctgaagtagacctgcgagtattcgggcatccggctcaatcagcatctgtgtagacgagtagagcagaggtcatggatgggcgaaggaggagaccatgactaagtgtcccacgaaggtagcgcaggatatgcttgactgccgagaggtgaatatcccgaggatcatgcatatgaagacacacttgctgaacaacataggagatgtcaggctgggtgaaagtcaagtattgcagagcaccaaccaggctgtgatactgagtggggtcgctgatagtggtaccggtcatggcagagaccttagcatgagtgtcgacaatactgcacggcttgcaatcggacataccagcacgctcaagaatatcgtgagcatactgctgctgtgaaacgaagaggccctctgaatgttgctgaagagccacacctaagaaatgatggaggataccaagatccttcatggagaatgccttttgaagagcacctaatcagggagatctcacactaaataggaaacaaccatataggaaagaattacccattagcacctaatcaggggcaatcaaccaacgcctgatagggaagggtatcacctaattaggggcaatcagtcaacacctaatagggaaggaaacctcctaaacatggatggaaataggttgtctaacaaaaaggcgtcgcctaggcgttcagatgccaaaatattatggacgtcggcgtggccttgacccagaagcttagggcgtccgccttggcgcactaggcgtcgccttcctggcggatgccttatgccctaaaaatctgggcgcggggtggctcctctttggcgtgtattgcctttgatgtgcggaaga

SEQ ID NO: 207806 - DNA, 487 bp, Zea Mays
gaaccggctctgacaataggccccaccctcacggcctaacctttctctttctctctctacctcctcgcgcgccctcgtcagaccagccacgcgctcaactccacgggccttgagctagggttttcttcgccgctacctccctacgaggcgggcgtgcagccatggcgctggtgcaggcgggcatgggccttacccgggtcgttatcctcgtcggcgccggcgttgccggctccgtcgtcctccgcaacggccgcctcgccgagatcctcggcgagctccaggagatactcgacaaggggaagaaggtgaaggatggaggagggggagacggggaaaccgatctcaacgaggctcttacctcgcaggtgcgtcgccttgccatggaggtccggcaacttggtaattcacgttcaataactgttctcaatggaggttctgcacaatcagcatattagcgtattagcctatatgcttggcgaaggatagg

SEQ ID NO: 207807 - DNA, 1688 bp, Zea Mays
cctggcgctgtctgttctacgccgtcgcggtcacctccagccctagcgccatctgctctgtacccccaccgctaacctcctcagctctggcctgcccgcgctcctcctcgttgcctggatccggcagcccctccatgctcatccgcccctttcccgctctctcctcgaccggctcgctcccgcttgcaaccacccacaccctgttctgctccagagacagtcctggcggcgctgaaggaggagacgcagcagcggatggatgacgcatcgattggaggtcattggtggccactcacgcctcctcagacctcaccctcacttcgtcgtcagcgcaggtttggccaacggcccccgaccggatcgcaggtcctcctcacggtgaggcacagcccacagagtcgagccggacatcacaaccatgaccatgaggcatcgtcgcagcagtcggagtcatttttgctgccccctcccgacacctgtaaattttgtatgccttcacgccgtgaagccacatttgcggccattggcaatggctgtatccactgtttcgatccatatatttggtgatgtcccttcttcacctcttgttgggctgcttcaggacaaaatcaataactggagggagacatctcttatattgacatccatccttttcgctgcagttgtgttctggttcattggtgtgtctgaggctgcacaagatgctcttgatcatcttttcaaccaaggccacaatctcgtaacagaaaatgagatttctgatacctttactaggctggttgaaaggctaccacaagtggtacttggaagcgaggagacaaccacactttcacatgctaggatgttgttggctctgaccttttatgctggtccctagtttctgataaatcatcttcactgttctcctgtattgctgctcgtttctttgattgtttgggtttatgcataggtcatagctcacagttttctggttccatggacaagctaattgtatcaaagccactatctatcgggtatctttattcagttgctgagttgaagagtggcgcctattctaaagatacaactaacatatctctgcatgccacgtcaacatttgcagcctccaaaatatctgttatccatgataatgctttgccaaattcattacttggtacagttgaatatgagttgccccatgtgcctccatggtttattcatgctggtatccagaagctttatggggttcttgctggaataattagacttgttggcctatcaacagtgtcagtgggctggtgtggtctgcttagcagcaggtagcactacaaccagcaatgtatggatgaattgaaggtagtaaagaacgcatgcaatcttatagaaactctacatcttgaaactggcatgattgacaaagaagctggatgcatcctttggattggtgtcttcttatcatcaagcagtaatgtgaagcaagttcatttgttgactaagaacagatgagcacaaatcagtgaagagttcattgcactagagatggaggatggataggtggtagatttcaatatggctttgatactattgtttctctttacaatctttgtacataacaagaaaaatgacgttgtatgtggatactattgtaattcaagaatttatttctgaataataaatatatttgtttataatttgtgtatgggtttggt

SEQ ID NO: 207808 - DNA, 2211 bp, Zea Mays
catttctccagcactacaacacaaatccccctatagcaacgcatccgtagcaacacatggttttttgcgttgtaaaaagttagcgagcaacacttaatatgcgttgcaaccatcatctgttacgttattagggtgatggcaacgcttaatatgtgttactagcaccatccgttcattaactaggatgtagaaacacttaatatgtgttgctagtggcatctgttgtttaaatagaatgcaacaacacttaatatacattgctagaggaatgtattgattaatatattctcacttattaaaagcagcctttcatgtttttttcttaaacaatccaccgttcgtccaatcctagataaaaaataaatgaaaccgaacggaaccctatcgcgagttcatcctggcgctgtctgttctacgccgtcgcggtcacctccagccctagcgccatctgctctgtacccccaccgctaacctcctcagctctggcctgcccgcgctcctcctcgttgcctggatccggcagcccctccatgctcatccgcccctttcccgctctctcctcgaccggctcgctcccgcttgcaaccacccacaccctgttctgctccagagacagtcctggcggcgctgaaggaggagacgcagcagcggatggatgacgcatcgattggaggtcattggtggccactcacgcctcctcagacctcaccctcacttcgtcgtcagcgcaggtttggccaacggcccccgaccggatcgcaggtcctcctcacggtgaggcacagagtcgagccggacatcacaaccatgaccatgaggcatcgtcgcagcagtcggagtcatttttgctgccccctcccgacacctgtaaattttgtatgccttcacgccgtgaagccacatttgcggccattggcaatggctgtatccactgtttcgatccatatatttggtgatgtcccttcttcacctcttgttgggctgcttcaggacaaaatcaataactggagggagacatctcttatattgacatccatccttttcgctgcagttgtgttctggttcattggtgtgtctgaggctgcacaagatgctcttgatcatcttttcaaccaaggccacaatctcgtaacagaaaatgagatttctgatacctttactaggctggttgaaaggctaccacaagtggtacttggaagcgaggagacaaccacactttcacatgctaggatgttgttggctctgaccttttatgctggtccctagtttctgataaatcatcttcactgttctcctgtattgctgctcgtttctttgattgtttgggtttatgcataggtcatagctcacagttttctggttccatggacaagctaattgtatcaaagccactatctatcgggtatctttattcagttgctgagttgaagagtggcgcctattctaaagatacaactaacatatctctgcatgccacgtcaacatttgcagcctccaaaatatctgttatccatgataatgctttgccaaattcattacttggtacagttgaatatgagttgccccatgtgcctccatggtttattcatgctggtatccagaagctttatggggttcttgctggaataattagacttgttggcctatcaacagtgtcaggatagcatactcatacagtaatattgttgcatgtcgctcttaacaaatttcatttaggaaccgggccatgttgatgttcaaaagagttgtcagaagttcatgacatctggtatttattatatcttcttttgtagtgggctggtgtggtctgcttagcagcaggtagcactacaaccagcaatgtatggatgaattgaaggtagtaaagaacgcatgcaatcttatagaaactctacatcttgaaactggcatgattgacaaagaagctggatgcatcctttggattggtgtcttcttatcatcaagcagtaatgtgaagcaagttcatttgttgactaagaacagatgagcacaaatcagtgaagagttcattgcactagagatggaggatggataggtggtagatttcaatatggctttgatactattgtttctctttacaatctttgtacataacaagaaaaatgacgttgtatgtggatactattgtaattcaagaatttatttctgaataataaatatatttgtttataatttgtgtatgggtttggt

SEQ ID NO: 207809 - DNA, 1744 bp, Zea Mays
cagctcgcatcgtcgtcttcgcagataaaaaataaatgaaaccgaacggaaccctatcgcgagttcatcctggcgctgtctgttctacgccgtcgcggtcacctccagccctagcgccatctgctctgtacccccaccgctaacctcctcagctctggcctgcccgcgctcctcctcgttgcctggatccggcagcccctccatgctcatccgcccctttcccgctctctcctcgaccggctcgctcccgcttgcaaccacccacaccctgttctgctccagagacagtcctggcggcgctgaaggaggagacgcagcagcggatggatgacgcatcgattggaggtcattggtggccactcacgcctcctcagacctcaccctcacttcgtcgtcagcgcaggtttggccaacggcccccgaccggatcgcaggtcctcctcacggtgaggcacagcccacagagtcgagccggacatcacaaccatgaccatgaggcatcgtcgcagcagtcggagtcatttttgctgccccctcccgacacctgtaaattttgtatgccttcacgccgtgaagccacatttgcggccattggcaatggctgtatccactgtttcgatccatatatttggtgatgtcccttcttcacctcttgttgggctgcttcaggacaaaatcaataactggagggagacatctcttatattgacatccatccttttcgctgcagttgtgttctggttcattggtgtgtctgaggctgcacaagatgctcttgatcatcttttcaaccaaggccacaatctcgtaacagaaaatgagatttctgatacctttactaggctggttgaaaggctaccacaagtggtacttggaagcgaggagacaaccacactttcacatgctaggatgttgttggctctgaccttttatgctggtccctagtttctgataaatcatcttcactgttctcctgtattgctgctcgtttctttgattgtttgggtttatgcataggtcatagctcacagttttctggttccatggacaagctaattgtatcaaagccactatctatcggcctccaaaatatctgttatccatgataatgctttgccaaattcattacttggtacagttgaatatgagttgccccatgtgcctccatggtttattcatgctggtatccagaagctttatggggttcttgctggaataattagacttgttggcctatcaacagtgtcaggaaccgggccatgttgatgttcaaaagagttgtcagaagttcatgacatctggtatttattatatcttcttttgtagtgggctggtgtggtctgcttagcagcaggtagcactacaaccagcaatgtatggatgaattgaaggtagtaaagaacgcatgcaatcttatagaaactctacatcttgaaactggcatgattgacaaagaagctggatgcatcctttggattggtgtcttcttatcatcaagcagtaatgtgaagcaagttcatttgttgactaagaacagatgagcacaaatcagtgaagagttcattgcactagagatggaggatggataggtggtagatttcaatatggctttgatactattgtttctctttacaatctttgtacataacaagaaaaatgacgttgtatgtggatactattgtaattcaagaatttatttctgaataataaatatatttgtttataatttgtgtatgggtttggt

SEQ ID NO: 207810 - DNA, 1346 bp, Zea Mays
gtttgaaccccgccctccaccgccaccatcagctcgcatcgtcgtcttcgcagacacctgtaaattttgtatgccttcacgccgtgaagccacatttgcggccattggcaatggctgtatccactgtttcgatccatatatttggtgatgtcccttcttcacctcttgttgggctgcttcaggacaaaatcaataactggagggagacatctcttatattgacatccatccttttcgctgcagttgtgttctggttcattggtgtgtctgaggctgcacaagatgctcttgatcatcttttcaaccaaggccacaatctcgtaacagaaaatgagatttctgatacctttactaggctggttgaaaggctaccacaagtggtacttggaagcgaggagacaaccacactttcacatgctaggatgttgttggctctgaccttttatgctggtccctagtttctgataaatcatcttcactgttctcctgtattgctgctcgtttctttgattgtttgggtttatgcataggtcatagctcacagttttctggttccatggacaagctaattgtatcaaagccactatctatcgggtatctttattcagttgctgagttgaagagtggcgcctattctaaagatacaactaacatatctctgcatgccacgtcaacatttgcagcctccaaaatatctgttatccatgataatgctttgccaaattcattacttggtacagttgaatatgagttgccccatgtgcctccatggtttattcatgctggtatccagaagctttatggggttcttgctggaataattagacttgttggcctatcaacagtgtcaggaaccgggccatgttgatgttcaaaagagttgtcagaagttcatgacatctggtatttattatatcttcttttgtagtgggctggtgtggtctgcttagcagcaggtagcactacaaccagcaatgtatggatgaattgaaggtagtaaagaacgcatgcaatcttatagaaactctacatcttgaaactggcatgattgacaaagaagctggatgcatcctttggattggtgtcttcttatcatcaagcagtaatgtgaagcaagttcatttgttgactaagaacagatgagcacaaatcagtgaagagttcattgcactagagatggaggatggataggtggtagatttcaatatggctttgatactattgtttctctttacaatctttgtacataacaagaaaaatgacgttgtatgtggatactattgtaattcaagaatttatttctgaataataaatatatttgtttataatttgtgtatgggtttggt

SEQ ID NO: 207811 - DNA, 1603 bp, Zea Mays
tttagggtttgaaccccgccctccaccgccaccatcagctcgcatcgtcgtcttcgcagagacagtcctggcggcgctgaaggaggagacgcagcagcggatggatgacgcatcgattggaggtcattggtggccactcacgcctcctcagacctcaccctcacttcgtcgtcagcgcaggtttggccaacggcccccgaccggatcgcaggtcctcctcacggtgaggcacagagtcgagccggacatcacaaccatgaccatgaggcatcgtcgcagcagtcggagtcatttttgctgccccctcccgacacctgtaaattttgtatgccttcacgccgtgaagccacatttgcggccattggcaatggctgtatccactgtttcgatccatatatttggtgatgtcccttcttcacctcttgttgggctgcttcaggacaaaatcaataactggagggagacatctcttatattgacatccatccttttcgctgcagttgtgttctggttcattggtgtgtctgaggctgcacaagatgctcttgatcatcttttcaaccaaggccacaatctcgtaacagaaaatgagatttctgatacctttactaggctggttgaaaggctaccacaagtggtacttggaagcgaggagacaaccacactttcacatgctaggatgttgttggctctgaccttttatgctggtccctagtttctgataaatcatcttcactgttctcctgtattgctgctcgtttctttgattgtttgggtttatgcataggtcatagctcacagttttctggttccatggacaagctaattgtatcaaagccactatctatcgggtatctttattcagttgctgagttgaagagtggcgcctattctaaagatacaactaacatatctctgcatgccacgtcaacatttgcagcctccaaaatatctgttatccatgataatgctttgccaaattcattacttggtacagttgaatatgagttgccccatgtgcctccatggtttattcatgctggtatccagaagctttatggggttcttgctggaataattagacttgttggcctatcaacagtgtcaggaaccgggccatgttgatgttcaaaagagttgtcagaagttcatgacatctggtatttattatatcttcttttgtagtgggctggtgtggtctgcttagcagcaggtagcactacaaccagcaatgtatggatgaattgaaggtagtaaagaacgcatgcaatcttatagaaactctacatcttgaaactggcatgattgacaaagaagctggatgcatcctttggattggtgtcttcttatcatcaagcagtaatgtgaagcaagttcatttgttgactaagaacagatgagcacaaatcagtgaagagttcattgcactagagatggaggatggataggtggtagatttcaatatggctttgatactattgtttctctttacaatctttgtacataacaagaaaaatgacgttgtatgtggatactattgtaattcaagaatttatttctgaataataaatatatttgtttataatttgtgtatgggtttggt

SEQ ID NO: 207812 - DNA, 1743 bp, Zea Mays
ctttcctgaagcttttcttttattgatttagtttgtgtgagcaacacagacacgggtgaattgtcagagaatccaagttgactccggagaaaaggatatggagggttttcttacttagtggagcctctttggtggataggcatggtttctatgattgtaggtgaaattgctaattttgctgcttatgcattcgctccagctattcttgtcactcctcttggtgcactaagtataatcataagcgctgcactcgcacatgccattctacaggagaaactgcacacatttggtatactcggttgtgttctctgtgttgtcggatccatcacaattgtgctccatgctccacaagagcgtgacattgattctgtaaaggaagtttgggatcttgccactgaaccagctttcctttgctatgcggctatagtagttgcgtcagccttagtgcttatatattttgttgtccctcatcatggacaaacaaacataatggtgtacattggagtttgttctcttctaggatcacttacggttatgagtgtaagagctcttggaattgccttgaagctaacattctcaggaacaaatcaattattctatcctcagacttgggcctttgcagtaattgtagctacctgtgtgagcacccaaattaactatctgaataaggcactggatacatttaatacagcagtagtctcaccaatatattacgtgatgtttacatcactaacaattatagctagtgtgataatgttcaaggattgggaccatcaaaatccaacacaaattgttacagagatgtgtggcttcatgactatcctatctgggacgtttcttcttcacaagacaaaagatatgactgagagtcctggacaatgtttgtccacacggcggtcaaagcatgctagtcagaatgcgtttgcaattgaagtcgtgccactaaaatgtcaagattctatagatgatgagaccttgactttgtcacttccccaggaagctcttggggaccattttgctctcagacatgattgattgatgtagaactggagttcacagttttacatcaacctggcctgggatagattgatattgcagattataagttgtcaactgtggtttgcctgtatctaggtgatgattttgacaaagaagcaaaccataaggatgccacattcaggccaattaagtgctagtcatccaagaatactggttctggaaaaggaaaagcgttcgaagtgtacttagtagatggtggtgttgccaactatactaccccccccccttcatttgaggacgtcatgtggtagctgcaatgcaatcttatctggtttctatcaggacgacgccaaatagaaaatcagtcttcatttttacctgtaattacctcaaattgctgcccaggtgtcattgtgtatatttggtctgtgtaagtacttaagggaccctttcatataaactgttaatcattctaattcatgtctgacattgactgtttttaagtcgtccgattagtcgcgattaatcgtccaagtcggtttggaccaatcgcgattaattgctcaagtcgtccgactaatcatgattaatcgcccaagtcggtcagctagaacgaccaacaagtcatacgacatgaaaacaatgttcctgagtatgtgccccattgataaccattatttttcattcttaatattgtttagtgttcaaaaatgcatctctgggactgggatcataagtgcgatt

SEQ ID NO: 207813 - DNA, 1411 bp, Zea Mays
cgagcgagaacgcggtttcatcacaggggtctggtggctgggtggctgggtgtgaaagggccgtgcgggaagctaaccaccgcgaaagcgcctctgggggagtcagacgaacgaagcaatccaaccgaacgaaccgacctaggtcgtcgtcggctcgtcccctccgcaggaccggttcgccgtctcgtcccgatctcgccgcctgcccgccgcgccctattaccgccatggaggcgctgtggaagcaggcctccaggctcaaggaccaggtctctcggcagggtgtgttcaagcagtttggctacgggaattctgataatgcgtttacagatgagtcagaggttaaactgcatcagagattggaaaagctttacttatcgactcgtgctgctaaacattttcaaagggacattgttcggggcgtggagggctatatagtcacaggatctaaacaagtcgaaatagggaataaattgtctgatgacagccagaaatacggtgttggaaacacatgtacaagtggtgatactttgtccaaagctgctacatatttcggaaaggcacgctcacagatggaaaaggagcgtggcaatatgttgaaagcatttggcacacaggtggcagagccactgcgggcgatggttatgggtgcacctttagaggatgccagacatatggcccagagatatgacagaacgaggcaagaagctgaagcacaggctgtcgaagtatcaagacggcagaacagggtgagggaatctactgggaatggcgatatggtatcaaaattggaagctgccgagtacaagcttgaagaactgaagtcaaacatggtgggattagggaaggaagctattgcagcaatgtcggctgttgaggctcagcagcaacggttgaccttacagcgtctcattgcactggttgaggctgagagaacttaccatcagagagttctggagatacttgacaaattggaagaagaaatggtgtctgagcgccaaaaaattgaagcacccccgactccagcagctgaaaattatataccaccaccagcaccaccatcttatgatgaaattaatggagcatttgcatccacttctgttaacgagtcagtccaatctgtcgatttcttccttggagaggcccttgattcatttaatgctgaaagtgagtttgagcttaccttgtcagctggtgacattgtaattgtccgaaagatctcaagcaatggttgggcagaaggtgaatgcaagggcaaagcaggatggttccctcatgcttatatcgaaaggcaggaacgtgttctagcaagcaaagttccacatatattttaggtaagactatttcacttctggagtctcaaggtgaaatggtcaagttgcatggaatttgaagctcctgctggatacct

SEQ ID NO: 207814 - DNA, 1414 bp, Zea Mays
gcgtagagtttgctttgcgcagcgaagatccgtctgtatccccgttaaggttttcatataatgaaaaaaaaaggagaggaacacggcggagggagggatgaagcgatgcgtgcgtgccatggagcagattcgtttcgctttttgccgccatttttatttataaggggcaagaggcaagacgagcaccgcaacactctctctcacacacacctggcaacctccctagacctggagcgcacgagagagagatagaagagagacggaccgacgaccgacggcgatctcgatcgggacgcgggcggcggcgatcatggcgtggcgcggcccgctcggagccggagaggaggccctggacagcggcctcgagctcagcctcggcctcccggcctacttcgcccggccttcaggtttggacgccgccagggaggagcccgccgaggcctctgcctacgctatccaggccgccagtgggagcaatgtctccaaggcaagggtcaggccagcgggcgcggcgccggtggtggggtggccgccggtgcggtcgttccggaggaacctggccgcctcctcctccaggccgtcgtcggggaaacacacccgccaggagggcagcgccaaggacggcctgttcgtgaagatcaacatggacggcgtgccgatcgggcgcaaggtggacctcacggcgtacggcggctacgccgacctctccgccgccgtcggcaagctcttccgcggcctgcttgccgctcagagggaccgagcggccacggcgggtggcgaggaggaggaggagggggagggccccgtgatcggcggcgactacacgctggtgtacgaggacgacgagggcgacagggtccttgccggcgacgtcccctgggagatgttcgtggccaccgccaagaggctgcgcgtgctcaagagctccgacgtgccggcctcgtcggtgacgctgggagctgggggcccggagaggtctgcagccgactgctgctgctgaaacgtgctctgcttcgtcagctgcttgtaaaaagtcccgagtggaggagacgaggagtggccctatccctggcctcttttttgtgtgttgctcttgctgcctttctgctagtggtactagtattgggtgccagtaaaaagtaggagaacaaagtcatgacggtattaaggatgtaatgtgcaagattagcagtggtagtagtcgtaaggtgtttaatgaatctacggtctctgttttggggcatattcgaccgtttaaagctgtatgcacgcgtcgaatttcggtgtggtttctgcatgccggccttaatgtttttcagcttttgtttgcacacgaacgctttagagcaagtttaataatagttggctctaactatttaccatgtcatctataggtatagctaacaataaacac

SEQ ID NO: 207815 - DNA, 963 bp, Zea Mays
attacaccatcagtacaagcttatttgtgaattactaaggatactactggccatagtgcagatggtaaagctctcacttcagaaccgcatataggggaaacacatgtcaactcagcttcagaatccataccaaatgacgcagctcccccaacccagagcaaaatgaatgggtcgaccaagaaatcattagtcaacggtgttttggatcaaccaaatgccaactcagggctagaatcttcgggaaatgattatcctagctacactaactcgagcagtgctatgccacccgcgagtaccgagttaattgggtctgcagctgctgttatagatgttgattctgctgagaatggcccaggtacgaaaccagaacaaccggctaagggagcctcgagagcatcgaaatccaaggttgttccacgaggacagaagagggtgttgcgaagcgcaacaagaggaagagcgacgtaggggcattgctgcgctacattgttgtgtactaatatatgttgacggcccagaagggcaacatgatccctaggttaactagagctagcgccgactggtcgtttccacgtacgatgcactgcgcatcagcctgtatccatgttgtattatcgtagggcttgtaatgaccacatgccctggttagagttgatcattaggaccagtagctgcttgatttgtgtctcggtgatctagctttgggtagtttgtgcagttggaaggagacagtttgttggttgtattgtattgcagcgcacagctagcaagtgttgttgtagccatcaggtacgtgttgtgtagtgaatccaggtccagggacagagctgttcctctgtatggtggaccctgaccctttgttttgtgccatggggcctttctgtgttgtgcttacatgagctggagctgctttatttttctttttttatacgattaatacgctgctgatgagtcttttttttt

SEQ ID NO: 207816 - DNA, 1373 bp, Zea Mays
cctaggcttgttggcaatattttgatcatctgtgaaatgtaactacaaaggaggactacctttccagcttttggacaaaattggaggaatcacgaatagctcgcattggatcatctggagattctgctgttgcttctaaattatggaattatggttccaattccagattatttgagaatgacacttccatattctcattgggcaccgatgagaaagttggagatcctaccaaaactcataatggctctgagaaagttgcagcaacagaaccactcggtagatgctccttacttattacaccaactgaagatagaactgatggtattactgagcctgtggaccttgcaaagaataatgagaatgcaccccaagaataccaagctgcatctgaaattatccctgataaagttgcagagggtaatgatgtgtcttccacaggaattactaaggatactactggccatagtgcagatggtaaagctctcacttcagaaccgcatataggggaaacacatgtcaactcagcttcagaatccataccaaatgacgcagctcccccaacccagagcaaaatgaatgggtcgaccaagaaatcattagtcaacggtgttttggatcaaccaaatgccaactcagggctagaatcttcgggaaatgattatcctagctacactaactcgagcagtgctatgccacccgcgagtaccgagttaattgggtctgcagctgctgttatagatgttgattctgctgagaatggcccaggtacgaaaccagaacaaccggctaagggagcctcgagagcatcgaaatccaaggttgttccacgaggacagaagagggtgttgcgaagcgcaacaagaggaagagcgacgtaggggcattgctgcgctacattgttgtgtactaatatatgttgacggcccagaagggcaacatgatccctaggttaactagagctagcgccgactggtcgtttccacgtacgatgcactgcgcatcagcctgtatccatgttgtattatcgtagggcttgtaatgaccacatgccctggttagagttgatcattaggaccagtagctgcttgatttgtgtctcggtgatctagctttgggtagtttgtgcagttggaaggagacagtttgttggttgtattgtattgcagcgcacagctagcaagtgttgttgtagccatcaggtacgtgttgtgtagtgaatccaggtccagggacagagctgttcctctgtatggtggaccctgaccctttgttttgtgccatggggcctttctgtgttgtgcttacatgagctggagctgctttatttttctttttttatacgattaatacgctgctgatgagtcttttttttt

SEQ ID NO: 207817 - DNA, 2240 bp, Zea Mays
caaaatcgcctcacgcttccgtttcgaatccttcgtcgcctcacgctcacgctcacgctgcttgctcctcctcccccccatccctccgcccctcccatggcgtccctcttcggggctcgccgccggcgatcgccggagtacgacggcgaggacgatagatccggcggagggagggccaagcgccggcgcctgtcgccggaggaggcggcggcgtcgccggcggagccgggcgcggcgacggggactagccacggctggctctccggcttcgtctccggagcgaagagggccatttcttccgttttgctgtcctcttcgcccgaggagaccggctcgggggaggacggggaggtggaggaggaggacgacgacgtatacgaagagggcatcgacttgaatgaaaatgaagatattcatgatattcacggggaaatagttccttatagcgagtcaaaacttgctattgagcaaatggttatgaaggaaacattctcaagggatgaatgtgataggatggtagagctaataaaatcaagagttagagattctactcctgaaacccatgagtatggaaagcaagaagaaatcccaatatgagaatgagacctggtcattcttctccaggctttccactccaagcatcacctcagctatgcactgcagcagttagggaagcaaaaaaatggttggaagagaaaaggcagggactgggcgtaaaacctgaagacaatggatcatgcacattaaatacagatatatttagttctcgtgatgactctgacaagggttctccagttgatttggcgaaatcatacatgcggtcattacctccttggcaatccccattcttaggccatcaaaagtttgacacatcaccctccaaatactctatctcgtcaacaaaggtaactacaaaggaggactacctttccagcttttggacaaaattggaggaatcacgaatagctcgcattggatcatctggagattctgctgttgcttctaaattatggaattatggttccaattccagattatttgagaatgacacttccatattctcattgggcaccgatgagaaagttggagatcctaccaaaactcataatggctctgagaaagttgcagcaacagaaccactcggtagatgctccttacttattacaccaactgaagatagaactgatggtattactgagcctgtggaccttgcaaagaataatgagaatgcaccccaagaataccaagctgcatctgaaattatccctgataaagttgcagagggtaatgatgtgtcttccacaggaattactaaggatactactggccatagtgcagatggtaaagctctcacttcagaaccgcatataggggaaacacatgtcaactcagcttcagaatccataccaaatgacgcagctcccccaacccagagcaaaatgaatgggtcgaccaagaaatcattagtcaacggtgttttggatcaaccaaatgccaactcagggctagaatcttcgggaaatgattatcctagctacactaactcgagcagtgctatgccacccgcgagtaccgagttaattgggtctgcagctgctgttatagatgttgattctgctgagaatggcccaggtacgaaaccagaacaaccggctaagggagcctcgagagcatcgaaatccaaggttgttccacgaggacagaagagggtgttgcgaagcgcaacaagaggaagagcgacgtaggggcattgctgcgctacattgttgtgtactaatatatgttgacggcccagaagggcaacatgatccctaggttaactagagctagcgccgactggtcgtttccacgtacgatgcactgcgcatcagcctgtatccatgttgtattatcgtagggcttgtaatgaccacatgccctggttagagttgatcattaggaccagtagctgcttgatttgtgtctcggtgatctagctttgggtagtttgtgcagttggaaggagacagtttgttggttgtattgtattgcagcgcacagctagcaagtgttgttgtagccatcaggtacgtgttgtgtagtgaatccaggtccagggacagagctgttcctctgtatggtggaccctgaccctttgttttgtgccatggggcctttctgtgttgtgcttacatgagctggagctgctttatttttctttttttatacgattaatacgctgctgatgagtcttttttttt

SEQ ID NO: 207818 - DNA, 468 bp, Zea Mays
aacgaataggtccatcgccgcgcgacagcccactccagccgcgcccagccccgtgaacatccttcctctatcctataccctccagctccagccgccgccagccgtggaggtggagccgcccacgcccagaccccggagcaccgctggagctcgcagcgccgctcgcccggagcacggaggccggaccgccggacggccggagcactgccgtaggtcgcaggcccctcgccccaccggcgcccgaagtccagccgccgactcgccgactcgcaggttgtccagccgccggccgccgactcgtcgttgtccagccgccgaccgtcgactcgttgttgtccagccgccgactggtcgttgtccagccgccgaccacgcggtgaccgtgagcccgtgagcctgtgaccgtgagcacgtgagccaaggagaggtcgtgctccgccactggggagggaggtggtggggaatggc

SEQ ID NO: 207819 - DNA, 2264 bp, Zea Mays
ggcaagagagagaagagaagagaagagaagaggggagtcgaggtcgagagcagcagggagagggaaaatccactaatccccccaccccggctctctcgaaacccgccattcccctccgccgcaaacacgcgtcggagctcgtggcgagcgccgccaccccgcactcgggctggggggcgtccctccgcccccttcgatctagagccggcggccgcgatcccgccgcgggtcctcgcggccgccgcgaattgggtttgtactgacgttaccggtgggcggaggcgctttgatcctgtagctgccgggttgggttcagtagatggcgggcaaggagcagggcggtggaggcccgccgcagaggcctcccatgcccgcagcgtccatgcagccgccaatcaagaagctggtaaggcagctggacttcaactcggcggcgttggcggggaaccccgcgatggcggcagcggcggccgccgtgtctagggctcttcagccgagggcgttgcccgcggggttccagcatccgcagcacgtgagggctgccgtgccgatggtggtgccgcagcagctgcaccagcgggcgctgccggtgatgcgcccgcatccggtggtgggtcatgtgccgcggcacgcggtgccgctggcggtccctgtaccgcagctccgtccgatgccgccacagccagtccagcgtcccccggtcgccgttcccttgaaaccagactcaccaaaaccgtgggcaagactttacgaagggaaagatagcactcccacgaagaaaaagtgctgcaactgcaggaactccagatgtttgaagttatactgtgaatgcttcgcttctggtactcactgtgatggttgcaactgcaccaactgttttaataatcctgagaatgaggttgccagacgtgaagctattgaagctacattggagcgtaatccagatgcttttaggcctaagatcgggagcagtccacatacgaataggaataatgaggtgtctagtgatctccctttagtagggaagcataataaagggtgccattgcaagaagtcaggatgcctcaagaagtactgtgagtgcttccaagctaatatactatgctctgaaaactgcaagtgtatggattgcaagaattttgaaggaagtgaagagagaagaaatcttttccaaggggatcataaaaatgcaattaacattcagcaggcgacaaatgcagctgtaaatggtgctattggaaccacaggattcccttctccctccacgtcaaggaagaggaaacatattgatccttcacttgaccattcaaacaaggaacatgcagcgcacaggaattgtcacatacctcagaaaaatgcagtgcctgatggttcaattccaataagccagtctgcacatcctccaactctgggcccctttaaagttacctacaggccccttttagcagacattgtccaagcagaggacgtaaaggagctatgcaagcttttagtggtggtatcaggagaagccgccaaaacatatgctgaccggaaagcgaaggaagagagggttggcaagaaggaagatgaaagggcagaacaaaaggaagatgacagggcaggttccctagcattgacaaaccatgacagagaaggaaataatcaagatccagataaaaaagcatcaatcgatgaccattcaagcagaggaactcatacgggcaaagctaatcaagaagaatccagacctaactgcgctgatgatcagaagtccaatagacctatgtctcctggaacactagcactgatgtgtgacgaacaagcgttcgagaaaatgtgtgacgaacaagatacagtgtttacggcttctcaaaatgctgttcctcagcagacagttactgtcaaccaaaaccaatctgcactgtacgcagaacaagaaagaattgtgctgacagaattccgtgattgcctccgcaaacttgtgacatacggaagaatgaaagaggaaaggtacgccatggaaatcaaatctgaaacatctggccatcctggacaggtttgtattcggggtgttgcaatgatcaagggaatcatgttttcaccctcctaatttgttgatcagatacatgtatcagtcttgatagataatctagattttagggaattccaatttattctcattggtcagagtaagtgtgatgctggaatgtggatagttagtttagtcataaatgccaaccttgtcgtattttctacattgtagtttctcccttttcttttcc
